United States Patent Application Publication US 2010/0120627 A1 - sequence listing, part 9

SEQ ID NO: 19321 - DNA, 5620 bp, Homo sapiens
tgctggtgcagagggttcgcagctcaggtgagagcgccgggcctccacgcggattgcggacctgcagggagggatgtgctagtgtccagggggcgggaacgcgacgtcccgggaactcccccaaagcaggccgtcgctccctgtgcctcggccggcccgggacctcagcctgagaagggccggtgggggcgggctccgggggcgttaggtggggctgagtcctagttggaagatgctcggtgcgggccgaggtatgggcgccagaatgcagccaggcgtcggaaaacgcggtgctggcttcaggaggggaatgcgcgtttattgtattgaccatgaacctgccacaaagcgcgtacagcccgtgggtctgcggtgagaggccgagcctaggagctagaaggacctcgtgaattttggctctgtcacttgagcgtttgaaaatgaggatattagtaaaaactgctttgtgtcgttcagaggaaggagggagccccaggaacaggagtcccaccgaagaactgctctctgacagaacagagacctcctcaccagggcttccaaacagatgcagaagaacccagaaaggagcaggtcttgatttgcccaaccagcggcacttcttcatccccttgcccagagagcaccagacttggtgatgtcgccacatccagaagccatcacagattgtgtgacactgaacactgtgggccaacttgcagaaggtggttatcctttacggttctccacactctttcaggagcagcagaaaatgaacatatctcaggcatcagtgtcattcaaggacgtgactatagaattcacccaggaggagtggcagcaaatggcccctgttcagaagaatctgtacagagatgtgatgctggagaactacagcaacctcgtctcagtggggtactgctgtttcaaaccagaggtgatcttcaagttggagcaaggagaggagccttggttctcagaggaggaattctcaaaccagagtcacccaaaagattacagaggtgatgacctgatcaagcagaacaagaaaatcaaagacaaacacttggagcaagcaatatgtatcaataataaaacattgactacagaggaagagaaagttttggggaaaccatttactctgcatgtagctgctgttgcttcaacaaaaatgtcctgcaaatgcaactcatgggaagtgaatttgcaaagtatttctgaatttatcattaataatagaaactattcaacaaagaaaataggttgcggtaatgtatgtgagaattcacctttcaaaattaactttgagaaaactcagactggagagaaattttatgaacataataaaaacatgaaagctctcaattataatgaaaatcttcccaagcatccaaagtttcaaactttggagcaagcttttgaatgtaataaaattggaaaagcctttaatgataaggctaactgtgttaaacataacagttctcacacaggagaaacatcctctaaagatgatgaatttaggaaaaattgtgataagaaaactctctttgaccacaggagaactggcacagggaagaaacacctgcatcttaatcaatgtgggaaatcctttgagaagtcaactgtggaggaatataataaacttaatatgggtataaaacattatgaattaaatccaagtggaaataatttcaacagaaaggcacacctcactgatcctcaaacagctgtcatagaagagaacccattggtaagtaatgacagaacacagacttgggttaaatcctctgaatatcatgaaaataagaaatcctaccagacgtcggttcacagagttcgccgaagaagtcactcaatgatgaaaccctataaatgtaatgaatgtgggaaatccttctgtcagaaaggacatctcattcaacatcagagaactcacacaggagagaaaccatttgaatgtagtgaatgtggaaaaactttctcccagaagtcacacctcagtactcatcagagaattcatacagcagaaaaaccctataaatgtaatgaatgtggaaaaacatttgtccagaagtcaaccctcaggggacatcaaagaattcacacaggagaaaaaccctatgaatgtagtgaatgtgggaaaacttttgttcagaagtccaccctcagagatcatcacagaattcacacaggggagaaatcctttcaatgcaatcaatgtggaaaaacatttggccagaagtcaaacctcagaatacatcagagaactcacactggggagaaaacttaccagtgtaatgaatgtgaaaaatccttctggcgaaaagatcatctcattcaacatcagaaaactcacacgggagagaaaccattcaaatgtaacgaatgtgggaaaacttttgcccggacatcaaccctcagagtgcatcaaagaattcacactggggagaaaccatttaaatgtaatgaatgtgggaagaaatttgtccggaaagcaatccttagtgatcatcagagaattcacacaggggagaaaccctttcagtgtaataaatgtgggaaaacttttggccagaaatcaaacctcagaatacatcaaaggactcacagtggggagaaatcttatgaatgcaatgaatatgggaaattatgtaagaagtctaccctaagcttataccagaaaattcagggagaggggaatccctattgatgtaataactagaaaatccttttgacaaaaggaataccccatttgatatcagagatacacaaaaaaccaattgagggtagtgaatgtaagaagacagtcccagaagtaaaccctcactgtgaatcagagaattcacataggaaagaaaccagatgaagatgaatgcaggaagaattgtgtccaaaatgcaaccttcagagtgtatcaaagaattcagacaggcttctgttttcagagtactatggataggcctgaatgaagtcataccctattagatagctcccacacatcacacaggctggtaatctcttcaccagcaccaatttcattttactccaggcacatagtccagatttcccaatctccttttcatccaggttggtctttgtgactggctactaagatgtggatgtccatgatgtatatcacatcccagtctgaaacataagagacttccctaataaattaccagggccctgtcacaacaaaatggatatcatttctaggacaagcttggtgccgtgctttaatgtggcatggtacaagataaagaagtctgtgcctgaatgaatacacgcagcaaaattctcctcttctgtgtctttcccagttgaacattatgtgagcaaaatttaagcttatacagtagtccccccttatctgtattttcactttacgcaatttccattaaccatggtcaactgtactttaaagttattaaatggatccagaaataaacaattcctacattttaaactgcacccgattctgagtagtgggatgaagtctcatgccctcctgctctcccatgagggttattgaatcattccttagtctagcatatccacagtgtatacactatctgccagttagtcacttacttgacattttagttatcagatcacctgtcagggtatgacagtgcttgtattcaagtaacccttgttttactaaataatggcctgaaattgcaagagcatttctggcatgttgttgtaattattccattattagtccttaatttataaattaggcacagcaagagattaaactatcataggcatgtgtatatgtaggaaaaaaatatagtatatacagggttcagtatacccgtggtttcaaacatcaacttggaattcttggagagcattccttgtagttaagcagggactactgtattctgttgagctttcacatgtttgagtctatttgtttctacacataatttagttatcttctgctaggaaggcagaaagcttctgtgtaagccaggcttaagtcaatcagagggcacaaaccttattaggaggctagagagtcaaggagaacctcaaatatgatcagagaattgtggaaaagacatcctttcaatgtaatgaaattgatagtaccacctgatacagggctttgcatgaacctaaaagtcttttggctgaatggtgagcagccactgtgcagttcaacgtaagtgtgccttaattgcacagaggtactgcccccacacctcctgacacctccatataccccagctatatctgctttaaggagttttccctggctccaaaggccattggcacccacccaagtattatgggaaacctccagagaggggagggactcagatttatatggctttattgaatccatgcccaaggcaacatcttactagttcctgtgggggtacaggacacctagatttagctaatggggtttggcaatgggaaggcaaacaaatttaataactttatgggtgaggtactttgggccagtagagtatactacagttatgtttacatctgaaagtgtagtagggattaattcccataagttatagagagaattctaattccctgtaattcgcataagtcatagaattctaatcaggaataattgtatgtaaagatacctctgaggtccaacagctctgatcattttgggcttcaagtctctctctgtgactggtgattttgtgggttgaaacttctggcaaaagggggcagcccttgggagctgggggccaggggattgacttggttccctgacaagggtaccaggtccaccccttctgaaaagcagctgttagtttactcttgggctcttttacacattggatatctcttccttgggtagagggttctgacctaaaattccactttaggagtttgtcgtcttggactcaacaactaacaaaatgaaaaggacccagcaagcctcacttgtggaatgaaaatggggcattcaggaaagcacctgtcctggccccacagtatgtcagctgtataggcaatagtagtagctgtctcttagaagggaaataatgtatcacctctttccagaacgaagcaaagttgctggcttagtagagccctcaattcatagaggttactgtaattgggcctggctcactgatgctttcgccaactgaaactactaggatcctgtgtgtgttcaaactcagtgccattaacaaacccaaagtgaagcggtcactcctctcagtggaaagagcacgaggatgttctcagctctggccaatactccatttcataaaccatgttacatttttgttaagccttggctctggatgtggcctagatatttgatattctaattggaaattacagattaaaaagcaccctttctttgtacagtgggggtaaaagtcacagctgcttagtacaaccatctgggttgctcaagtagatgcccataataagagactattttctgataagactgactggaatcaagctgccgacagctttctccatccagattgtgacggttgctacctggatccatcattttactggtatggcaaaaaatcacccatgtgacactgggtgacatggtaaaagtacatggtacttttacagtaccatgtactgtacaaaataaaggtctctttatctg

SEQ ID NO: 19322 - protein, 683 aa, Homo sapiens; identical to SEQ ID NO: 2380

SEQ ID NO: 19323 - DNA, 5198 bp, Homo sapiens
cccactttccggcttctccctgttagtgtttgctggtgcagagggttcgcagctcaggaaggagggagccccaggaacaggagtcccaccgaagaactgctctctgacagaacagagacctcctcaccagggcttccaaacagatgcagaagaacccagaaaggagcaggtcttgatttgcccaaccagcggcacttcttcatccccttgcccagagagcaccagacttggtgatgtcgccacatccagaagccatcacagattgtgtgacactgaacactgtgggccaacttgcagaaggtggttatcctttacggttctccacactctttcaggagcagcagaaaatgaacatatctcaggcatcagtgtcattcaaggacgtgactatagaattcacccaggaggagtggcagcaaatggcccctgttcagaagaatctgtacagagatgtgatgctggagaactacagcaacctcgtctcagtggggtactgctgtttcaaaccagaggtgatcttcaagttggagcaaggagaggagccttggttctcagaggaggaattctcaaaccagagtcacccaaaagattacagaggtgatgacctgatcaagcagaacaagaaaatcaaagacaaacacttggagcaagcaatatgtatcaataataaaacattgactacagaggaagagaaagttttggggaaaccatttactctgcatgtagctgctgttgcttcaacaaaaatgtcctgcaaatgcaactcatgggaagtgaatttgcaaagtatttctgaatttatcattaataatagaaactattcaacaaagaaaataggttgcggtaatgtatgtgagaattcacctttcaaaattaactttgagaaaactcagactggagagaaattttatgaacataataaaaacatgaaagctctcaattataatgaaaatcttcccaagcatccaaagtttcaaactttggagcaagcttttgaatgtaataaaattggaaaagcctttaatgataaggctaactgtgttaaacataacagttctcacacaggagaaacatcctctaaagatgatgaatttaggaaaaattgtgataagaaaactctctttgaccacaggagaactggcacagggaagaaacacctgcatcttaatcaatgtgggaaatcctttgagaagtcaactgtggaggaatataataaacttaatatgggtataaaacattatgaattaaatccaagtggaaataatttcaacagaaaggcacacctcactgatcctcaaacagctgtcatagaagagaacccattggtaagtaatgacagaacacagacttgggttaaatcctctgaatatcatgaaaataagaaatcctaccagacgtcggttcacagagttcgccgaagaagtcactcaatgatgaaaccctataaatgtaatgaatgtgggaaatccttctgtcagaaaggacatctcattcaacatcagagaactcacacaggagagaaaccatttgaatgtagtgaatgtggaaaaactttctcccagaagtcacacctcagtactcatcagagaattcatacagcagaaaaaccctataaatgtaatgaatgtggaaaaacatttgtccagaagtcaaccctcaggggacatcaaagaattcacacaggagaaaaaccctatgaatgtagtgaatgtgggaaaacttttgttcagaagtccaccctcagagatcatcacagaattcacacaggggagaaatcctttcaatgcaatcaatgtggaaaaacatttggccagaagtcaaacctcagaatacatcagagaactcacactggggagaaaacttaccagtgtaatgaatgtgaaaaatccttctggcgaaaagatcatctcattcaacatcagaaaactcacacgggagagaaaccattcaaatgtaacgaatgtgggaaaacttttgcccggacatcaaccctcagagtgcatcaaagaattcacactggggagaaaccatttaaatgtaatgaatgtgggaagaaatttgtccggaaagcaatccttagtgatcatcagagaattcacacaggggagaaaccctttcagtgtaataaatgtgggaaaacttttggccagaaatcaaacctcagaatacatcaaaggactcacagtggggagaaatcttatgaatgcaatgaatatgggaaattatgtaagaagtctaccctaagcttataccagaaaattcagggagaggggaatccctattgatgtaataactagaaaatccttttgacaaaaggaataccccatttgatatcagagatacacaaaaaaccaattgagggtagtgaatgtaagaagacagtcccagaagtaaaccctcactgtgaatcagagaattcacataggaaagaaaccagatgaagatgaatgcaggaagaattgtgtccaaaatgcaaccttcagagtgtatcaaagaattcagacaggcttctgttttcagagtactatggataggcctgaatgaagtcataccctattagatagctcccacacatcacacaggctggtaatctcttcaccagcaccaatttcattttactccaggcacatagtccagatttcccaatctccttttcatccaggttggtctttgtgactggctactaagatgtggatgtccatgatgtatatcacatcccagtctgaaacataagagacttccctaataaattaccagggccctgtcacaacaaaatggatatcatttctaggacaagcttggtgccgtgctttaatgtggcatggtacaagataaagaagtctgtgcctgaatgaatacacgcagcaaaattctcctcttctgtgtctttcccagttgaacattatgtgagcaaaatttaagcttatacagtagtccccccttatctgtattttcactttacgcaatttccattaaccatggtcaactgtactttaaagttattaaatggatccagaaataaacaattcctacattttaaactgcacccgattctgagtagtgggatgaagtctcatgccctcctgctctcccatgagggttattgaatcattccttagtctagcatatccacagtgtatacactatctgccagttagtcacttacttgacattttagttatcagatcacctgtcagggtatgacagtgcttgtattcaagtaacccttgttttactaaataatggcctgaaattgcaagagcatttctggcatgttgttgtaattattccattattagtccttaatttataaattaggcacagcaagagattaaactatcataggcatgtgtatatgtaggaaaaaaatatagtatatacagggttcagtatacccgtggtttcaaacatcaacttggaattcttggagagcattccttgtagttaagcagggactactgtattctgttgagctttcacatgtttgagtctatttgtttctacacataatttagttatcttctgctaggaaggcagaaagcttctgtgtaagccaggcttaagtcaatcagagggcacaaaccttattaggaggctagagagtcaaggagaacctcaaatatgatcagagaattgtggaaaagacatcctttcaatgtaatgaaattgatagtaccacctgatacagggctttgcatgaacctaaaagtcttttggctgaatggtgagcagccactgtgcagttcaacgtaagtgtgccttaattgcacagaggtactgcccccacacctcctgacacctccatataccccagctatatctgctttaaggagttttccctggctccaaaggccattggcacccacccaagtattatgggaaacctccagagaggggagggactcagatttatatggctttattgaatccatgcccaaggcaacatcttactagttcctgtgggggtacaggacacctagatttagctaatggggtttggcaatgggaaggcaaacaaatttaataactttatgggtgaggtactttgggccagtagagtatactacagttatgtttacatctgaaagtgtagtagggattaattcccataagttatagagagaattctaattccctgtaattcgcataagtcatagaattctaatcaggaataattgtatgtaaagatacctctgaggtccaacagctctgatcattttgggcttcaagtctctctctgtgactggtgattttgtgggttgaaacttctggcaaaagggggcagcccttgggagctgggggccaggggattgacttggttccctgacaagggtaccaggtccaccccttctgaaaagcagctgttagtttactcttgggctcttttacacattggatatctcttccttgggtagagggttctgacctaaaattccactttaggagtttgtcgtcttggactcaacaactaacaaaatgaaaaggacccagcaagcctcacttgtggaatgaaaatggggcattcaggaaagcacctgtcctggccccacagtatgtcagctgtataggcaatagtagtagctgtctcttagaagggaaataatgtatcacctctttccagaacgaagcaaagttgctggcttagtagagccctcaattcatagaggttactgtaattgggcctggctcactgatgctttcgccaactgaaactactaggatcctgtgtgtgttcaaactcagtgccattaacaaacccaaagtgaagcggtcactcctctcagtggaaagagcacgaggatgttctcagctctggccaatactccatttcataaaccatgttacatttttgttaagccttggctctggatgtggcctagatatttgatattctaattggaaattacagattaaaaagcaccctttctttgtacagtgggggtaaaagtcacagctgcttagtacaaccatctgggttgctcaagtagatgcccataataagagactattttctgataagactgactggaatcaagctgccgacagctttctccatccagattgtgacggttgctacctggatccatcattttactggtatggcaaaaaatcacccatgtgacactgggtgacatggtaaaagtacatggtacttttacagtaccatgtactgtacaaaataaaggtctctttatctg

SEQ ID NO: 19324 - protein, 683 aa, Homo sapiens; identical to SEQ ID NO: 2380

SEQ ID NO: 19325 - DNA, 2560 bp, Homo sapiens
ggtgcagagggttcgcagctcaggtgagagcgccgggcctccacgcggattgcggacctgcagggagggatgtgctagtgtccagggggcgggaacgcgacgtcccgggaactcccccaaagcaggccgtcgctccctgtgcctcggccggcccgggacctcagcctgagaagggccggtgggggcgggctccgggggcgttaggtggggctgagtcctagttggaagatgctcggtgcgggccgaggtatgggcgccagaatgcagccaggcgtcggaaaacgcggtgctggcttcaggaggggaatgcgcgtttattgtattgaccatgaacctgccacaaagcgcgtacagcccgtgggtctgcggtgagaggccgagcctaggagctagaaggacctcgtgaattttggctctgtcacttgagcgtttgaaaatgaggatattagtaaaaactgctttgtgtcgttcagaggaaggagggagccccaggaacaggagtcccaccgaagaactgctctctgacagaacagagacctcctcaccagggcttccaaacagatgcagaagaacccagaaaggagcaggtcttgatttgcccaaccagcggcacttcttcatccccttgcccagagagcaccagacttggtgatgtcgccacatccagaagccatcacagattgtgtgacactgaacactgtgggccaacttgcagaaggtggttatcctttacggttctccacactctttcaggagcagcagaaaatgaacatatctcaggcatcagtgtcattcaaggacgtgactatagaattcacccaggaggagtggcagcaaatggcccctgttcagaagaatctgtacagagatgtgatgctggagaactacagcaacctcgtctcagtggggtactgctgtttcaaaccagaggtgatcttcaagttggagcaaggagaggagccttggttctcagaggaggaattctcaaaccagagtcacccaaaagattacagaggtgatgacctgatcaagcagaacaagaaaatcaaagacaaacacttggagcaagcaatatgtatcaataataaaacattgactacagaggaagagaaagttttggggaaaccatttactctgcatgtagctgctgttgcttcaacaaaaatgtcctgcaaatgcaactcatgggaagtgaatttgcaaagtatttctgaatttatcattaataatagaaactattcaacaaagaaaataggttgcggtaatgtatgtgagaattcacctttcaaaattaactttgagaaaactcagactggagagaaattttatgaacataataaaaacatgaaagctctcaattataatgaaaatcttcccaagcatccaaagtttcaaactttggagcaagcttttgaatgtaataaaattggaaaagcctttaatgataaggctaactgtgttaaacataacagttctcacacaggagaaacatcctctaaagatgatgaatttaggaaaaattgtgataagaaaactctctttgaccacaggagaactggcacagggaagaaacacctgcatcttaatcaatgtgggaaatcctttgagaagtcaactgtggaggaatataataaacttaatatgggtataaaacattatgaattaaatccaagtggaaataatttcaacagaaaggcacacctcactgatcctcaaacagctgtcatagaagagaacccattggtaagtaatgacagaacacagacttgggttaaatcctctgaatatcatgaaaataagaaatcctaccagacgtcggttcacagagttcgccgaagaagtcactcaatgatgaaaccctataaatgtaatgaatgtgggaaatccttctgtcagaaaggacatctcattcaacatcagagaactcacacaggagagaaaccatttgaatgtagtgaatgtggaaaaactttctcccagaagtcacacctcagtactcatcagagaattcatacagcagaaaaaccctataaatgtaatgaatgtggaaaaacatttgtccagaagtcaaccctcaggggacatcaaagaattcacacaggagaaaaaccctatgaatgtagtgaatgtgggaaaacttttgttcagaagtccaccctcagagatcatcacagaattcacacaggggagaaatcctttcaatgcaatcaatgtggaaaaacatttggccagaagtcaaacctcagaatacatcagagaactcacactggggagaaaacttaccagtgtaatgaatgtgaaaaatccttctggcgaaaagatcatctcattcaacatcagaaaactcacacgggagagaaaccattcaaatgtaacgaatgtgggaaaacttttgcccggacatcaaccctcagagtgcatcaaagaattcacactggggagaaaccatttaaatgtaatgaatgtgggaagaaatttgtccggaaagcaatccttagtgatcatcagagaattcacacaggggagaaaccctttcagtgtaataaatgtgggaaaactt

SEQ ID NO: 19326 - protein, 635 aa, Homo sapiens
MSPHPEAITDCVTLNTVGQLAEGGYPLRFSTLFQEQQKMNISQASVSFKDVTIEFTQEEWQQMAPVQKNLYRDVMLENYSNLVSVGYCCFKPEVIFKLEQGEEPWFSEEEFSNQSHPKDYRGDDLIKQNKKIKDKHLEQAICINNKTLTTEEEKVLGKPFTLHVAAVASTKMSCKCNSWEVNLQSISEFIINNRNYSTKKIGCGNVCENSPFKINFEKTQTGEKFYEHNKNMKALNYNENLPKHPKFQTLEQAFECNKIGKAFNDKANCVKHNSSHTGETSSKDDEFRKNCDKKTLFDHRRTGTGKKHLHLNQCGKSFEKSTVEEYNKLNMGIKHYELNPSGNNFNRKAHLTDPQTAVIEENPLVSNDRTQTWVKSSEYHENKKSYQTSVHRVRRRSHSMMKPYKCNECGKSFCQKGHLIQHQRTHTGEKPFECSECGKTFSQKSHLSTHQRIHTAEKPYKCNECGKTFVQKSTLRGHQRIHTGEKPYECSECGKTFVQKSTLRDHHRIHTGEKSFQCNQCGKTFGQKSNLRIHQRTHTGEKTYQCNECEKSFWRKDHLIQHQKTHTGEKPFKCNECGKTFARTSTLRVHQRIHTGEKPFKCNECGKKFVRKAILSDHQRIHTGEKPFQCNKCGK

SEQ ID NO: 19327 - DNA, 452 bp, Homo sapiens
gctattttctacatcatctaattctgaacccttcagattgaatagaaatgtactgttacaggcatcagtgtcattcaaggacgtgactatagaattcacccaggaggagtggcagcaaatggcccctgttcagaagaatctgtacagagatgtgatgctggagaactacagcaacctcgtctcagtggggtactgctgtttcaaaccagaggtgatcttcaagttggagcaaggagaggagccttggttctcagaggaggaattctcaaaccagagtcacccaagtgagttactgagcagtagtagacataattctgcaggagtggttagactccaggtcactttaggggtgaacacctaaatattgcaagacttttcttagaaagcctaaaggcacaaaaagcagcagttaaaagaaaataattaataaagttgattccattaaaagtaag

SEQ ID NO: 19328 - protein, 80 aa, Homo sapiens
MAPVQKNLYRDVMLENYSNLVSVGYCCFKPEVIFKLEQGEEPWFSEEEFSNQSHPSELLSSSRHNSAGVVRLQVTLGVNT

SEQ ID NO: 19329 - DNA, 789 bp, Homo sapiens
acggatatgcgcgttttcgtctgcgcatgtgcagtcaaccccactttccggcttctccctgttagtgtttgctggtgcagagggttcgcagctcaggaaggagggagccccaggaacaggagtcccaccgaagaactgctctctgacagaacagagacctcctcaccagggcttccaaacagatgcagaagaacccagaaaggagcaggtcttgatttgcccaaccagcggcacttcttcatccccttgcccagagagcaccagacttggtgatgtcgccacatccagaagccatcacagattgtgtgacactgaacactgtgggccaacttgcagaaggtggttatcctttacggttctccacactctttcaggagcagcagaaaatgaacatatctcaggcatcagtgtcattcaaggacgtgactatagaattcacccaggaggagtggcagcaaatggcccctgttcagaagaatctgtacagagatgtgatgctggagaactacagcaacctcgtctcagtggggtactgctgtttcaaaccagaggtgatcttcaagttggagcaaggagaggagccttggttctcagaggaggaattctcaaaccagagtcacccaagtgagttactgagcagtagtagacataattctgcaggagtggttagactccaggtcactttaggggtgaacacctaaatattgcaagacttttcttagaaagcctaaaggcacaaaaagcagcagttaaaagaaaataattaataaagttgattccattaaaagt

SEQ ID NO: 19330 - protein, 142 aa, Homo sapiens
MSPHPEAITDCVTLNTVGQLAEGGYPLRFSTLFQEQQKMNISQASVSFKDVTIEFTQEEWQQMAPVQKNLYRDVMLENYSNLVSVGYCCFKPEVIFKLEQGEEPWFSEEEFSNQSHPSELLSSSRHNSAGVVRLQVTLGVNT

SEQ ID NO: 19331 - DNA, 3645 bp, Homo sapiens
ggaaagcgcatttgtaacgcgggcgacaacgtgcccgaaatccccggacggtgggtctgcatcgagaccccgagctctggagctggaaaaacccggctgaggctttacagttctctatactctcccaagagccacagaaaatgaacacatttcaggctactgctttacaaaaccagaactgatcttcacattggaacaaggagaagatccatggttattagagaaagagaaaggatttctaagcaggaactccccagaagactcccaacctgatgaaatctcagagaagagcccagaaaatcaaggcaaacatttgttgcaagttttattcaccaataaattattgactacagagcaagaaatttcaggaaaaccacataatcgagacataaacatttttcgtgcaagaatgatgccttgtaaatgtgacattgcggggtctgcttgccaggggctcagcctgatggccccacactgtcagtattcaaaagaaaaggctcatgagcgtaatgtttgtgacaaatggctcatcagtattaaggatggcagaactaacactcaagagaaatctttcgcttatagtaaaattgtgaaaaccctccatcataaggaggaagttattcaacatcagacaattcagactctggggcaagattttgaatataatgaaagtagaaaagcttttcttgaaaaggctgcccttgttacatctaacagtacccacccaaaaggaaaatcttacaatttcaataaatttggggaaaacaaatatgataaatcaacctttattattcctcagaacatgaatccagagaagagtcactatgagtttaatgatactggaaattgtttctgtagaatcactcacaaaactctcacaggagggaaatccttcagccaaaagtcacacattagagaacatcatagagttcatataggggtgaaaccctttgaatatggaaaaagtttcaaccgtaattcaaccctcccagtgcatcagagaactcatgcaacagataaatactctgattatcacccatgtacagagacattcagctaccagtcaactttcagtgtacatcagaaggttcacataagggcaaaaccctatgagtataatgaatgtgggaaatcctgctctatgaattcacacttgatttggcctcagaaaagtcacacaggggagaaaccctatgaatgtcctgagtgcgggaaagccttcagtgagaagtcacgcctaagaaaacatcagagaactcacacgggagagaaaccatacaaatgtgatggatgtgataaagctttcagtgcaaagtcaggcctaagaatacaccagagaacccacacaggggagaaaccattcgaatgtcatgaatgtgggaaatcttttaactataagtcaatcctcatagtgcatcagagaactcacacaggggagaaaccttttgaatgtaatgaatgcgggaaatctttcagccatatgtcaggcctaaggaatcaccgaagaactcacacaggggaaagaccatataaatgtgatgaatgtgggaaagctttcaaactgaagtcaggcctgaggaaacatcatagaacacacacaggggagaagccctacaaatgtaatcagtgtggaaaagctttcggtcagaaatcacaactcagaggacatcatagaattcacacaggggaaaaaccctataaatgtaatcattgtggggaagctttcagtcagaaatcaaacctcagagtacatcacagaactcatactggggagaaaccctatcaatgtgaggagtgtggaaaaacattcaggcagaaatcaaatctcagagggcatcagagaactcacactggggagaagccctatgaatgtaatgaatgtggaaaagctttcagtgagaagtcagtcctaagaaaacatcagcgaactcacaccggggagaaaccatataattgtaatcagtgtggggaagctttcagtcagaaatccaatctcagagtacatcagagaactcacacaggggagaaaccctataaatgtgataaatgtgggagaactttcagtcaaaaatcaagccttagagaacatcagaaagcccacccaggggattaaatgtatgcatataaagaatacgaaaaaactctgagctggaaatcaaacctcacaatacataaatgaacacacaggagagaactgttaacatagtgagcactggaatttcctctacaatttcagcctccaccaaatatcaaagaatagaagataaattgttgaaatctattttatatgggcattctttcagccagagcccagtcttctatggatatacagaactcacacagcaaagaaaccctataaacataatgaatatggaaaatactcttgcgaactcactcctcagaaaactcacgctgcagaaaagctctgagaaagtaataaaaatgtgaaaactttgtgccaacaatcaaaactcattcaccatcagagaaatcacacaatgacaaaagctagaatataataagtgtgtgataaactttaatgaaaagtcagtacagcagaaaatacattcaagatagagacctcatagtatattaaaacaaacaagaaatgaagttaatggatgtgggaaattcttctgccatgtcaaccctcattttaacctacacagaggtaatccctatatgtcgtataataactattgaaatgttcactagtaatcattttcacttctccctcatgccacacctggcctaaatttctcaaccactctctcatctaaacggggtcatattgttaccctctagctagtggaatatggggtcagtgacaggtcttaaatacatcagtcaaattctcaatattttcttctatccctcattagaatggaatggaggaaaaccttgggactcaggctctgatgatggaaagtacaagatggtaggaacccgggtcagagaaggatcctgtggcatggagttttctcctccctgtacacagttggacttcttgcagtgaggaaataaatgtgttccctgctgaacttctaaaggtttgggtatacttgatactgacagaaactcaacaaccctcacataataaaacttaggagtatgatttttcaggacatctgaactcagtgtatgtcagaaaagtcacataggacaaatctcggacagcatcctgaatgaccatggcttttatccccaaagtcttcctcatcagacaggtaatatcataagaaatctgacattttaacaaatataggaaattcttcacacacacagacacacactcacacatacacacccaaagtctcattaaatatatgataatttagttttgaatgtgtaaaagttttcaacaaattatcatattttatatcagagcttgttacaaggagaaaatctatcaatttgagaaaggtaagtaatagcctttatctagatattgctttatcagaactgttgtttcacatataatatcaaaacttttaatgaaatataagacattcactataataaaaagcttaaaaagaacaaaaaataaactgcataaactgaaaagcagtgttgcaaatatgtgaatgttttgtgagttattgattgtttatgtatgtatatatgcatggtacttaccaggtattt

SEQ ID NO: 19332 - protein, 567 aa, Homo sapiens
MMPCKCDIAGSACQGLSLMAPHCQYSKEKAHERNVCDKWLISIKDGRTNTQEKSFAYSKIVKTLHHKEEVIQHQTIQTLGQDFEYNESRKAFLEKAALVTSNSTHPKGKSYNFNKFGENKYDKSTFIIPQNMNPEKSHYEFNDTGNCFCRITHKTLTGGKSFSQKSHIREHHRVHIGVKPFEYGKSFNRNSTLPVHQRTHATDKYSDYHPCTETFSYQSTFSVHQKVHIRAKPYEYNECGKSCSMNSHLIWPQKSHTGEKPYECPECGKAFSEKSRLRKHQRTHTGEKPYKCDGCDKAFSAKSGLRIHQRTHTGEKPFECHECGKSFNYKSILIVHQRTHTGEKPFECNECGKSFSHMSGLRNHRRTHTGERPYKCDECGKAFKLKSGLRKHHRTHTGEKPYKCNQCGKAFGQKSQLRGHHRIHTGEKPYKCNHCGEAFSQKSNLRVHHRTHTGEKPYQCEECGKTFRQKSNLRGHQRTHTGEKPYECNECGKAFSEKSVLRKHQRTHTGEKPYNCNQCGEAFSQKSNLRVHQRTHTGEKPYKCDKCGRTFSQKSSLREHQKAHPGD

SEQ ID NO: 19333 - DNA, 4294 bp, Homo sapiens
tcgagactcccgggaagcggtttgggaagctcgggggtcggctcggaaagtagagggggcgcagctggggcgggaggacagcgtttgtgcccggaagcgggagaggaagcgggaagtttgtgggatccccgccccctgtgtcagtggatgcgaccgggcgggccctcggccttcccggccgctggagagggacttcggccgctggctcccggggcggctgaggctgagcgttggtccggagcaggtgccgggtgcgggccgcggtgtgcgggaccggagcccggcgcgagcggcggcgggggtggggaaagcgcatttgtaacgcgggcgacaacgtgcccgaaatccccggacggtgggtctgcatcgagaccccgagctctggagctggaaaaacccggatgccatactgctgttaacatatgtgacactggagactttgtccctacctcatagaatcccatgcatgatgatacatgaagggttttccgtggctatctacttctgattcttttgaaagctttaaagacattgggcatgaaaggttcagtgagtttccggggatccctcgtttgtggtagagccaggaggaaaacagttccgttcattctttcacagctgaggctttacagttctctatactctcccaagagccacagaaaatgaacacatttcaggcatcagtgtcattccaggacgtgactgtggaattcagccaggaggagtggcagcacatgggccctgttgagaggaccctgtacagagatgtgatgctggagaactacagccacctcgtctcagtgggctactgctttacaaaaccagaactgatcttcacattggaacaaggagaagatccatggttattagagaaagagaaaggatttctaagcaggaactccccagaagactcccaacctgatgaaatctcagagaagagcccagaaaatcaaggcaaacatttgttgcaagttttattcaccaataaattattgactacagagcaagaaatttcaggaaaaccacataatcgagacataaacatttttcgtgcaagaatgatgccttgtaaatgtgacattgcggggtctgcttgccaggggctcagcctgatggccccacactgtcagtattcaaaagaaaaggctcatgagcgtaatgtttgtgacaaatggctcatcagtattaaggatggcagaactaacactcaagagaaatctttcgcttatagtaaaattgtgaaaaccctccatcataaggaggaagttattcaacatcagacaattcagactctggggcaagattttgaatataatgaaagtagaaaagcttttcttgaaaaggctgcccttgttacatctaacagtacccacccaaaaggaaaatcttacaatttcaataaatttggggaaaacaaatatgataaatcaacctttattattcctcagaacatgaatccagagaagagtcactatgagtttaatgatactggaaattgtttctgtagaatcactcacaaaactctcacaggagggaaatccttcagccaaaagtcacacattagagaacatcatagagttcatataggggtgaaaccctttgaatatggaaaaagtttcaaccgtaattcaaccctcccagtgcatcagagaactcatgcaacagataaatactctgattatcacccatgtacagagacattcagctaccagtcaactttcagtgtacatcagaaggttcacataagggcaaaaccctatgagtataatgaatgtgggaaatcctgctctatgaattcacacttgatttggcctcagaaaagtcacacaggggagaaaccctatgaatgtcctgagtgcgggaaagccttcagtgagaagtcacgcctaagaaaacatcagagaactcacacgggagagaaaccatacaaatgtgatggatgtgataaagctttcagtgcaaagtcaggcctaagaatacaccagagaacccacacaggggagaaaccattcgaatgtcatgaatgtgggaaatcttttaactataagtcaatcctcatagtgcatcagagaactcacacaggggagaaaccttttgaatgtaatgaatgcgggaaatctttcagccatatgtcaggcctaaggaatcaccgaagaactcacacaggggaaagaccatataaatgtgatgaatgtgggaaagctttcaaactgaagtcaggcctgaggaaacatcatagaacacacacaggggagaagccctacaaatgtaatcagtgtggaaaagctttcggtcagaaatcacaactcagaggacatcatagaattcacacaggggaaaaaccctataaatgtaatcattgtggggaagctttcagtcagaaatcaaacctcagagtacatcacagaactcatactggggagaaaccctatcaatgtgaggagtgtggaaaaacattcaggcagaaatcaaatctcagagggcatcagagaactcacactggggagaagccctatgaatgtaatgaatgtggaaaagctttcagtgagaagtcagtcctaagaaaacatcagcgaactcacaccggggagaaaccatataattgtaatcagtgtggggaagctttcagtcagaaatccaatctcagagtacatcagagaactcacacaggggagaaaccctataaatgtgataaatgtgggagaactttcagtcaaaaatcaagccttagagaacatcagaaagcccacccaggggattaaatgtatgcatataaagaatacgaaaaaactctgagctggaaatcaaacctcacaatacataaatgaacacacaggagagaactgttaacatagtgagcactggaatttcctctacaatttcagcctccaccaaatatcaaagaatagaagataaattgttgaaatctattttatatgggcattctttcagccagagcccagtcttctatggatatacagaactcacacagcaaagaaaccctataaacataatgaatatggaaaatactcttgcgaactcactcctcagaaaactcacgctgcagaaaagctctgagaaagtaataaaaatgtgaaaactttgtgccaacaatcaaaactcattcaccatcagagaaatcacacaatgacaaaagctagaatataataagtgtgtgataaactttaatgaaaagtcagtacagcagaaaatacattcaagatagagacctcatagtatattaaaacaaacaagaaatgaagttaatggatgtgggaaattcttctgccatgtcaaccctcattttaacctacacagaggtaatccctatatgtcgtataataactattgaaatgttcactagtaatcattttcacttctccctcatgccacacctggcctaaatttctcaaccactctctcatctaaacggggtcatattgttaccctctagctagtggaatatggggtcagtgacaggtcttaaatacatcagtcaaattctcaatattttcttctatccctcattagaatggaatggaggaaaaccttgggactcaggctctgatgatggaaagtacaagatggtaggaacccgggtcagagaaggatcctgtggcatggagttttctcctccctgtacacagttggacttcttgcagtgaggaaataaatgtgttccctgctgaacttctaaaggtttgggtatacttgatactgacagaaactcaacaaccctcacataataaaacttaggagtatgatttttcaggacatctgaactcagtgtatgtcagaaaagtcacataggacaaatctcggacagcatcctgaatgaccatggcttttatccccaaagtcttcctcatcagacaggtaatatcataagaaatctgacattttaacaaatataggaaattcttcacacacacagacacacactcacacatacacacccaaagtctcattaaatatatgataatttagttttgaatgtgtaaaagttttcaacaaattatcatattttatatcagagcttgttacaaggagaaaatctatcaatttgagaaaggtaagtaatagcctttatctagatattgctttatcagaactgttgtttcacatataatatcaaaacttttaatgaaatataagacattcactataataaaaagcttaaaaagaacaaaaaataaactgcataaactgaaaagcagtgttgcaaatatgtgaatgttttgtgagttattgattgtttatgtatgtatatatgcatggtacttaccaggtattt

SEQ ID NO: 19334 - protein, 699 aa, Homo sapiens; identical to SEQ ID NO: 2382

SEQ ID NO: 19335 - DNA, 1223 bp, Homo sapiens
atggcagctaaattgttctcaaaacctgcaactaatctggcggcggtgggtggctctagctctagttacaaggtcagaaaatacacagggaaatgtgcaggtttccatagatgtgagctccagaagcagtggtggcagaggccagctccaagatgcccagttctacacaatgctatttgtgaacgcagaagcaccaggaactatgctccaaacagtagcaatgttcatgatctttggaaattgaaaaacattacaacaaagcttgagttgggaaaccagttctcccacttcattaataatgatgtcgatgttcctggcagtgtttataccaaatgctactttgacctttgcgccttggcacacgacagtagcctatatttgccattttgtcttcttgacatagaaagagcatgggaactgaaggttgtttcaaggttggaagacaaagacttctatggtactgccaacaaaaggaaaaggtctttgagttctgatgatttaattgatcttcagtgccttaaggccatcctctcctgaaggaagaagtgaggggttatataacatctgaacccctcatcaaaaaagacaggaaaatatcacctttcctgctgaagaactagaaaagtactttcaaaagaagaaacacctacaattcaagttaactcaaggacaactaggattgcacttcatagaaaagaatgggaccttgtcaatgcaacaacacactcttacactcttctgtcccttttaatgtaaagagagttataaaaaccactccaaagtgaaggctcctatgtgagctgatagcagtgaactatgtaagggtttaaaacaatggtttaaatttttagattttaaagataacttttctgtttcttttatatttttctttcccccaatattgctgcatatgcatttagcatcatattaccattaaaacataggactcttaacaactcataaagccactaggagcagatgcagcattgtcaggtactgaaggggctcttccttcctactcttagaatcgaagctactagttactggcaatcattttaagcaaaagcttctggataacatttgccattcatatcctctgtaagcacttcttattagcagttagcatgtttggggtcataaaaagagaaaatattggttattgattatctacttttattagggtctgtggtgtatttcttgtgaactataatggttctcatttg

SEQ ID NO: 19336 - protein, 178 aa, Homo sapiens
MAAKLFSKPATNLAAVGGSSSSYKVRKYTGKCAGFHRCELQKQWWQRPAPRCPVLHNAICERRSTRNYAPNSSNVHDLWKLKNITTKLELGNQFSHFINNDVDVPGSVYTKCYFDLCALAHDSSLYLPFCLLDIERAWELKVVSRLEDKDFYGTANKRKRSLSSDDLIDLQCLKAILS

SEQ ID NO: 19337 - DNA, 927 bp, Homo sapiens
tgtgtctgtggcaagaccccgagctgtggagaccgaaagagctgcataaattccagctttattacctgagaggatggccttaaggcactgaagatcaattaaatcatcagaactcaaagaccttttccttttgttggcagtaccatagaagtctttgtcttccaaccttgaaacaacctaagaaagacaatcaaatagaaaagagttgcagatgttggcattggtgtttgactgaaagcccacttagtaccttcatagccttaccttcagttcccatgctctttctatgtcaagaagacaaaatggcaaatataggctactgtcgtgtgccaaggcgcaaaggtcaaagtagcatttggtataaacactgccaggaacatcgacatcattattaatgaagtgggagaactggtttcccaactcaagcctggggaaggagaaacacaacaaaaccaacacaggacaatgttagtcaactgggctatcttcaaaaacattattctcatgtaagaaatgtggtaaagccgtcatatgctctagtttattagaacacataaaagaactcacactgtacagaaccctatcgatgaaagaaacacaagaaagcattcaactttcccagttctctttgaaaacttagaaaaacttgtattggaaaaaataatgaatgtaaaaaacgtgttaatgaacttgattttcccacatcttttcaaaggcatagttgaattttaatacgtagaaaaactacataatcttaagaaacatagtcaagccttcagctttttcatttctttgaaaacatgaaaggattcaagggagaaaacccttataaatacaaacatgtggtagggtcgtcagttgttccagttccacatgaagacaagaactcgtttctgaaataaaacctatgaatgtatagaatgcaga

SEQ ID NO: 19338 - protein, 39 aa, Homo sapiens
MLFLCQEDKMANIGYCRVPRRKGQSSIWYKHCQEHRHHY

SEQ ID NO: 19339 - DNA, 552 bp, Homo sapiens
ggggacctcatcagcgcccagtcctttcttgatttaccgcgttgcttcctccctcttctccctagtaattattattcagagcttcccagaataaagccggggccctgattttacctagacaaacagtgccacaggtttccccgacggaaagactgaacccagcagagagaagcgggtgagggtgggagttccagaagggaaggggcacaggtggggcctggatccagattatggatggatgcccctcccaggtagcacccaggcccagccctgcccctcccatgcatgggagtagcaggaggttgtgatagtggccctgacaacaggtagcccggtcaatggtttaatcaattatgcctacctaacaaagcttctataaaaactgcaaatgacagggtgtgggaagtttctgaatagttgaactcatgaaagttcctggagggtggcatgcctgggaggatataaaagctccacgtctattttcatctcttaccctaggcatcttttcatcaataccctttgtaatattctttataataaactggtaaatgt

SEQ ID NO: 19340 - protein, 40 aa, Homo sapiens
MKVPGGWHAWEDIKAPRLFSSLTLGIFSSIPFVIFFIINW

SEQ ID NO: 19341 - DNA, 1442 bp, Homo sapiens
gacgccgccggtaactgcgacagtcggggtcggtgcggtttgctaagtggtcggttcctggagctgcggtcttctgctagcctgatccgcagcttcagcctccgccgcctcctcagccctcggcgccgccgcctgacccgcaggccgccgcgggccgcagagcccatgagggcgcgggcaccgccgccgcctccgcggcgtcgccgtcgtcccggagcgccccgagctggcgcgggcatggccgcggcatgagcgtggagccgccgccggagctggaggagaaggcggcgtcggagcccgaggcgggagccatgccggagaagcgcgcgggcgcgcaggccgcggggagcacctggctacaaggctttggcccaccaagtgtgtaccatgctgctattgtcatcttccttgaattctttgcgtggggccttttgacaactccaatgttgactgttctacatgaaacattttctcaacacacattcctcatgaatggtctcattcaaggtgtaaagggcctgctctcttttttgagtgccccactcattggtgccctgtctgatgtgtgggggaggaagccctttctcctcggcactgtattctttacctgcttcccaatcccactgatgaggatcagcccatgtttatgcaaataccgtatacgtgataaacgtccctacaacatgatctttggaatgaactaagacaaaggaaactctgaggaaggaccatggcctgagaggtggaattcatccttccgaggactgagatgaggacggaaaatgaaccatcggggggattgacggtgaagatgctaatacctgcccagcatcgaccctagtgcgggtcccaagaccatccccctgtgcaggctccaccaccgctgtgctaactggaccgcggcagaagagtgggtgtgtgccaggtttctgctgggccctgcagctcctccccccagccccatgtgatgtgcccctggccattgacactcagttcgagggaaggcactggggtgtacactcaaagacctaaacccagggtgggtgcggtggctcacgtctgcaatcccagcactttgggaggctgaggcgggtggatcacaaggccaggagttcaagaccagcctgcttaacatagtgaaaccccgtctctactaaaaaatacaaaaaaattagccgggcatggtggcgggcacctgtaatcccaggtacttgggaggctgaggcaggagaattgcttgaacccaggaggcagaggttgcggtgagccaagatcgcaccattgcactccagcctgggtgacagtgcgagactccatctcaaacaaacaaacaaaaaagacctaaacccaaaccgtggctcacgtcacaccaagaaccctctctgacctgggtcttctgtaaacatggttgtgaaaattattgaaagtaaaagccgggcacg

SEQ ID NO: 19342 - protein, 151 aa, Homo sapiens
MSVEPPPELEEKAASEPEAGAMPEKRAGAQAAGSTWLQGFGPPSVYHAAIVIFLEFFAWGLLTTPMLTVLHETFSQHTFLMNGLIQGVKGLLSFLSAPLIGALSDVWGRKPFLLGTVFFTCFPIPLMRISPCLCKYRIRDKRPYNMIFGMN

SEQ ID NO: 19343 - DNA, 2167 bp, Homo sapiens
gttctcgaggcgggagctgaggtgcggggtggggcctccaaccgtgcagcccgcccctgacgccgccggtaactgcgacagtcggggtcggtgcggtttgctaagtggtcggttcctggagctgcggtcttctgctagcctgatccgcagcttcagcctccgccgcctcctcagccctcggcgccgccgcctgacccgcaggccgccgcgggccgcagagcccatgagggcgcgggcaccgccgccgcctccgcggcgtcgccgtcgtcccggagcgccccgagctggcgcgggcatggccgcggcatgagcgtggagccgccgccggagctggaggagaaggcggcgtcggagcccgaggcgggagccatgccggagaagcgcgcgggcgcgcaggccgcggggagcacctggctacaaggctttggcccaccaagtgtgtaccatgctgctattgtcatcttccttgaattctttgcgtggggccttttgacaactccaatgttgactgttctacatgaaacattttctcaacacacattcctcatgaatggtctcattcaaggtgtaaagggcctgctctcttttttgagtgccccactcattggtgccctgtctgatgtgtgggggaggaagccctttctcctcggcactgtattctttacctgcttcccaatcccactgatgaggatcagcccatgtagccaaaaagtgaaaacaacccaaatgttcatcacctgatgaatgaataagtttcaggatatccaccaatggaatattattcagcaataaaaaggtttgatgtaatgatagatgctaaaaacatggatgaaccttggaaatatttaaagtaaaataagacaggtgtgaaagacatacattgtatgattccattcatatgcaagtccagagcatgtaaagctatatagaaagtcagttcgtggttatgtaggcctaggatgtagatcggtggggggcagggagtgatagctaaaggacaaggggttttttttcttcttcattttttgagatggagtctcactctgtcacccaggctggagtgcagcggcacaatcttggctcactgcaacctccgcctctccggttcaagcgattctcctgcttcagcctctcatgtagctgggatcacatgtgtgccaccatgcccagctgatttttgtatttttagtagaggcggggtttcaccatgttggccaggctggtctcgaactcttcacctcaagtgattcactcacctcggcctcccaaagtgttgggattacaggcgtgagccactgcacccagcctaggggttttctttttgaggtgataaaaatgttctaaagtttatagtgatgatgcttgcaatttctataagtagacttaatgcagtgatggttgcaaattctataaatatatttaatgtggtgatggttgcaaattctatgaaaaacccaaattgtacaatttcaatgagtgaaagcatgctatgtgaatgtcttcataaaggttttatttaaaaaatgagcaaacggtagaatgttaacatggcccacgtctatgtggtgtctatattggtttctattatatgttttctatgtggttgaaacattcctaataaaatgtgcatagttttttaaaaaagaaaacacatcagtggacgtgaatgcaggatgtcttatgaatgctcacacagaagctcccattcgtgaggaatgcagggaaaagcagaagatggagtaggagttggcatggcccagctagctcagatgacacacgatggtcccagtggcatgacttggtttgtgtgatttgtgccttggggttttattttggcacattataaaggagtaaataaagcctgtatacagtcagtttctgtctattctaatgaagggcaaggggatgaagggatttaccttgagtaaccatccacttacatttattaggaatcttgtgatcctatcgtcacccgtgagatttctgtgttgtttgtgtttaatgtcagagaatatcttttaatcgctcatacagtttatgcaaataccgtatacgtgataaacgtccctacaacatgatctttggaatgaactaagacaaaggaaactctgaggaaggaccatggcctgagaggtggaattcatccttccgaggactgagatgagga

SEQ ID NO: 19344 - protein, 144 aa, Homo sapiens
MSVEPPPELEEKAASEPEAGAMPEKRAGAQAAGSTWLQGFGPPSVYHAAIVIFLEFFAWGLLTTPMLTVLHETFSQHTFLMNGLIQGVKGLLSFLSAPLIGALSDVWGRKPFLLGTVFFTCFPIPLMRISPCSQKVKTTQMFIT

SEQ ID NO: 19345 - DNA, 784 bp, Homo sapiens
gacgccgccggtaactgcgacagtcggggtcggtgcggtttgctaagtggtcggttcctggagctgcggtcttctgctagcctgatccgcagcttcagcctccgccgcctcctcagccctcggcgccgccgcctgacccgcaggccgccgcgggccgcagagcccatgagggcgcgggcaccgccgccgcctccgcggcgtcgccgtcgtcccggagcgccccgagctggcgcgggcatggccgcggcatgagcgtggagccgccgccggagctggaggagaaggcggcgtcggagcccgaggcgggagccatgccggagaagcgcgcgggcgcgcaggccgcggggagcacctggctacaaggctttggcccaccaagtgtgtaccatgctgctattgtcatcttccttgaattctttgcgtggggccttttgacaactccaatgttgactgttctacatgaaacattttctcaacacacattcctcatgaatggtctcattcaaggtgtaaagggcctgctctcttttttgagtgccccactcattggtgccctgtctgatgtgtgggggaggaagccctttctcctcggcactgtattctttacctgcttcccaatcccactgatgaggatcagcccatgccgggtgtggtggcgtgcacctgtagtcccagctacctgtggcaggagaatggcttgaacccaggaagcggaggttgcagtgagccaagatcacaccattgcactccagcctaggcatggtgagactccatctcaaaaaaa

SEQ ID NO: 19346 - protein, 150 aa, Homo sapiens
MSVEPPPELEEKAASEPEAGAMPEKRAGAQAAGSTWLQGFGPPSVYHAAIVIFLEFFAWGLLTTPMLTVLHETFSQHTFLMNGLIQGVKGLLSFLSAPLIGALSDVWGRKPFLLGTVFFTCFPIPLMRISPCRVWWRAPVVPATCGRRMA

SEQ ID NO: 19347 - DNA, 989 bp, Homo sapiens
ttctcgaggcgggagctgaggtgcggggtggggcctccaaccgtgcagcccgcccctgacgccgccggtaactgcgacagtcggggtcggtgcggtttgctaagtggtcggttcctggagctgcggtcttctgctagcctgatccgcagcttcagcctccgccgcctcctcagccctcggcgccgccgcctgacccgcaggccgccgcgggccgcagagcccatgagggcgcgggcaccgccgccgcctccgcggcgtcgccgtcgtcccggagcgccccgagctggcgcgggcatggccgcggcatgagcgtggagccgccgccggagctggaggagaaggcggcgtcggagcccgaggcgggagccatgccggagaagcgcgcgggcgcgcaggccgcggggagcacctgggttctacatgaaacattttctcaacacacattcctcatgaatggtctcattcaaggtgtaaagggcctgctctcttttttgagtgccccactcattggtgccctgtctgatgtgtgggggaggaagccctttctcctcggcactgtattctttacctgcttcccaatcccactgatgaggatcagcccatggtgagtgacttggcccttcacctcctgactgcttgttttgagtcacatgtaaattatatttgcagagcacttcttaactattacaaagcagttgtgcttgtgttttcatttgatctctctggtaatactgaaaaccagtttggacagttgtcattatatccattttataaatggggtagtgaagacattctagaattaagtctgagataagttacttaggtgaagaaattttattttttcacattgctagaagaaacatgctagatactagaaacatgctagaagaaaacttggatgaaataatctttaacctggtatagggagaggctttctaattctaaatccagagccagtaaaggattaataaataatgtctacaaatacc

SEQ ID NO: 19348 - protein, 100 aa, Homo sapiens
MSVEPPPELEEKAASEPEAGAMPEKRAGAQAAGSTWVLHETFSQHTFLMNGLIQGVKGLLSFLSAPLIGALSDVWGRKPFLLGTVFFTCFPIPLMRISPW

SEQ ID NO: 19349 - DNA, 1549 bp, Homo sapiens
ggtaggcgcgcccagacctgagacgggttgggactgggctgcgtcacgcgcgggctctaagcgcccggggccccgcccagtggccggcacagccaatcgcagcgcgggaaggcggtgggggcggggaaggccgcctggaaacttaaatcccgaggcgggcgaacctgcaccagaccgcggacgtctgtaatctcagaggcttgtttgctgagggtgcctgcgcagctgcgacggctgctggttttgaaacatgaatctttcgctcgtcctggctgccttttgcttgggaatagcctccgctgttccaaaatttgaccaaaatttggatacaaagtggtaccagtggaaggcaacacacagaagattatatggcgcgaatgaagaaggatggaggagagcagtgtgggaaaagaatatgaaaatgattgaactgcacaatggggaatacagccaagggaaacatggcttcacaatggccatgaatgcttttggtgacatgaccaatgaagaattcaggcagatgatgggttgctttcgaaaccagaaattcaggaaggggaaagtgttccgtgagcctctgtttcttgatcttcccaaatctgtggattggagaaagaaaggctacgtgacgccagtgaagaatcagaaacagtgtggttcttgttgggcttttagtgcgactggtgctcttgaaggacagatgttccggaaaactgggaaacttgtctcactgagcgagcagaatctggtggactgttcgcgtcctcaaggcaatcagggctgcaatggtggcttcatggctagggccttccagtatgtcaaggagaacggaggcctggactctgaggaatcctatccatatgtagcagtggatgaaatctgtaagtacagacctgagaattctgttgctaatgacactggcttcacagtggtcgcacctggaaaggagaaggccctgatgaaagcagtcgcaactgtggggcccatctccgttgctatggatgcaggccattcgtccttccagttctacaaatcaggcatttattttgaaccagactgcagcagcaaaaacctggatcatggtgttctggtggttggctacggctttgaaggagcaaattcgaataacagcaagtattggctcgtcaaaaacagctggggtccagaatggggctcgaatggctatgtaaaaatagccaaagacaagaacaaccactgtggaatcgccacagcagccagctaccccaatgtgtgagctgatggatggtgaggaggaaggacttaaggacagcatgtctggggaaattttatcttgaaactgaccaaacgcttattgtgtaagataaaccagttgaatcattgaggatccaagttgagattttaattctgtgacatttttacaagggtaaaatgttaccactactttaattattgttatacacagctttatgatatcaaagactcattgcttaattctaagacttttgaattttcattttttaaaaagatgtacaaaacagtttgaaataaattttaattcgtatataaa

SEQ ID NO: 19350 - protein, 334 aa, Homo sapiens; identical to SEQ ID NO: 2384

SEQ ID NO: 19351 - DNA, 2070 bp, Homo sapiens
gcaattccattctgcatctcctctggacactcccaggaccaccaggacaaccccatcacggccctgtcaccaggcccagtctggctccatgataaccaagacgcaggtccagagacaaccgccctgcacggtgcctgcatctgacccccttggtgggtagtgaccagcacaacatggaagaagccagggcagcaggcagccagctgccctgcagccccagatggcacctgggccttgggaagtcattcttaaaggggaagctacatgggagaaggaagaattcctgaatgcaacagactgggaaggacgcaccacaaaacgctccgcggtctctggacaccctatcagctagtcccgtccctcctggtgtccggtctcgaccatccatcccgtgttttgggagtgcctttccttaccagattcttctaaagccctgatgcacccacccttaagtggaaggttttgaaacatgaatctttcgctcgtcctggctgccttttgcttgggaatagcctccgctgttccaaaatttgaccaaaatttggatacaaagtggtaccagtggaaggcaacacacagaagattatatggcgcggttggtaacatctgaaactgtccagagggactctggagagaatggtcctcgctgttgggagttgatagccagagagtagcttctagacaccagaccttaccaggcaataacctaacagcacccattataggtgcaatatgggcatatatctccattgtgtcttggcttggagaacagctcccagagaagtatcaacccatccctggccatggtttctcttccatttctgcccgcaaatcggcttggtgaacatgggttgggtaagtagacataaagtccaccagctatatgtttgcctctagaatgaagaaggatggaggagagcagtgtgggaaaagaatatgaaaatgattgaactgcacaatggggaatacagccaagggaaacatggcttcacaatggccatgaatgcttttggtgacatgaccaatgaagaattcaggcagatgatgggttgctttcgaaaccagaaattcaggaaggggaaagtgttccgtgagcctctgtttcttgatcttcccaaatctgtggattggagaaagaaaggctacgtgacgccagtgaagaatcagaaacagtgtggttcttgttgggcttttagtgcgactggtgctcttgaaggacagatgttccggaaaactgggaaacttgtctcactgagcgagcagaatctggtggactgttcgcgtcctcaaggcaatcagggctgcaatggtggcttcatggctagggccttccagtatgtcaaggagaacggaggcctggactctgaggaatcctatccatatgtagcagtggatgaaatctgtaagtacagacctgagaattctgttgctaatgacactggcttcacagtggtcgcacctggaaaggagaaggccctgatgaaagcagtcgcaactgtggggcccatctccgttgctatggatgcaggccattcgtccttccagttctacaaatcaggcatttattttgaaccagactgcagcagcaaaaacctggatcatggtgttctggtggttggctacggctttgaaggagcaaattcgaataacagcaagtattggctcgtcaaaaacagctggggtccagaatggggctcgaatggctatgtaaaaatagccaaagacaagaacaaccactgtggaatcgccacagcagccagctaccccaatgtgtgagctgatggatggtgaggaggaaggacttaaggacagcatgtctggggaaattttatcttgaaactgaccaaacgcttattgtgtaagataaaccagttgaatcattgaggatccaagttgagattttaattctgtgacatttttacaagggtaaaatgttaccactactttaattattgttatacacagctttatgatatcaaagactcattgcttaattctaagacttttgaattttcattttttaaaaagatgtacaaaacagtttgaaataaattttaattcgtatataaa

SEQ ID NO: 19352 - protein, 279 aa, Homo sapiens
MKMIELHNGEYSQGKHGFTMAMNAFGDMTNEEFRQMMGCFRNQKFRKGKVFREPLFLDLPKSVDWRKKGYVTPVKNQKQCGSCWAFSATGALEGQMFRKTGKLVSLSEQNLVDCSRPQGNQGCNGGFMARAFQYVKENGGLDSEESYPYVAVDEICKYRPENSVANDTGFTVVAPGKEKALMKAVATVGPISVAMDAGHSSFQFYKSGIYFEPDCSSKNLDHGVLVVGYGFEGANSNNSKYWLVKNSWGPEWGSNGYVKIAKDKNNHCGIATAASYPNV

SEQ ID NO: 19353 - DNA, 1316 bp, Homo sapiens
atgcacgcatgtaaatctagagaagagaagatgatggtggttgctacggggaagccatgtgacttcatcctccgtggctctggtggtctcttcgacatctgtgagatactcactaaaagctggttgcgctttgagatctgggcgcctgctggaacctggagccacaagtcttcattcatgctaaagaactcctgtcttggtggagggtggctggcgctgggcttcttcgtggcccgcgacagtccggccaccttcatcggccagtggcgcacggatctgggcgactccgaagtgctccgcgagctggcaagggagacactgggactctgcacccgctcagctccccaagataaaggcctcggaggggaagttccgcgtgggagactccggcctgttggtctctgtgctggtgcgggggagccgcgtgacggcgcgcgtgggtgtggcgacccgctggagcgctacctggaccgtcaggacccgcgctgccgctcctccactacccactgcccgcccccgtcgagggtccgcaccctgtccccgcagagggtgtcgcccacccctagcccctgccctggtagcctggtcccctcgagagagcgccggcgctccgggccctaggtgacccctattcgcttacaaagcataaagcaggtgccgaggctcccaggccctgggatcagctgcccgccgcatccccgctcctactccgaggacagtgactcctcagctttctcagcccagagccgcccccttggtgcccgcagcgaggatgaggcactaggcccggaggaagcgatccagacgggggctgaccaccaccacctggcctctccgagacggccccctgccccgcgcagccagtcccgggaccggctggatccggagcagctgctctgacgcctggacgaggagtttctggccaatgccgggacccataaggctgttgctagcgggacctccactagaccagcccctaaccgggctccagccccagaccctctagctcctgactcggcctacagatcctctagttcctcctcttcatccctcattctcttgtatggcaaacgtggccaacgtggggactctggccttaagaccaatgggctgcccggcccgctgtcaagcccttcccagctcctcctccaatgaaggaaagccctgccctagcatgggaggggctactagatgcacctgggagccccctgactggtccagaacactcgaggacctgagcactgggatttgaaagaacacaggctttccacccaagtttctctttagaggttggagaatgtgctgtgcacagctga

SEQ ID NO: 19354 - protein, 206 aa, Homo sapiens
MHACKSREEKMMVVATGKPCDFILRGSGGLFDICEILTKSWLRFEIWAPAGTWSHKSSFMLKNSCLGGGWLALGFFVARDSPATFIGQWRTDLGDSEVLRELARETLGLCTRSAPQDKGLGGEVPRGRLRPVGLCAGAGEPRDGARGCGDPLERYLDRQDPRCRSSTTHCPPPSRVRTLSPQRVSPTPSPCPGSLVPSRERRRSGP

SEQ ID NO: 19355 - DNA, 2260 bp, Homo sapiens
tttcaggagaaatgataccagctttttttgtacctctggtagaattcaactgtgactccatctggtcctgggctttttttgattgggaagccatgtgacttcatcctccgtggctctggtggtctcttcgacatctgtgagatactcactaaaagctggttgcgctttgagatctgggcgcctgctggaacctggagccacaagtcttcattcatgctaaagaactcctgtcttggtggagtggctcggctggcccgtgtatgggaacccatgaggctgtccgcgcatcccgaagtgtgaccttccaggcccacagggtggctggcgctgggcttcttcgtggcccgcgacagtccggccaccttcatcggccagtggcgcacggatctgggcgactccgaagtgctccgcgagctggcaagggagacactgggactctgcacccgctcagctccccaagataaaggcctcggaggggaagttccgcgtgggagactccggcctgttggtctctgtgctggtgcgggggagccgcgtgacggcgcgcgtgggtgtggcgacccgctggagcgctacctggaccgtcaggacccgcgctgccgctcctccactacccactgcccgcccccgtcgagggtccgcaccctgtccccgcagagggtgtcgcccacccctagcccctgccctggtagcctggtcccctcgagagagcgccggcgctccgggccctaggtgacccctattcgcttacaaagcataaagcaggtgccgaggctcccaggccctgggatcagctgcccgccgcatccccgctcctactccgaggacagtgactcctcagctttctcagcccagagccgcccccttggtgcccgcagcgaggatgaggcactaggcccggaggaagcgatccagacgggggctgaccaccaccacctggcctctccgagacggccccctgccccgcgcagccagtcccgggaccggctggatccgggtcagccccggggagctccagaagagagaggaggggagcccagctgcgggccctcagccctgccccgtgggcgcaggagcaggttgggcgcaaggatggagatgggcagcactcgtgggagccacagggcaggggcagcggggctcgggcaggagcactcctgggctctccgtgcccaccaccctgaagcaccctggctttcccagtccaaacccagtgtagagtttagcaccacacgcgccagcgtcttccgcacacaccagagcagctgctctgacgcctggacgaggagtttctggccaatgccgggacccataaggctgttgctagcgggacctccactagaccagcccctaaccgggctccagccccagaccctctagctcctgactcggcctacagatcctctagttcctcctcttcatccctcattctcttgtatggcaaacgtggccaacgtggggactctggccttaagaccaatgggctgcccggcccgctgtcaagcccttcccagctcctcctccaatgaaggaaagccctgccctagcatgggaggggctactagatgcacctgggagccccctgactggtccagaacactcgaggacctgagcactgggtaggatggacacacagccagactgcaaaccctcgggcatccccatgcctagggtctcccccgggttcctccagacccacagagttggggggtgcggggggaaggggaagggagcttgcatgcctccagccaggttcctggaccagaccagctgcccccaaaccctgtcccttctccttttcgtttgtggccttaaccctctttgcatcagggggccccctctgcctcttgcgttcctgacctcatgggaccagactcctcaggaatgtcacaatgggacctctattgtacattacagttgggggatgagctttgctatttaattactaatattattgaatgccttagaggaggccagagcagcctggtatcctgaggacacgtggcccagcagagcctctgaacagtaaagttttgctccagccaaaatgagagagagagagaatctattaagttagtttaaccagaaccccccttatccctgatgcttcctgttagtaattttgtatccagtgacccctgtcccttggccataaattcctacttgtgcttgttctatttggaatagagcccagttctgtactgatgtctcttttccccaactgagatagtttctaaataaaatttgcctttgctgcttt

SEQ ID NO: 19356 - protein, 105 aa, Homo sapiens
MDTQPDCKPSGIPMPRVSPGFLQTHRVGGCGGKGKGACMPPARFLDQTSCPQTLSLLLFVCGLNPLCIRGPPLPLAFLTSWDQTPQECHNGTSIVHYSWGMSFAI

SEQ ID NO: 19357 - DNA, 1108 bp, Homo sapiens
gtgacctgcagagagtccatgagccactgagtttgcgcatgttgctgtgatactcttcactctcaactcagggaaaaggaccctgacaggacaccctcctgttggagctaacagatgtgcacctttgagaatgatcattgagaagggaagccatgtgacttcatcctccgtggctctggtggtctcttcgacatctgtgagatactcactaaaagctggttgcgctttgagatctgggcgcctgctggaacctggagccacaagtcttcattcatgctaaagaactcctgtcttggtggagtggctcggctggcccgtgtatgggaacccatgaggctgtccgcgcatcccgaagtgtgaccttccaggcccacagggtggctggcgctgggcttcttcgtggcccgcgacagtccggccaccttcatcggccagtggcgcacggatctgggcgactccgaagtgctccgcgagctggcaagggagacactgggactctgcacccgctcagctccccaagataaaggcctcggaggggaagttccgcgtgggagactccggcctgttggtctctgtgctggtgcgggggagccgcgtgacggcgcgcgtgggtgtggcgacccgctggagcgctacctggaccgtcaggacccgcgctgccgctcctccactacccactgcccgcccccgtcgagggtccgcaccctgtccccgcagagggtgtcgcccacccctagcccctgccctggtagcctggtcccctcgagagagcgccggcgctccgggccctaggtgacccctattcgcttacaaagcataaagcaggtgccgaggctcccaggccctgggatcagctgcccgccgcatccccgctcctactccgaggacagtgactcctcagctttctcagcccagagccgcccccttggtgcccgcagcgaggatgaggcactaggcccggaggaagcgatccagacgggggctgaccaccaccacctggcctctccgagacggccccctgccccgcgcagccagtcccgggaccggctggatccgggtcagccccggggagctccagaagagagaggaggggagcccagctgcgggc

SEQ ID NO: 19358 - protein, 49 aa, Homo sapiens
MIIEKGSHVTSSSVALVVSSTSVRYSLKAGCALRSGRLLEPGATSLHSC

SEQ ID NO: 19359 - DNA, 694 bp, Homo sapiens
agatccatgcctatccgctcgcttgagcacacttacagatgctaggatcaggtaaccagcaaataaatattctgagatgcctccagccccttcctaacctaagaaccatcagtgacctgcagagagtccatgagccactgagtttgcgcatgttgctgtgatactcttcactctcaactcagggaaaaggaccctgacaggacaccctcctgttggagctaacagatgtgcacctttgagaatgatcattgagaaggtaatttagatagatttctgtctctgaaaatgtccgttcattgtgttgtagaattacactcgtgtgtttgtgctctgcatagcagtgtgtgcatcctatagtctttgcacagaagtgtatgtgtctgtaaaaacatagagtgtaatgtctgacacatagacactgagtaaactcagagtatgacttaataacatttaatctttacttatgaaacttgttactcttttttaaatataatattttttgtaagaagcaagtatgaatatgagtatcaacttgacctgtttcactggatagcaccaactcagggtgctcacacaggagctgtagaaggaatcctttacctctttcttctcctaaccccccaaaacaaaaactgattcctttccatttttgcctcttaggtacctaacatttttcctttcttctctttatccc

SEQ ID NO: 19360 - protein, 40 aa, Homo sapiens
MLGSGNQQINILRCLQPLPNLRTISDLQRVHEPLSLRMLL

SEQ ID NO: 19361 - DNA, 2606 bp, Homo sapiens
actcaatgctcaatgttgcccaggctggagtgcagtggcgtgatctcagctcgctacaacctctacctcccagccacctgccttgcctcccaaagtgctaagattacagcctcttcccggccgccaccccatctaggaagtgaggagcgtctctgcctggccactcattgtctgggatgtgaggagcgcctctgcccggccaccccgtctgggaagtgaggagtgcctctgcccggccgccaccccatctaggaagtgaggagcatctctgcctggctgcccatcatctgggatgtgaggagcgcctctgtctggccgccccgtctgggaagtgaggagcacctctgcccggccgccctgtccaggagtagagacggggtttcaccgtgttagccaggatggtgtcgatctcctgaccttgtgatctgcctgcctcagcctcccaaagtgctgggattacaggtgtgagccaccgcgcccggcctctcgagctcatttttaaggtaacgctgctagggttctgagtttgagaagggatcttctaaaggtaagcttaatattgcaactttcaccacagggcctctgtctaaattgcatttcaagtggaaggaaaggggtgtaagaagtgaaatagaattttgctgcagaccaaaatcattctacaaaatgtagaaatgataatagcttaccacaaattcagcaagatttaacgccaagtacagcggtgtagactttacaagtatccacttccgttgggtgatcagacaagctgaagggacacacaggatttgggacagtagccctttagacaatgctgggtgttgaagacagaacttcatcgtaaatccgtatgttctaatctgatatttatacaggctatgatcgtctcctgaaatgtttcccaattctttatatgtcttttaaagcacaatttaacatatgctaaaaaatttccttccgcatccaccagttttgaatttaaactcaactaagtctgccaggtcgtacaaaccacaccttaatcattctaagacaactcttaaaattaatctacttgtattgttctgcttgtaccttaactatggcataatgaatttgctaattcaaaatgttgcagagccagtaaccccagtgttatctgcagaccatctgaggtacttttaagcatttttttgaattctattgtttgctttgaaaacatggggtttaaacggtcaaggaaaatgcgttttgtctcgtcattcaggagctcttcgggacacgcctgcagtgttgcagacaggatggaatgcaggcaagagggttccaactcagagcgcagacccttgggaaaagcacttggtgggtcatcctgaaaacttcccatttccggcagtttttgatggcatggcagtcgtgacacctgaggctctcctttggggcactgtcctctgtggccgtgggtggccctgggccctcctcccagccagtcccgccccagagcttcaacaccactgcaggacacccgagcaaaatactctgttggagcagggaacaaacccacggctgcgctcggagtggctgctgaggctggatttcttcttactgattctttcacatatggaagaactgggccgccactgggaagcgagaggccagccctgctcggatcctttctcatttccagtgataatgcctcactctgaatttccatcagccgcaggcttattcatccaggagggtgcatctgcaggccaagggccctccatcggcattctttgcttaaggctgtatgacagtttgtccgagtcacctcctccggcccactgcacttgtgccaggcaggtgccgaggggccctcttctgtccctcatgcttcgtgttcttggatgccgtgggcctgaggtcacgccttcgtcagtccgggagggccttcaatggatctcaatatgaacctataggcggacgttgagcatcatggaagccacgatgtagaagtaggggaagttgatgcgcagccaccaggccagattgaagaagacagcagcttgcgagtcagccccttgcgtaagactccacaggagcgggcggcggctgagcgctagagccggacagccaggcgcgacagagccgccgccatatagagaccggcgctcccacagcccgcctgccctctccgcgccgcgtcgctcgggccgctggccttcgcttggcgggctcagggagcgagggaggcggcggctagactggcgggcgagcgggctgcgggagcggagtccgcgcgtcacgctcggagaagcacctccgcgagctgccgcctggtcccccagttcactgtattttttaaattttctttgagacttccttttgacccatggattacttaaaagtgtgttgttttgtttctagtcatttgaatatcttcctgttatctttgttattgatttctcatttgattccattgtcattacaaaacacactctatatgatttcacttatttaaaatttgttgaggcttgtttgatagcccaggatatgacctatcttgggatatatattttgtggtcatttgaaaagaatgtgtattctgatgttgctaagtggagtggaccataaatgttgatttg

SEQ ID NO: 19362 - protein, 181 aa, Homo sapiens
MAVVTPEALLWGTVLCGRGWPWALLPASPAPELQHHCRTPEQNTLLEQGTNPRLRSEWLLRLDFFLLILSHMEELGRHWEARGQPCSDPFSFPVIMPHSEFPSAAGLFIQEGASAGQGPSIGILCLRLYDSLSESPPPAHCTCARQVPRGPLLSLMLRVLGCRGPEVTPSSVREGLQWISI

SEQ ID NO: 19363 - DNA, 640 bp, Homo sapiens
atgagaaaggatccgagcagggctggcctctcgcttcccagtggcggcccagttcttccatatgtgaaagaatcagtaagaagaaatccagcctcagcagccactccgagcgcagccgtgggtttgttccctgctccaacagagtattttgctcgggtgtcctgcagtggtgttgaagctctggggcgggactggctgggaggagggcccagggccacccacggccacagaggacagtgccccaaaggagagcctcaggtgtcacgactgccatgccatcaaaaactgccggaaatgggaagttttcaggatgacccaccaagtgcttttcccaagggtctgcgctctgagttggaaccctcttgcctgcattccatcctgtctgcaacactgcaggcgtgtcccgaagagctcctgaatgacgagacaaaacgcattttccttgaccgtttaaaccccatgttttcaaagcaaacaatagaattcaaaaaaatgcttaaaagtacctcagatggtctgcagataacactggggttactggctctgcaacattttgaattagcaaattcattatgccatagttaaggtacaagcagaacaatacaagtagattaattttaagagttgtcttagaatgatt

SEQ ID NO: 19364 - protein, 194 aa, Homo sapiens
MRKDPSRAGLSLPSGGPVLPYVKESVRRNPASAATPSAAVGLFPAPTEYFARVSCSGVEALGRDWLGGGPRATHGHRGQCPKGEPQVSRLPCHQKLPEMGSFQDDPPSAFPKGLRSELEPSCLHSILSATLQACPEELLNDETKRIFLDRLNPMFSKQTIEFKKMLKSTSDGLQITLGLLALQHFELANSLCHS

SEQ ID NO: 19365 - DNA, 1548 bp, Homo sapiens
agcagaaaaggctctctcacctctaacgccgcagtggattagagcatctgagaagctctggaaaaaacctctcaggaaaacaacgacttcagcaggacccactagccaaggaaaggggataaaataaatagcaaagggaaggaaaaacacgcacctctgggatgctgcaggtcctgttgcagccgccgccatccctcgaagccaccgttgcttctgccagagctgctactagcgcgcttatcagctccgccaccgcccaagggggaaacttctgcagaaaccccaaccgagcttccgtcgtaagtagccaacgagcagccacgcagcgtgctgctagcggggcgggaggctacgcgcgggcgcgtggcctgctggggcagtggaggaccgagtcttcccagcccgcaccctggcctgggacccgcgctcccagtcccgggacccgcgctcccagtccccgcccctagcagccatggttatggaggcccgggccaacacgttctccttctcttccaccgcgcccactgctgcggtcactcggaccaagcctccaggagtagtagctcagaagcacttttgtagcataccgttacccctcaggagcttagcggttaagggcgtttgcatgtcttttagtaacacaagctccaggccgggcgccgtggtgcatgcctgtaatcccagctacattggaggctgtggtaggagggtcacttgagcttggaatatgaaggctgcagtgagcggtgatcgagccactgcactccagcctgggtaacagagcgagacactgtctcgtaaataaaatgttttgtatagattcccatagaattgagttagacatcaggcatagaattattagccactttgatgtctgccttgggagtaaaacatataataaggggcagctttaaaccatttcaatcaatagcctctaacttctccagaggttcttattttatgaattcctaagcaggagactacctggattaagacatttggtggacaccattctgagatgaagaatctcgattaggcggaagggagatctctacttgactggagcttcccaatgacatagttgagtgtcccccaaaagaaactttagaacaagatgtttatcatgccatatctctatggaaaaggaaattctttaaaagaaaacaaaggcaaacaattgataatctgtttcttatgggaaagttttcattataaaagaaaaaaagggctgggcaccgtggctcacatctgtaatcccaacactttgggaggctgaggtgggtggatttcctgaggtcagaagtacaagaagagcctggccaacatggcgaaaccctgtctctactaaaaatacaaaaattagctggtggtgtgcaactgtagccccagctacttgggaggctgaggcaggagaatcacttgaacccaggaggtagaagttgcagtgagccgatgtggcaccactgcactctagcctggatgacagagtgtgactccatctcaaaaaaagaaaaagaaaaagaaaaaatggacaaagtatactggtcc

SEQ ID NO: 19366 - protein, 81 aa, Homo sapiens
MVMEARANTFSFSSTAPTAAVTRTKPPGVVAQKHFCSIPLPLRSLAVKGVCMSFSNTSSRPGAVVHACNPSYIGGCGRRVT

SEQ ID NO: 19367 - DNA, 715 bp, Homo sapiens
gactgttctacatttggcctgtgcccatggccatgtggaagtggtcactctcttgctggggagaagatgcctgattgacatctgtgacagactaaacaggacgtctttaatgaaggagggaaacactccacttttgtttgctataaattctgggagacagcatgtggtggaattcttattgaagaaccaggcaaatatacatgccgttgacaatttcagaagttctgccaaggaaagagaaaataccttttaatcccagggaaaggattgcaatcaccacattataagaacagccctcatgcttgcagtacagcatagctcgtcaagtatcatcagcctcctccttcaacaaaatataaatatcttttctcaagacatgtttggccaaatggctgaggattatgctgtttattgtgatttgagaagcattcaacaacaaattttggaacataaaaataagaaacttaaaaatcatctttgaaatgacaatcaagtctcgctctatcaccagtctggagtccagtggcatgatctcagatcactgcagcctccacctcccaggttcaagcaattctcctgcctcagcctcccgaagagctgggacaacaggcacatgcaaccacacccagaaggaatatctaagaagcttgcatgtttgacagaaacagcagctatgaagcctgcaaatttgaaaaaaagaaaagaaggtgcaaaa

SEQ ID NO: 19368 - protein, 60 aa, Homo sapiens
MLAVQHSSSSIISLLLQQNINIFSQDMFGQMAEDYAVYCDLRSIQQQILEHKNKKLKNHL

SEQ ID NO: 19369 - DNA, 696 bp, Homo sapiens
ctcgctcacttaggactgttctacatttggcctgtgcccatggccatgtggaagtggtcactctcttgctggggagaagatgcctgattgacatctgtgacagactaaacaggacgtctttaatgaaggagggaaacactccacttttgtttgctataaattctgggagacagcatgtggtggaattcttattgaagaaccaggcaaatatacatgccgttgacaatttcagaagttctgccaaggaaagagaaaataccttttaatcccagggaaaggattgcaatcaccacattataagatccctgaacttcagagagtattgccatttggattcatggagttggcgaactgctacactgctaccttgtagaactatgggggtatgaaacaaggctgaaggcttttaaccatgggagaaaaaggtgttggtattattcatatagcataacctgaggttggagaggaccacttgggagcctgtaaccaaaactagaaggtaacttctgggatggacggaggttcccttgaagcagtgccaacctaaatctacctcagaacagccctcatgcttgcagtacagcatagctcgtcaagtatcatcagcctcctccttcaacaaaatataaatatcttttctcaagacatgtttggccaaatggctgaggattatgctgtttattgtgatttgagaag

SEQ ID NO: 19370 - protein, 47 aa, Homo sapiens
MKEGNTPLLFAINSGRQHVVEFLLKNQANIHAVDNFRSSAKERENTF

SEQ ID NO: 19371 - DNA, 439 bp, Homo sapiens
gcgtcagccaggggtggaggaagcagaaaaggctctctcacctctaacgccgcagtggattagagcatctgagaagctctggaaaaaacctctcaggaaaacaacgacttcagcaggacccactagccaaggaaaggggataaaataaatagcaaagggaaggaaaaacacgcacctctgggatgctgcaggtcctgttgcagccgccgccatccctcgaagccaccgttgcttctgccagagctgctactagcgcgcttatcagctccgccaccgcccaagggggaaacttctgcagaaaccccaaccgagcttccgtcaacagccctcatgcttgcagtacagcatagctcgtcaagtatcatcagcctcctccttcaacaaaatataaatatcttttctcaagacatgtttggccaaatggctgaggattatgctg

SEQ ID NO: 19372 - protein, 55 aa, Homo sapiens
MLQVLLQPPPSLEATVASARAATSALISSATAQGGNFCRNPNRASVNSPHACSTA

SEQ ID NO: 19373 - DNA, 2687 bp, Homo sapiens
gagtctgcggccgccaggaagcccagattcgagtgtccggagagtaaccggaagtgctgtccccaggcctaggggcggcgccggcggctgccagggagaggcaagaattgagtgttgtgaatagttctgaactagagaccttttgaaaccaaaaggaagatggtcttgagtctttcttgttacgaatgctatcttctttgagaagtcaaatagtcaggatcaggaatgtatgttttcttccatctggattctagggttggaaataccaagtaaggaattaacatatatgatgctggaaacttgtagaggctcatgattgaaaggcctgaaacagatgtatcttccaagttcttatcaagaaaatgactgtgagggcaacgatgggtcaagaagaccagcggaaaactccctaggagagagccatagaaaatgtacacttcagaagagaaatgtaatcagagaactcaaaaaaggaaaatatataatgtatgccctcggaagggtaaaaagatttttattcatatgcatgagattattcagatagatggtcatatataccagtgccttgaatgcaagcaaaacttgtgtgaaaacttagctcttattatgtgtgagagaacccatactggggagaaaccttataaatgtgatatgtgtgagaaaacctttgtccaaagctcagatcttacttcacaccagaggatccacaattacgagaaaccttataaatgtagcaaatgtgagaagagcttttggcatcacttagtgctttcaggacatcagagaacacatgcaggtaaaaaattctatacatgtgacatttgtggcaagaattttggtcagagttctgatctgcttgtccaccagcgaagccatactggcgagaaaccatatctatgtagtgagtgtgacaaatgcttcagtagaagtacaaacctcataaggcatcgaagaactcacacaggtgagaaaccatttaagtgtctcgagtgtgaaaaagcttttagtgggaaatcagatcttattagccaccagagaactcacactggggaaaggccctacaaatgtaataagtgtgagaaaagttaccgacaccgttcagccttcattgtacataaaagagttcatactggggagaagccctataagtgtggtgcctgtgaaaaatgctttggccagaaatcagaccttatcgtgcaccagagagtccacacaggtgagaagccgtataaatgcctggaatgtatgagaagttttactcggagtgccaacctaattaggcaccaggcaactcacactcacacttttaaatgccttgaatatgaaaaaagctttaactgtagctcagatcttattgtacatcagagaattcacatggaagagaaaccacatcagtggtctgcgtgtgagagtggcttcctcctaggaatggactttgttgcccaacagaaaatgagaactcaaacagaggagctacactataaatacactgtatgtgataaaagcttccaccagagttcagcccttcttcaacatcagacagtacgcattggtgaaaaaccgtttgtctgtaatgtgagtgaaaaaggtcttgagcttagccctccccatgcgtcagaagcctcacagatgtcttgaccaggcgagaagctgtaataccaatattaaaaattatttatgtatcagagaactcattaagatgaggacaaatctcagactttgctcagagctcagaattcagtggggaccagagagcctgcaattggaaatatgagaaattctttgcccagagagctgccctaacagaacacttcatcctcactccaacgagaaatctacagatgcccagaggttttgaaaacttaccgtctgagctcaaatttgatcactcacaagaggattcatacaagtgggaaaccttagaaatgcactgagtgtgagagagctttctactaatgctcagcccttctcgttgtaagagaattcacaccggagaacaactttttaaatgccttcagtgtcagttgtgctgcagacagtatgaacatctcattggacctcagaaaacccaccctggggagaagccccagcaagtgtgaaaaaagcttctaacaaaactctgacttacccatcagagaagccatactggtgaaaaattgtatatttgtcttacgtatggcaaaagcattcattggagagccttacttgggtttgcacccaaaaaaaaaaacccaatctgaggaaagactgcaagtgtctgaatgaagagtgcttgtcaatgatcaactcttgtggtacatcagggaactcacataggtgaaaaaacccatacttaccttgagtctgagaaaacctttggtagaagctcctgtcttatcaggccccaaaaaacctgttctgcagtgagagatttaattgtgggtgagaatctatgtacatatgtatgagaagactgttctcatagttagttgactcatatggtagagaggactttacatgaaatcagtatgaaaatagttttttagatacccagaagcttgttctgggagaagctagggcgggtcagagtagacctgatgggtaactcaggtaaagatgcttttcttttatctgaactacttaatgattgctttacttttactttttaaaaaattcagaaatccaataaaggaaaggacggtaacctt

SEQ ID NO: 19374 - protein, 402 aa, Homo sapiens [sequence omitted]

SEQ ID NO: 19375 - DNA, 1583 bp, Homo sapiens
gaggaataacatgccattcaatgtatacaattacatgaaccattgtaggttttgagatactgcactacatttcctgaaaactcctctcgctcacttaggactgttctacatttggcctgtgcccatggccatgtggaagtggtcactctcttgctggggagaagatgcctgattgacatctgtgacagactaaacaggacgtctttaatgaaggagggaaacactccacttttgtttgctataaattctgggagacagcatgtggtggaattcttattgaagaaccaggcaaatatacatgccgttgacaatttcagaaggtgcaatagtttttgtttttggtttgtttgttttttttcctaaaaatctgagtgttctagagtggtaagagtcactcaagtcagaactgttaataagatttaacttataattattggcatatagtaaaaaataacatgaataatcagttaggtagaaaagcagttatttggactgagcaacataaaaaacagtatatagtaggattcatcttctcttatagactgttatttgtaatttgatgtttttggtcctgtaatcttatattagctaaaggggttttgtattttattaattttataaagtgtagacttggcgccggcctcttcccagccagcttgaaagggtttgcgttgccggccttgtgggcccttgaagcgctctgttaaagcgctctgtgggcggcctggccccagctcctctagtctaggcgcacgaagggagttgctcctaggtcttgtccgtgccgggttcgcttttctttccttcccgaagcctggcccttagatctactatcgcagagtctgcggccgccaggaagcccagattcgagtgtccggagagtaaccggaagtgctgtccccaggcctaggggcggcgccggcggctgccagggagaggcaagaattgagtgttgtgaatagttctgaactagagaccttttgaaaccaaaaggaagatggtcttgagtctttcttgttacgaatgctatcttctttgagaagtcaaatagtcaggatcaggaatgtatgttttcttccatctggattctagggttggaaataccaagtaaggaattaacatatatgatgctggaaacttgtagaggctcatgattgaaaggcctgaaacagatgtatcttccaagttcttatcaagaaaatgactgtgagggcaacgatgggtcaagaagaccagcggaaaactccctaggagagagccatagaaaatgtacacttcagaagagaaatgtaatcagagaactcaaaaaaggaaaatatataatgtatgccctcggaagggtaaaaagatttttattcatatgcatgagattattcagatagatggtcatatataccagtgccttgaatgcaagcaaaacttgtgtgaaaacttagctcttattatgtgtgagagaacccatactggggagaaaccttataaatgtgatatgtgtgagaaaacctttgtccaaagctcagatcttacttcacaccagaggatccacaattacgagaaaccttataaatgtagcaaatgtgaga

SEQ ID NO: 19376 - protein, 51 aa, Homo sapiens
MKEGNTPLLFAINSGRQHVVEFLLKNQANIHAVDNFRRCNSFCFWFVCFFS

SEQ ID NO: 19377 - DNA, 578 bp, Homo sapiens
gcatctgagaagctctggaaaaaacctctcaggaaaacaacgacttcagcaggacccactagccaaggaaaggggataaaataaatagcaaagggaaggaaaaacacgcacctctgggatgctgcaggtcctgttgcagccgccgccatccctcgaagccaccgttgcttctgccagagctgctactagcgcgcttatcagctccgccaccgcccaagggggaaacttctgcagaaaccccaaccgagcttccgtctaacacaagctccaggccgggcgccgtggctcacgcctgtaatcccagcactttgggagtccgagacgggtggatcacgaagtcaggagttcaagaccagcctcgccaagatgctgaaaccccgtctacgaaaaatacaaaaattagccgggcgtgatggtgggcgcctgtaatcccagctactggggaggctgaggcaggagaatcgcttgaacctgggaggcagaggttgcagtgagccgagatcgcgccactgcaccacagcctgggcgacagagcaagactccttaataaataaataaataaataaaaaataaataaa

SEQ ID NO: 19378 - protein, 46 aa, Homo sapiens
MLQVLLQPPPSLEATVASARAATSALISSATAQGGNFCRNPNRASV

SEQ ID NO: 19379 - DNA, 6856 bp, Homo sapiens
ggaagctcggttggggtttctgcagaagtttcccccttgggcggtggcggagctgataagcgcgctagtagcagctctggcagaagcaacggtggcttcgagggatggcggcggctgcaacaggacctgcagcatcccagaggaactgactaaggctttggaacagaaaccagatgatgcacaatattatcgtcaaagagcttattgtcacattcttcttgggaattactgtggtgcagatgctaatttcagtgactggattaaaaggtgtcgaagctcagaatggctcggaatctgaggtgtttgtggagaattatgagaccctcgtgttttactggccctcgctgctgtgccttgccttcctgctgggccgcttcctgcatatgtttgtcaaggctctgagggtgcacctcggctgggagctccaggtggaagaaaaatctgtcctggaagtgcaccagggagagcacgtcaagcagctcctgaggataccccgccctcaagagaaaaaaaagtcttggttccaaaccaggatatatgagtgggatccctgctttcaatttccaagcagaatgattggaaccattgtgttggcattcatctgcctgtatcttttcattgtcatcgagttctgcgtgtttgtgtacgtgagagatgagttggatgtgcttgaaaacaacctggaaagctacatcaccttcacgaaccattcaggggtcctgaccccagtcatcctgcaggtgaaagagctgatcagtgtcaccaaaggagtctgggtggcgaccattttgcccgcgtatctcacgtgtgtgagctatctgttccacattttggtctgttacagaaagcacatgaagaggctatgggcaggagataaacattttcttcctttgaagttccataacccggcctcgtcggagagcatggtggccattgcaaggtactctggctggcaaatagcctatattctgtggggctacctcatcattcacatggtacagagcctatgtggcatggcaatcatgtacagcctggtgctacccatcgtccaaaccagggcctggaaatgctgcaagggctgggcattgggatgaaagcgttccacaacttcaactactttctgttcttctacaacgtgctgctgggcctgggtgcctgcctttccaggctgctcatcagttgcctcctcggcatgtggctgattgcccgcatcgacaggaccatcatgcagagtggctatgagggagcagacatggggttcagtgcatggattgggatgctctacatggaccattatcacatcaaccctgtgcttgtcagcttttgccacatcctgatcacaaatcacagggagaagaagctgcagcagagcaccaaatactggtgcctaaatcaatcggcagagtcccttcggatttgcgccatgcgcggcggggagaaccggcctcctgctcgagttcagagctcatctgaggaattggaattgagacaccaaagcctagacgcgtttcctggacgacggcttcccggcaggggcatccagccagcggccaagatgtcgtcagtggggaaggtgacccaggttccgaatgggaaagcctaccagcagatcttccaggctgaggtgcagctggtccactccctggcggccaccaggaagcgggctgcagagcgttctgtgaccctgaagagtggcaggatacccatgatgaagaaggtggagactcctgaaggggaggtgatgtctccccgacagcagaagtggatgcacagcctccccaacgactggatcatggaaaaccctgttctccacagggaaaaggaaagagccaagagggaaaaagcccgagagagtgagaacaccatcgctgcccgagaagtgcggggtctcatggatactatagttcctgagaagataagcaccagcacctttcaaaggcaagcagaacacaagaggaagagctacgagagcgctctggccagctttcaggaggagattgcgcaggtgggaaaggaaatggaacctctcatcgtggacacagggggactttttttgaagaagctgactgagtctgatgaagaaatgaaccgtctcttcctaaaggtggaaaatgacaccaaccttgaggactacaccatccaagccctgctggagctgtgggataaggtggccgggcggttactgctccggaagcaggagattaaggagctggatgaggccctgcactcgctggagttctcccgaaccgataaactaaaaagcgtgttgaagaaatatgcagaagtcatagagaaaacttcctacctcatgcggcccgaagtgtacaggctgataaatgaagaagccatggtcatgaactatgccctgctgggcaaccggaaggctctcgcccagctgtttgtcaacctgatggagtccaccctgcagcaggagctggacagccgccaccgctggcaaggcttggtggacacctggaaggctctcaagaaggaggccctgctgcagagtttcagtgagttcatggccagtgagagtatccatactcccccggctgtgacgaaggagctagaggtcatgctgaagacccagaacgtcctgcagcaaaggcggctgaagcatctctgcaccatctgtgacctcctgccccccagttacagcaaaactcagctgactgagtggcattcttccctcaactccctgaacaaggagctagacacctaccacgtggactgcatgatgcggatccgcctgctgtatgagaagacatggcaggagtgcctgatgcatgtgcagaattgtaagaagcagctgctggactggaaagccttcactgaggaggaggcagagaccctggtgaaccagttcttcttccagatggtgggagcactccagggcaaagtggaggaggacctggagctcttggacaaatccttcgagactctggcagatcagacagagtggcagagttcacacctcttcaagtatttccaggaggtggtacaactgtgggaggcacaccagagcgagctgttggtgcaggagctggagctggagaagaggatggagcagcaccggcagaagcacagcctggagagccaggtgcaggaggcccacctcgataggctcttggaccaactgaggcagcaaagtgacaaagaaacactggcgtttcacctggaaaaggtcaaagattatctgaagaacatgaaatccaggtatgaatgttttcacaccctcctgacaaaggaagtgatggagtacccagcgatcatgctgaaagaactcaactcctacagctctgccctcagccaatacttctttgtgcgtgaaatctttgaacagaacttggctggagaagtcattttcaaattcaggcaaccagaagcacatgaaaaaccctcccagaagagagtgaaaaaactgaggaagaagcaagggtctaaagaggacatgaccagaagtgaggaaagcataagtagtgggacaagtactgccaggtcagtagaagaggtggaagaagaaaacgatcaagaaatggagtccttcataactgaagaggtgctggggcagcagaaaaaatctccactgcatgctaagatggatgagtccaaagaaggctctattcagggactggaagaaatgcaggttgaaagagagggctccttaaacccatccctgaatgaggagaatgtgaagggtcaaggagaaaagaaggaggagtcagaggaggaagatgagaaggaggaagaggaggaggaggagaagctggaggaagagaaggaggagaaggaggcacaggaagagcaagagagtttatctgtgggtgaggaagaagacaaggaagagggtctagaggagatatactatgaggacatggagtccttcacaatctccagtggaaacacttattttgtctttgtacccctggaagaagagcattgtaggaagtcccattccaccttctcagccatgttcatcaacgacacttccagtgccaagttcatagaacaagtgacaattccatcgagactaattttagaaattaagaaacaattgttttcagagggaggcaacttttctcctaaagaaatcaattcactgtgttcccgactggagaaggaagctgcccggatagagttggttgaaagtgtcatcatgctcaacatggagaagttggagaatgagtacctggaccaggccaatgatgtcatcaacaagtttgaaagcaaattccataacctgtctgtggaccttattttcatagagaaaatccagcggttgctgacgaatctgcaagtgaaaatcaagtgccaggtggcaaaatccaattcgcaaacaaatggattaaatttctctctgcaacagcttcagaacaagataaaaacttgtcaagagtccaggggagagaaaaccacagtgaccacagaagaactcctcagcttcgtccaaacttggaaggaaaaactgagccagaggattcagtaccttaactgcagcctggacagggtgtccatgactgaactggtctttaccaacaccatcctgaaggaccaggaggaagacagtgacatcctgacatcttcagaagcccttgaagaggaggccaagctggacgtggtcacccctgagtccttcacccagctgagccgcgtggggaagcccctgattgaggacccagctgtggatgtgatcaggaagctcctgcaacttcccaacacaaaatggccaacccaccattgtgacaaagatccgtcccagacaggcttcaagcgacatcggtgccagccagaaaactctgggaagaaggctgtacccagtgccagtgctacctctgcaggcagcctccagaccacccacccacctttgtcccacagcttcacaccgcaccccaagcccaacaaaatggagagaaagtaccgggtgcttggggacaagcctccccctgctgccgaggattttaaggggatcatcttgaccctcctctgggagagcagtgagaacctgctgacagtcgcagaggagttctaccgtaaagaaaaacgcccagtcaccaggcctgactgcatgtgtgacacctttgaccagtgcgccgagaacattagcaaaaagatcctggagtatcagagccaggcaaataagtaccacaactcctgcctcatagaattacggatccagatcaggagatttgaggagctgctgccccaagtgtgttggctggtgatggagaatttcaaggaacaccactggaaaaagtttttcacctctgtgaaggagatccgaggacagttcgaggaacagcagaagcggctggagaaaagaaaggacaaaaatgcccagaagctccatctaaatcttggacaccccgtacatttccaagaaatggagtctctacacttaagtgaagaggaaaggcaggaagagctggacagcatgattaggatgaacaaggagaagctggaggaatgtaccagaaggaatggccaggttttcataaccaacttggccaccttcaccgagaagttcctactgcagttggatgaggtggtcaccattgacgatgtccaggttgcaaggatggagccccccaaacagaaattatcaatgctcatacgaaggaaactcgctgggctctccctgaaggaagagagtgagaaacccctgattgaacgtggaagcaggaagtggccagggatcaaacccaccgaagtcaccatccaaaacaagattcttctccagccaacatcatcgatttccaccaccaaaaccaccctgggccacctggcggccgtggaagcccgagatgctgtgtacctgaaatatttagcatcatttgaggaggagctaaagaggatccaggatgactgtacatctcagataaaggaggctcagcgctggaaggacagctggaagcagtccctgcacactatccaaggcctgtatgtgtgaccctccgccccaccatgaataaacactttcttatacagactccttccctgtccatctacctgcctacctactttccgtccatccctccctcccttcatccctccacccctgctctgtgccgggcactgtagctttaccagcgaacaggacacagcatggtccctgcccacgtggagccctcttcccatgaggaaggcaagcatgaaaggggaattccacgtggttagcagggagggtgagtaccaggaatcagtcacttcaaataggcaccagagcttcaaaggacatcacctccaaacagcatgctgggcagggcacgtcatcttgaaaaatgaaataaaggtcatgggaaaatgatattttaatttaacagaataaacaagtatgggttataattgcaactctgcactggttcctagacccaacaaataactaatccaatgttgattggtatttgtgccacaatttgtctgagcaaattgcaatattttggaaaaaaaaaaatcttccaggctcctttagtcctgtgttgcccagatcattctcttggagtcctccagcctgccagtctcttgttcgtcaactctcttcttcaattacatggcgtgagcgtacagccttcatttgtcggtagctgtgtgtgtcatctggacaggtttcctcagccatagacctaggaggccccagctcccaaatttccagcccctgaaagctgtgtgaccctccaagtgcagttccctcacctggggacactcactctgctctcctggtttgctccacccagtgaggccctgcttggttagcttggttagcttggtggcctttgtgcactgaagccaggagagtgaggagtccccttccatcaaggcaaaagcaatctcctgttcttttctgtgctccccccacccc

SEQ ID NO: 19380 - protein, 1646 aa, Homo sapiens
MWHGNHVQPGATHRPNQGLEMLQGLGIGMKAFHNFNYFLFFYNVLLGLGACLSRLLISCLLGMWLIARIDRTIMQSGYEGADMGFSAWIGMLYMDHYHINPVLVSFCHILITNHREKKLQQSTKYWCLNQSAESLRICAMRGGENRPPARVQSSSEELELRHQSLDAFPGRRLPGRGIQPAAKMSSVGKVTQVPNGKAYQQIFQAEVQLVHSLAATRKRAAERSVTLKSGRIPMMKKVETPEGEVMSPRQQKWMHSLPNDWIMENPVLHREKERAKREKARESENTIAAREVRGLMDTIVPEKISTSTFQRQAEHKRKSYESALASFQEEIAQVGKEMEPLIVDTGGLFLKKLTESDEEMNRLFLKVENDTNLEDYTIQALLELWDKVAGRLLLRKQEIKELDEALHSLEFSRTDKLKSVLKKYAEVIEKTSYLMRPEVYRLINEEAMVMNYALLGNRKALAQLFVNLMESTLQQELDSRHRWQGLVDTWKALKKEALLQSFSEFMASESIHTPPAVTKELEVMLKTQNVLQQRRLKHLCTICDLLPPSYSKTQLTEWHSSLNSLNKELDTYHVDCMMRIRLLYEKTWQECLMHVQNCKKQLLDWKAFTEEEAETLVNQFFFQMVGALQGKVEEDLELLDKSFETLADQTEWQSSHLFKYFQEVVQLWEAHQSELLVQELELEKRMEQHRQKHSLESQVQEAHLDRLLDQLRQQSDKETLAFHLEKVKDYLKNMKSRYECFHTLLTKEVMEYPAIMLKELNSYSSALSQYFFVREIFEQNLAGEVIFKFRQPEAHEKPSQKRVKKLRKKQGSKEDMTRSEESISSGTSTARSVEEVEEENDQEMESFITEEVLGQQKKSPLHAKMDESKEGSIQGLEEMQVEREGSLNPSLNEENVKGQGEKKEESEEEDEKEEEEEEEKLEEEKEEKEAQEEQESLSVGEEEDKEEGLEEIYYEDMESFTISSGNTYFVFVPLEEEHCRKSHSTFSAMFINDTSSAKFIEQVTIPSRLILEIKKQLFSEGGNFSPKEINSLCSRLEKEAARIELVESVIMLNMEKLENEYLDQANDVINKFESKFHNLSVDLIFIEKIQRLLTNLQVKIKCQVAKSNSQTNGLNFSLQQLQNKIKTCQESRGEKTTVTTEELLSFVQTWKEKLSQRIQYLNCSLDRVSMTELVFTNTILKDQEEDSDILTSSEALEEEAKLDVVTPESFTQLSRVGKPLIEDPAVDVIRKLLQLPNTKWPTHHCDKDPSQTGFKRHRCQPENSGKKAVPSASATSAGSLQTTHPPLSHSFTPHPKPNKMERKYRVLGDKPPPAAEDFKGIILTLLWESSENLLTVAEEFYRKEKRPVTRPDCMCDTFDQCAENISKKILEYQSQANKYHNSCLIELRIQIRRFEELLPQVCWLVMENFKEHHWKKFFTSVKEIRGQFEEQQKRLEKRKDKNAQKLHLNLGHPVHFQEMESLHLSEEERQEELDSMIRMNKEKLEECTRRNGQVFITNLATFTEKFLLQLDEVVTIDDVQVARMEPPKQKLSMLIRRKLAGLSLKEESEKPLIERGSRKWPGIKPTEVTIQNKILLQPTSSISTTKTTLGHLAAVEARDAVYLKYLASFEEELKRIQDDCTSQIKEAQRWKDSWKQSLHTIQGLYV

SEQ ID NO: 19381 - DNA, 726 bp, Homo sapiens
tttcctttggaagactttggaacagctgcagctaggaataggtccctcgtgcaacagacagtggggaagccccaccctctgccataatcactgacccagctgcagccctgtgaaattccttatcatgcaggaagcctcaaactccaaggatcgcatgaaacaatgactgtccccactgacatacattcttcactgtgctcagtggcccccacactgtacctgagccattcctcacaccagtgctgtgaggtgagggcaatcagctcccctttatggcacgaggtcacaaagctttgagcctggacctgtaggatttgaccctgggtctgggggactccagagcctacctgcctagcaaccttgctctactgaaaggttgaaaggtggtgccttgggctggcttctgtttgcaggaaagcgttccacaacttcaactactttctgttcttctacaacgtgctgctgggcctgggtgcctgcctttccaggctgctcatcagttgcctcctcggcatgtggctgattgcccgcatcgacaggaccatcatgcagagtggctatgagggagcagacatggggttcagtgcatggattgggatgctctacatggaccattatcacatcaaccctgtgcttgtcagcttttgccacatcctgatcacaaatcacagggagaagaagctgcagcagagcaccaaatactggtgcctaaatcaatcggcaggt

SEQ ID NO: 19382 - protein, 70 aa, Homo sapiens
MWLIARIDRTIMQSGYEGADMGFSAWIGMLYMDHYHINPVLVSFCHILITNHREKKLQQSTKYWCLNQSA

SEQ ID NO: 19383 - DNA, 1107 bp, Homo sapiens
tttcctttggaagactttggaacagctgcagctaggaataggtccctcgtgcaacagacagtggggaagccccaccctctgccataatcactgacccagctgcagccctgtgaaattccttatcatgcaggaagcctcaaactccaaggatcgcatgaaacaatgactgtccccactgacatacattcttcactgtgctcagtggcccccacactgtacctgagccattcctcacaccagtgctgtgaggtgagggcaatcagctcccctttatggcacgaggtcacaaagctttgagcctggacctgtaggatttgaccctgggtctgggggactccagagcctacctgcctagcaaccttgctctactgaaaggttgaaaggtggtgccttgggctggcttctgtttgcaggaaagcgttccacaacttcaactactttctgttcttctacaacgtgctgctgggcctgggtgcctgcctttccaggctgctcatcagttgcctcctcggcatgtggctgattgcccgcatcgacaggaccatcatgcagagtggctatgagggagcagacatggggttcagtgcatggattgggatgctctacatggaccattatcacatcaaccctgtgcttgtcagcttttgccacatcctgatcacaaatcacagggagaagaagctgcagcagagcaccaaatactggtgcctaaatcaatcggcaggtccccatgtctcagctaggtccagaacaaggtggttcctgttgcagaccctaatcgacaacccaagactcaccatgcacagaaaattaaaattagggcacagttcccaggagtcccaaattctgatggcatgctcggagagctgacgctggcccccatcatctgctccaaagccaggctaggacatctgccaccaagagagggctcaatctaaccagcagctgtcccctgcaatgaaatgggatggcacaggcaccatccatgcagatggcagacaacaatggtcactcatgggatggccacctgggctgagggatgaagtttcaggactatttcactcccttggcaaaaaagattaaaaaactaaagaaaagtctgttgaa

SEQ ID NO: 19384 - protein, 118 aa, Homo sapiens
MWLIARIDRTIMQSGYEGADMGFSAWIGMLYMDHYHINPVLVSFCHILITNHREKKLQQSTKYWCLNQSAGPHVSARSRTRWFLLQTLIDNPRLTMHRKLKLGHSSQESQILMACSES

SEQ ID NO: 19385 - DNA, 2780 bp, Homo sapiens
atgggcgtccagctgcagttgtcgctggaccggccctggctgccttgagagagtcccttcggatttgcgccatgcgcggcggggagaaccggcctcctgctcgagttcagagctcatctgaggaattggaattgagacaccaaagcctagacgcgtttcctggacgacggcttcccggcaggggcatccagccagcggccaagatgtcgtcagtggggaaggtgacccaggttccgaatgggaaagcctaccagcagatcttccaggctgaggtgcagctggtccactccctggcggccaccaggaagcgggctgcagagcgttctgtgaccctgaagagtggcaggatacccatgatgaagaaggtggagactcctgaaggggaggtgatgtctccccgacagcagaagtggatgcacagcctccccaacgactggatcatggaaaaccctgttctccacagggaaaaggaaagagccaagagggaaaaagcccgagagagtgagaacaccatcgctgcccgagaagtgcggggtctcatggatactatagttcctgagaagataagcaccagcacctttcaaaggcaagcagaacacaagaggaagagctacgagagcgctctggccagctttcaggaggagattgcgcaggtgggaaaggaaatggaacctctcatcgtggacacagggggactttttttgaagaagctgactgagtctgatgaagaaatgaaccgtctcttcctaaaggtggaaaatgacaccaaccttgaggactacaccatccaagccctgctggagctgtgggataaggtggccgggcggttactgctccggaagcaggagattaaggagctggatgaggccctgcactcgctggagttctcccgaaccgataaactaaaaagcgtgttgaagaaatatgcagaagtcatagagaaaacttcctacctcatgcggcccgaagtgtacaggctgataaatgaagaagccatggtcatgaactatgccctgctgggcaaccggaaggctctcgcccagctgtttgtcaacctgatggagtccaccctgcagcaggagctggacagccgccaccgctggcaaggcttggtggacacctggaaggctctcaagaaggaggccctgctgcagagtttcagtgagttcatggccagtgagagtatccatactcccccggctgtgacgaaggagctagaggtcatgctgaagacccagaacgtcctgcagcaaaggcggctgaagcatctctgcaccatctgtgacctcctgccccccagttacagcaaaactcagctgactgagtggcattcttccctcaactccctgaacaaggagctagacacctaccacgtggactgcatgatgcggatccgcctgctgtatgagaagacatggcaggagtgcctgatgcatgtgcagaattgtaagaagcagctgctggactggaaagccttcactgaggaggaggcagagaccctggtgaaccagttcttcttccagatggtgggagcactccagggcaaagtggaggaggacctggagctcttggacaaatccttcgagactctggcagatcagacagagtggcagagttcacacctcttcaagtatttccaggaggtggtacaactgtgggaggcacaccagagcgagctgttggtgcaggagctggagctggagaagaggatggagcagcaccggcagaagcacagcctggagagccaggtgcaggaggcccacctcgataggctcttggaccaactgaggcagcaaagtgacaaagaaacactggcgtttcacctggaaaaggtcaaagattatctgaagaacatgaaatccaggtatgaatgttttcacaccctcctgacaaaggaagtgatggagtacccagcgatcatgctgaaagaactcaactcctacagctctgccctcagccaatacttctttgtgcgtgaaatctttgaacagaacttggctggagaagtcattttcaaattcaggcaaccagaagcacatgaaaaaccctcccagaagagagtgaaaaaactgaggaagaagcaagggtctaaagaggacatgaccagaagtgaggaaagcataagtagtgggacaagtactgccaggtcagtagaagaggtggaagaagaaaacgatcaagaaatggagtccttcataactgaagaggtgctggggcagcagaaaaaatctccactgcatgctaagatggatgagtccaaagaaggctctattcagggactggaagaaatgcaggttgaaagagagggctccttaaacccatccctgaatgaggagaatgtgaagggtcaaggagaaaagaaggaggagtcagaggaggaagatgagaaggaggaagaggaggaggaggagaagctggaggaagagaaggaggagaaggaggcacaggaagagcaagagagtttatctgtgggtgaggaagaagacaaggaagagggtctagaggagatatactatgaggacatggagtccttcacaatctccagtggaaacacttattttgtctttgtacccctggaagaagagcattgtaggaagtcccattccaccttctcagccatgttcatcaacgacacttccagtgccaagttcatagaacaagtgacaattccatcgagactaattttagaaattaagaaacagtgagtaaaaaactattttattctcatcctgttgttctgagttttgtaaacaaggtgaaatattaaaaaaaaaaaaagg

SEQ ID NO: 19386 - protein, 877 aa, Homo sapiens
MRGGENRPPARVQSSSEELELRHQSLDAFPGRRLPGRGIQPAAKMSSVGKVTQVPNGKAYQQIFQAEVQLVHSLAATRKRAAERSVTLKSGRIPMMKKVETPEGEVMSPRQQKWMHSLPNDWIMENPVLHREKERAKREKARESENTIAAREVRGLMDTIVPEKISTSTFQRQAEHKRKSYESALASFQEEIAQVGKEMEPLIVDTGGLFLKKLTESDEEMNRLFLKVENDTNLEDYTIQALLELWDKVAGRLLLRKQEIKELDEALHSLEFSRTDKLKSVLKKYAEVIEKTSYLMRPEVYRLINEEAMVMNYALLGNRKALAQLFVNLMESTLQQELDSRHRWQGLVDTWKALKKEALLQSFSEFMASESIHTPPAVTKELEVMLKTQNVLQQRRLKHLCTICDLLPPSYSKTQLTEWHSSLNSLNKELDTYHVDCMMRIRLLYEKTWQECLMHVQNCKKQLLDWKAFTEEEAETLVNQFFFQMVGALQGKVEEDLELLDKSFETLADQTEWQSSHLFKYFQEVVQLWEAHQSELLVQELELEKRMEQHRQKHSLESQVQEAHLDRLLDQLRQQSDKETLAFHLEKVKDYLKNMKSRYECFHTLLTKEVMEYPAIMLKELNSYSSALSQYFFVREIFEQNLAGEVIFKFRQPEAHEKPSQKRVKKLRKKQGSKEDMTRSEESISSGTSTARSVEEVEEENDQEMESFITEEVLGQQKKSPLHAKMDESKEGSIQGLEEMQVEREGSLNPSLNEENVKGQGEKKEESEEEDEKEEEEEEEKLEEEKEEKEAQEEQESLSVGEEEDKEEGLEEIYYEDMESFTISSGNTYFVFVPLEEEHCRKSHSTFSAMFINDTSSAKFIEQVTIPSRLILEIKKQ

SEQ ID NO: 19387 - DNA, 355 bp, Homo sapiens
ctaattagcgtgacctgaatcagagtcccttcggatttgcgccatgcgcggcggggagaaccggcctcctgctcgagttcagagctcatctgaggaattggaattgagacaccaaagcctagacgcgtttcctggacgacggcttcccggcaggggcatccagccagcggccaagatgtcgtcagtggggaaggtgacccaggttccgaatgggaaagcctaccagcagatcttccaggctgaggtaggagccgccctctgtcccgcttttctccatcccccttcccttgctttcttccaaacttccctccctcccagggcttccctactggaaattgaataaaacaagggcttt

SEQ ID NO: 19388 - protein, 99 aa, Homo sapiens
MRGGENRPPARVQSSSEELELRHQSLDAFPGRRLPGRGIQPAAKMSSVGKVTQVPNGKAYQQIFQAEVGAALCPAFLHPPSLAFFQTSLPPRASLLEIE

SEQ ID NO: 19389 - DNA, 1070 bp, Homo sapiens
gagcgccgttaacttttccccgaagagcatggcagagtgaagcacaagcaataatcctgtattattcgcgttcccagagtcccttcggatttgcgccatgcgcggcggggagaaccggcctcctgctcgagttcagagctcatctgaggaattggaattgagacaccaaagcctagacgcgtttcctggacgacggcttcccggcaggggcatccagccagcggccaagatgtcgtcagtggggaaggtgacccaggttccgaatgggaaagcctaccagcagatcttccaggctgaggtgcagctggtccactccctggcggccaccaggaagcgggctgcagagcgttctgtgaccctgaagagtggcaggatacccatgatgaagaaggtggagactcctgaaggggaggtgatgtctccccgacagcagaagtggatgcacagcctccccaacgactggatcatggaaaaccctgttctccacagggaaaaggaaagagccaagagggaaaaagcccgagagagtgagaacaccatcgctgcccgagaagtgcggggtctcatggatactatagttcctgagaagataagcaccagcacctttcaaaggcaagcagaacacaagaggaagagctacgagagcgctctggccagctttcaggaggagattgcgcaggtgggaaaggtgagaatcctccctctcccttctcttcccttcctgtgccattccaaaggtgggtgtgtcatggctcccagccttcctccccctctccagcagagaggtcctcaggggctcacagagccttagacgacatggaaccctctctgagtgcctgagtggcttgttatgagtgtttgtgggcacaggtccccatagttcttggaaaagccctacaggtcatgtgctgttgttaccccttttgcagtgaggcccagagagtctcacctgacttggtgcataagggcccaagtcagaacttccctccaggtctgacaccaaagcctagccttcggcctccctgctcagtccttctgatgaagggcagaatggcacaccccttgctgat

SEQ ID NO: 19390 - protein, 237 aa, Homo sapiens
MRGGENRPPARVQSSSEELELRHQSLDAFPGRRLPGRGIQPAAKMSSVGKVTQVPNGKAYQQIFQAEVQLVHSLAATRKRAAERSVTLKSGRIPMMKKVETPEGEVMSPRQQKWMHSLPNDWIMENPVLHREKERAKREKARESENTIAAREVRGLMDTIVPEKISTSTFQRQAEHKRKSYESALASFQEEIAQVGKVRILPLPSLPFLCHSKGGCVMAPSLPPPLQQRGPQGLTEP

SEQ ID NO: 19391 - DNA, 715 bp, Homo sapiens
ttttttatagctcgatgcaggaggatgtttggtcctacatgaagtcctgttcatttgattactatttaggagtaatcattctttcagctaatcgaggcactgcccggtacaggcactgccatggggctggggattccatggtgaacaagtacagacaggtccatgtcctgtgtcaaaagataaactcaggcacattaaaatgttgatgagtttatttgaacagtcagtcattcatgaattgggcagtgccagaccccaggcggttcagggatccaccgagggaacaccaggggacaccttttataaggtgtttatagaaggaaggcaaagaaaatatttgcttggttaaagtgaaaagttccaagttggctatttctgattggttaagcttacatttcattttcctagactatgaccattcattctgagttacgtttgttttctagctagaaactccaggcactggaaccgtgtcagcctgatggcctcctgtttatgatcttaaacacctggcggccgtggaagcccgagatgctgtgtacctgaaatatttagcatcatttgaggaggagctaaagaggatccaggatgactgtacatctcagataaaggaggctcagcgctggaaggacagctggaagcagtccctgcacactatccaaggcctgtatgtgtgaccctccgccccaccatgaataaacactttcttatacag

SEQ ID NO: 19392 - protein, 63 aa, Homo sapiens
MQEDVWSYMKSCSFDYYLGVIILSANRGTARYRHCHGAGDSMVNKYRQVHVLCQKINSGTLKC

SEQ ID NO: 19393 - DNA, 783 bp, Homo sapiens
tctagttttatttcctcttctgtgaattgtctgtgtgtgtcccttggccgtttctgaatcatttattatgtttaaaccagatcacatcttgggagaggcctcctggctgagggccagatgctggttacttggacacagtggatataatggcttgggtccccagatctccctgcagagttcacccatcccctcttcagctggccttggagggatgatcctctcctagcagcactgtgctcaccatgttttttccaggaatgtaccagaaggaatggccaggttttcataaccaacttggccaccttcaccgagaagttcctactgcagttggatgaggtggtcaccattgacgatgtccaggttgcaaggatggagccccccaaacagaaattatcaatgctcatacgaaggaaactcgctgggctctccctgaaggaagagagtgagaaacccctgattgaacgtggaagcaggaagtggccagggatcaaacccaccgaagtcaccatccaaaacaagattcttctccagccaacatcatcgatttccaccaccaaaaccaccctgggccacctggcggccgtggaagcccgagatgctgtgtacctgaaatatttagcatcatttgaggaggagctaaagaggatccaggatgactgtacatctcagataaaggaggctcagcgctggaaggacagctggaagcagtccctgcacactatccaaggcctgtatgtgtgaccctccgccccaccatgaataaacactttcttatacagactc

SEQ ID NO: 19394 - protein, 123 aa, Homo sapiens
MEPPKQKLSMLIRRKLAGLSLKEESEKPLIERGSRKWPGIKPTEVTIQNKILLQPTSSISTTKTTLGHLAAVEARDAVYLKYLASFEEELKRIQDDCTSQIKEAQRWKDSWKQSLHTIQGLYV

SEQ ID NO: 19395 - DNA, 3085 bp, Homo sapiens
aatgccagatggctcaacgtttatatataaaaaatgaaaccctattaagtaaacactcccatactcttggggttagggataccttttctaagtatgacaggagagctagaagccatagagggaatggctggctctttgtagccaaaaaaatcccgaaaaatgtcaaaagatggaaagacaaaccacaaactggaaaagtattcctcacaacttacagatcagagaaagggttaatatccttgtggtacaaagaactctcacaggtcaaatttttaaagagacgaaggacaaacacatgctcttcaaaagagaagcagttcatatggctagtcactgtaaaaaatgctcaacttcactgatgatgaaaaatgaaaatctaagcattatttagatatcatttctcaccaatagcctggcaaagtttttacatttggtaacaacgtaaaagaatgtcaagaaacagagactctgcagagactcttggtagagcgtacatggataccgctgtcatagggaacaatttgtcagtccctgtcaaaattctgagtgtgtagacgtttggcctagcacgtctaattctaggaatttatctgagagaaatacttggacactttttcaaaggtatatgttcaaaaatgttcacagcactgtttgaaatggcaaagaattggaagcaacactaacattgatatacagaaaattcaatgggccaggcacagtggcccacacctgcagtcccagcacttgagaggctgaggtgggtggatctcttgagcccaggagtttgagacaagcctgggcaacatgacaaaacctcatctctactaaaaatttaaagattagctcggtgtggtggtgtgcacgtgtagttccagctcctagaggtggagggcggttgggagggtgctgaggtgggaggattgcttaagtctttaagtcgagactgctgtgagctttgatcataccactgcactccagcctggtgagagagcaagaccgtgactcaaaaataacgaaaattggatgcataaatgagggtgccagatgtgcaggtaaataccacacagctgttaaagtaggtctgcatgtgctgacatggaaagacatgaaggagggctgttgtgtgaaaaaacaaatggacaaacaggacatgtctgtgatcccatcttttaaaacacatgcatgatatcaacatgcatactcacatctgtttaaatgaatctgtgtgagagacagagacagagagacaggtaccaaactgctgatgatcacctctgctgggtgggactgagagagatccctaaaaccttttttctcatcatgaagtgatgtttacatttttaataatgtgcatattacttttataaatataagattaaaatcatacattaaatgttatccatttatcactgatctataaagtaattaaaatgcatcctttttatttgtaaaggtttttaattacaaaaacaataaatgttcattccagtaaaacaagaaaatcagtataaaccaagaagcaagtgaagaacacagtccttccgccctgaaagcagcgccctttgcacttgctgttcatcctgccaggcctttccctttgggcacaggcctgtgtgtcagggtggctggggaagattacagggcttgggcgcttttgcgacctgatttccctgcaggtgaaccttggctgggctggccagtcaacactcctcctcttcagcattttcagttgctgcacaccataatgtaataagcattgtaacttactaattagtccctttgctattgaactttggaccatttccaatttcccactcctgtaattgtgctgaagagaatctctgcatccatgcatctctagagcaacagactcctagaagtgcgatgtctggatcaaagtgtgtacagatttttgaagtgttggtcacttttctctatcagaggtctctgtcaaaggtgagccttgtttgggaaatcagcgccttgcagagatgctggggtcgagaccccagggagaacaggcaggtgagctggtagtggagcagatcacagtgccttgcaaggaacccctgagccaggaagactccctgcaccaggccctaggaggcctctgcctactctgcaactcggcttctgagccaggccaccgggccctgccattcatggcagaggagtgtacatgttacctgctggctctctgcacacagagccccccaccccctcgcccctgatctagaaagaacatcagagcatcaaagattggattattgagctagatagtcaagggacaaccttgaacgtgtttgttccaggggaggttcttagttcggaacccatatgagctagcctaagccaaagaagtctctatgaaccatatccggggactcatggaaactgcagcaacgtcagagcatcaggcttgggtttggagctgggaacagcacccacaccaccgcttagattcctccatccatgaccccctgcccctgtcaccaccccgagctgtgtggctggtgcattcagcttctccatggagagggctcagcctgccataactccaagtgggaggaggggtgccagtcctcccttttctaagtgtaatgccaggggaaatccctcgatctcaggctgtcggtgaggctgcagtcactagcctgtcttttgcctctagggatggagccccccaaacagaaattatcaatgctcatacgaaggaaactcgctgggctctccctgaaggaagagagtgagaaacccctgattgaacgtggaagcaggaagtggccagggatcaaacccaccgaagtcaccatccaaaacaagattcttctccagccaacatcatcgatttccaccaccaaaaccaccctgggccacctggcggccgtggaagcccgagatgctgtgtacctgaaatatttagcatcatttgaggaggagctaaagaggatccaggatgactgtacatctcagataaaggaggctcagcgctggaaggacagctggaagcagtccctgcacactatccaaggcctgtatgtgtgaccctccgccccaccatgaataaacactttcttatacagac

SEQ ID NO: 19396 - protein, 123 aa, Homo sapiens; identical to SEQ ID NO: 19394

SEQ ID NO: 19397 - DNA, 491 bp, Homo sapiens
gcctggtgagagagcaagaccgtgactcaaaaataacgaaaattggatgcataaatgagggtgccagatgtgcagggatggagccccccaaacagaaattatcaatgctcatacgaaggaaactcgctgggctctccctgaaggaagagagtgagaaacccctgattgaacgtggaagcaggaagtggccagggatcaaacccaccgaagtcaccatccaaaacaagattcttctccagccaacatcatcgatttccaccaccaaaaccaccctgggccacctggcggccgtggaagcccgagatgctgtgtacctgaaatatttagcatcatttgaggaggagctaaagaggatccaggatgactgtacatctcagataaaggaggctcagcgctggaaggacagctggaagcagtccctgcacactatccaaggcctgtatgtgtgaccctccgccccaccatgaataaacactttcttatacagactc

SEQ ID NO: 19398 - protein, 123 aa, Homo sapiens; identical to SEQ ID NO: 19394

SEQ ID NO: 19399 - DNA, 672 bp, Homo sapiens
atgactctgaccaggagccatagcttcaggcttcctgctactggccaccagagagagtcgacccctgccctcacccaagtccttccccagcctgatctctcatcctcactgagctgctccatggtctggaaccagctgggcagcgaggcagctgggccgcttcactacacggggaacggggtctggcggctccgtggagcctccgttcccctcatcaatacggtgggcgcgacgcccggctcacaggggaagtgtgaggaccgcctaagaggaggtttgccgagagctcaagactcggtgaggggctctctcctcccaagctcaggaccctggccccgccctgcccctccccagcctcaatcgcatctggataatccttcatcgcagtgcccagcatcaccagcctggagggggctaccagccagtgcgatgggccagccagggacccaagccagggacctgctcaatctgccacctcatcaagccctcctggctcagcacagcacagccaccactatgacccattgctgggacctcctgctctctgaagtgccccccacccccaccccgcctgcccatggaccagaggggtccctctgctatgaatccagaaaagatgctatgaatccagaaaagatggagactgaagattttcaaagaaactctcaataa

SEQ ID NO: 19400 - protein, 223 aa, Homo sapiens
MTLTRSHSFRLPATGHQRESTPALTQVLPQPDLSSSLSCSMVWNQLGSEAAGPLHYTGNGVWRLRGASVPLINTVGATPGSQGKCEDRLRGGLPRAQDSVRGSLLPSSGPWPRPAPPQPQSHLDNPSSQCPASPAWRGLPASAMGQPGTQARDLLNLPPHQALLAQHSTATTMTHCWDLLLSEVPPTPTPPAHGPEGSLCYESRKDAMNPEKMETEDFQRNSQ

SEQ ID NO: 19401 - DNA, 276 bp, Homo sapiens
gctatgaatccagaaaagatgctatgaatccagaaaagatggagactgaagattttcaaagaaactctcaataagaaactgaaaaaccacaccctgtccagtccttccaccctctcagttccctccctcccaaaggcttgcccccatctcctcctccactttgccatgccttccgccatgggatgatgcagcaagaaggccctcaccagatgccagcatcttgactgtggacttcccagcctccaaaactgtgagaaataaatttctgtacaatat

SEQ ID NO: 19402 - protein, 63 aa, Homo sapiens [sequence omitted]

SEQ ID NO: 19403 - DNA, 829 bp, Homo sapiens
ctctgatggatgcaatgagcgctgggctctcagggcagggttgggacagcctcccctctgggacctttccctgagcctcagtcgaatgatgcgggcccaatcccatctccacctcttaccaaccatatggcctggactagattcttaacctccagaccttcactgtccacatgtacagggcagagatgggacataacagcacctgccacacacagtgactgtgcagaatgagaggagagagggaaggcaggtcagggcctggtccctttgtaggtggagggtgctcactgaggagcagccaggtgcatgggttgcccacttgtgctcaggaaacctcacccacctcagcccttattaggcacctaatgtggattctaagacagacactgaaacaaagctgcccctggggaagacgacatgtatccaaatggggagacagactagatggctgatcaagaaggagacagatgccatctggggagggacaggcataagccactttctggtgcttggagttagtgaggaagggctgagtgaaaatgccactctcctgtgcctaccaatattgggtcctgggtcatcatgtgctgggtgccctcagtgaaccaccatgtgatgcagagaccagagagtgaaggcccgggccggcgcagggtggtgcaactttgaatcgaggtggccaagggggagcttttcctgcacaagctctttttgcctgctgccatccatgtaagatgtgacttgcttctcgtcttccaccatgattgtgaggcttccccagccaccaaccatgtggaactgtaagtttaattaaacctctttcttttgt

SEQ ID NO: 19404 - protein, 74 aa, Homo sapiens
MRGEREGRSGPGPFVGGGCSLRSSQVHGLPTCAQETSPTSALIRHLMWILRQTLKQSCPWGRRHVSKWGDRLDG

SEQ ID NO: 19405 - DNA, 2428 bp, Homo sapiens
acctctcttagcctcaatttgctcctctgagaagaaaggtggtaagaggatgaatctcacagggttcttgcagggactaaatggggtgagccatggcaggtgctgacctggtgcttggctctgtggaaatggctgccagatgtgctgtggctgttatttattttttgaacacgaagtagctctctgcctcactcatggccttcctatgtttgggaaagcatatggaaagcaaacctgttttcccatttgtgaagagggtttgagtttccacatggctgatccctgtgcttggggtacccagaacagggctccctgggggctggtggaggggccctacgctaactcagatatctgggaaaattctggttggggttcattctttcaacaaatatacattgagcacctactttgtgcaggtacttttctgcctgcagaaggcactccctggggattgtctgaattctagctggggagtcatgggtgcactagacatcataagcaggctgcgtccacagtatgttgacattgtgatgtcctcctggcctcttccagatacacatgcatcctgccatattctgacagagatgatggacctcaggatcaactaaaaatgtcagtggacttcaggtctagaaggacaggctcctgtttccccagaacagttgggggcatatgggagtctgtggctggggaggggctggcagaaccctggatctcatacatcttaggattcccatgagagggctgaggtctgggggcttcctctgcaggaggaaattagttagtgagagttatggataggatccaagtcccctgggaagtgaaagggaggctggggctcagagccatccccaccacagtcccatcccagctctgcccgcctccttccacatccacccctccagacccaacctctaggggacctagaacaggagctgtagtgagcaacccgctcacacttctacctcaaacctcattcctggtgcaggtagcccttcagagcaagagtcactggcaagacccagcccatgtaggttctatgcctgccctgcctgaagaccagggctgtctctgccaggacagtcacagaggggttgggtggggccgtctctggacaggcagggcaggcacaggggcccacatccaaacaaggtgccctagaagagcaatgtggaaggaaaggccaggtatgtgactctgctgccccccacccccaccccctaacactatctcttctatcctgggcacctggccagaaaagtaccctgagggcactccggggaaggagcctgctccagtgacagcccaagatagaatcagtcccagagcactcctgcccctagcctgggaccatacagaactggcccagtgaggaggtccccagcctcctgggggattctttcctatgctggtggcagagcaattgactctgatggatgcaatgagcgctgggctctcagggcagggttgggacagcctcccctctgggacctttccctgagcctcagtcgaatgatgcgggcccaatcccatctccacctcttaccaaccatatggcctggactagattcttaacctccagaccttcactgtccacatgtacagggcagagatgggacataacagcacctgccacacacagtgactgtgcagaatgagaggagagagggaaggcaggtcagggcctggtccctttgtaggtggagggtgctcactgaggagcagccaggtgcatgggttgcccacttgtgctcaggaaacctcacccacctcagcccttattaggcacctaatgtggattctaagacagacactgaaacaaagctgcccctggggaagacgacatgtatccaaatggggagacagactagatggctgatcaagaaggagacagatgccatctggggagggacaggcataagccactttctggtgcttggagttagtgaggaagggctgagtgaaaatgccactctcctgtgcctaccaatattgggtcctgggtcatcatgtgctgggtgccctcagtgaaccaccatgtgatgcagagaccagagagtgaaggcccgggccggcgcagggtggtgcaactttgaatcgaggtggccaaggtttgctgtgggaggcccagggagctcccgtctgtgtccccttccaaatctcatcttgaattcccacgtgttgtgggagggacccagtgggaggtaactgaatcatgggggcaggtctttctgtgctgttctcgtgacagtaagtctcacgagatctgatggttattataagggggagcttttcctgcacaagctctttttgcctgctgccatccatgtaagatgtgacttgcttctcgtcttccaccatgattgtgaggcttccccagccaccaaccatgtggaactgtaagtttaattaaacctctttcttttgt

SEQ ID NO: 19406 - protein, 133 aa, Homo sapiens
MDRIQVPWEVKGRLGLRAIPTTVPSQLCPPPSTSTPPDPTSRGPRTGAVVSNPLTLLPQTSFLVQVALQSKSHWQDPAHVGSMPALPEDQGCLCQDSHRGVGWGRLWTGRAGTGAHIQTRCPRRAMWKERPGM

SEQ ID NO: 19407 - DNA, 3455 bp, Homo sapiens
actcgatgggagccactagagggaataagatgttctcctgctgtatcccgactttctgaggctctgactccaggaaagcccggcacgagggccttttccattgctgcaggctttttggctcagcactcacttttggcacctctggccatttggcaggaagtacccaaagtgatggccaggcagggccctgatgtctgatgatctggctgccgagcatcatttgtgcagagctccatgtgagagatcagtgaggagctggttgatgggttcaactcctccatcttcctagacaagggttgtctgctcgtgttcttgttgccgtgacagcccttctcgcaccctggaacctccaggcattcgcccctttgctggatctgggatcctcatagctcaggttctcaagactgcctttattgtaaaagaaagaaaattaagtgccttgctttgaagtctaaaggactctcctagggtgggtgttgtagtccattttgtgctgctgcaacaaaacaccatagactgggtaatttatattgtacagaaatttatttctcacagttttggaggctgggaagtccacagtcaagatgctggcatctggtgagggccttcttgctgcatcatcccatggcggaaggcttcacagggcagaagggcaaagagagagtgagagacagcaagagggggcagacccacctccacgatactcacattaatctacccatggtggtagagctctcatgacctaaacacctcttaaaggtcccatctcccaatatggtcacaatggcaactacacttcaacatgagttttagagaagacaaacatgcacaccatagcagtggatccacactgtaaactggtctctcaacttggtgggggcagtggggtggggaatgaggttcccccagatcctctccctccatgccagaagaagactaagcttcaggtagcttagggggaaggtgatgcggccctagctttgggcagttcttagttctgtcttgtgtgaccttgagcagccatttgacatccctaagcctctgttttccatctcaacaatggggatttttttaggacgcactagagtgatgctcttcatacaagctcttaataggggaatgctaacctctcttgctgtgggcactcacatccctcttcacacacaagtccccaaggagttggggcttcctggtctgagctctagctcacgattctcctggtggtttttggtgctgcctctgactctgtgtccttccttgtcccactcagtataaaaatgagttaaccctgcacctgggcgagatctgcacaatgtggaccctccaggtgggcactcaggagcatatggtggcatccctggaccaggcttccagagcagacacataccctacagcaccaccttcctgggaaaccactggttcttcgtctctaccccacagttcctggactgggtattcaataggtgggagcctgtcccttcgacagcacagtggggactctgccaccagctagctgtgtgtctcaggaattttgctgcacctctcttagcctcaatttgctcctctgagaagaaaggtgatacacatgcatcctgccatattctgacagagatgatggacctcaggatcaactaaaaatgtcagtggacttcaggtctagaaggacaggctcctgtttccccagaacagttgggggcatatgggagtctgtggctggggaggggctggcagaaccctggatctcatacatcttaggattcccatgagagggctgaggtctgggggcttcctctgcaggaggaaattagttagtgagagttatggataggatccaagtcccctgggaagtgaaagggaggctggggctcagagccatccccaccacagtcccatcccagctctgcccgcctccttccacatccacccctccagacccaacctctaggggacctagaacaggagctgtagtgagcaacccgctcacacttctacctcaaacctcattcctggtgcaggtagcccttcagagcaagagtcactggcaagacccagcccatgtaggttctatgcctgccctgcctgaagaccagggctgtctctgccaggacagtcacagaggggttgggtggggccgtctctggacaggcagggcaggcacaggggcccacatccaaacaaggtgccctagaagagcaatgtggaaggaaaggccaggtatgtgactctgctgccccccacccccaccccctaacactatctcttctatcctgggcacctggccagaaaagtaccctgagggcactccggggaaggagcctgctccagtgacagcccaagatagaatcagtcccagagcactcctgcccctagcctgggaccatacagaactggcccagtgaggaggtccccagcctcctgggggattctttcctatgctggtggcagagcaattgactctgatggatgcaatgagcgctgggctctcagggcagggttgggacagcctcccctctgggacctttccctgagcctcagtcgaatgatgcgggcccaatcccatctccacctcttaccaaccatatggcctggactagattcttaacctccagaccttcactgtccacatgtacagggcagagatgggacataacagcacctgccacacacagtgactgtgcagaatgagaggagagagggaaggcaggtcagggcctggtccctttgtaggtggagggtgctcactgaggagcagccaggtgcatgggttgcccacttgtgctcaggaaacctcacccacctcagcccttattaggcacctaatgtggattctaagacagacactgaaacaaagctgcccctggggaagacgacatgtatccaaatggggagacagactagatggctgatcaagaaggagacagatgccatctggggagggacaggcataagccactttctggtgcttggagttagtgaggaagggctgagtgaaaatgccactctcctgtgcctaccaatattgggtcctgggtcatcatgtgctgggtgccctcagtgaaccaccatgtgatgcagagaccagagagtgaaggcccgggccggcgcagggtggtgcaactttgaatcgaggtggccaaggtttgctgtgggaggcccagggagctcccgtctgtgtccccttccaaatctcatcttgaattcccacgtgttgtgggagggacccagtgggaggtaactgaatcatgggggcaggtctttctgtgctgttctcgtgacagtaagtctcacgagatctgatggttattataagggggagcttttcctgcacaagctctttttgcctgctgccatccatgtaagatgtgacttgcttctcgtcttccaccatgattgtgaggcttccccagccaccaaccatgtggaactgtaagtttaattaaacctctttcttttgt

SEQ ID NO: 19408 - protein, 133 aa, Homo sapiens; identical to SEQ ID NO: 19406

SEQ ID NO: 19409 - DNA, 4047 bp, Homo sapiens
ctgctccagatgttgaagaaaataatgtgcaggagttgaactgtttggaaggagggtgagccccatagaaggagccaccctcgccccctgctgagtcccggctcgctcggcccgcgcgtacctgcgttgtccaccaggaggcgctcccgcacccgccccgcaggcgtcttccgccgccggccggtgcgtgggcacgcgcagaaaccgctaggtggcgacggtttcccttcccacgcgcggacgccggcgtgggccgacgcggccggagcgcccgcgcgtgcgcagagccgaggccaggctgccctcgaagcggggcggggcgaagcggggcggggccgagcagggcggggcgggggcttgaggtgattcccaagccgcggggcggctccggtggtgcggggaaaccgaaagtgggcggcggccgcggcggggcccctggcggagacggcggcaggagctgggcccagagacgcggggacgggccgtgggcccccggaacgaggcaaagatgctggaaggagatctggtttcaaagatgctacgagctgttctgcagtctcataagaatggagtagcattaccccggctccaaggagagtacagatccttgactggagactggatccccttcaaacagctaggtttccctacactagaagcctatctgagaagtgtgccagcagtggtcaggatagagactagtagatctggagagattacctgctatgccatggcctgcacagaaactgcaagaattgctcagcttgtggctcgtcaaaggagttctaaaaggaaaaccgggcgtcaagttaattgtcagatgagagtgaagaaaaccatgccattttttctagaaggaaaaccaaaagcaaccctcagacaaccaggatttgcttcaaatttttctgttggcaaaaaacctaatccagcaccgttaagagacaaaggaaactctgttggagttaagcctgatgctgaaatgtctccttatatgctacacacaactcttggaaatgaagcattcaaagacattccagtgcaaaggcatgtgaccatgtccaccaacaacaggtttagcccaaaggcgtcccttcaaccacctttgcagatgcatctctcaagaacctctactaaggaaatgagtgataatttaaatcagactgttgaaaaacccaatgtcaagcctcctgcctcttacacttataaaatggatgaggttcaaaatcgcataaaggaaatactaaacaagcataacaatggcatttggatatctaagcttccacatttttacaaagagttatataaagaagaccttaatcaaggaattttacaacagtttgaacactggcctcatatttgcacggtggagaaaccttgcagtggtggccaagatttacttctttatccagctaagagaaagcagcttttgagaagtgaactggatactgagaaagtacctctatccccactacctggtcccaaacaaacaccaccgttgaaagggtgtccaacagttatggcaggagactttaaagaaaaagtggcagacctgctggtgaaatacacaagtggcctttgggccagtgcacttccgaaagcatttgaggaaatgtacaaagtgaaattccctgaggatgccttaaaaaatcttgcctcactttctgatgtatgcagcatagactacatttctggaaatccccagaaggccattctctatgctaaacttccattgcccactgacaaaatccaaaaggatgcagggcaagcacatggtgataatgatatcaaggctatggttgaacaagagtatttgcaggtagaagaaagcattgctgaaagtgctaatacctttatggaggacataacagttcctcctttaatgattccaactgaagcatcaccatctgtattggtggttgaactgagcaacacaaatgaagtggttatcaggtatgtgggcaaagactattctgctgctcaggaattaatggaagatgagatgaaggaatattacagtaagaatcctaagatcacaccagtccaggctgtgaatgttgggcagttgctggccgtaaatgccgaggaggacgcctggttacgggcacaggtcatctcaacagaagagaacaaaataaaggtatgctatgttgactatggttttagtgaaaatgttgaaaaaagcaaagcatacaaattaaacccgaagttttgttcactctcatttcaagctacaaaatgtaagcttgcaggcttggaagtcctaagcgatgaccctgatctagtgaaggtggttgaatctttaacttgtggaaagatctttgcagtggaaatacttgacaaagctgacattccacttgttgttctgtacgatacctcaggagaagatgatatcaatatcaatgccacctgcttgaaggctatatgtgacaagtcactagaggttcacctgcaggttgacgccatgtacacaaatgtcaaagtaactaatatttgctctgatgggacactctactgccaggtgccttgtaagggtctgaacaagctcagtgaccttctacgtaagatagaggactacttccattgcaagcacatgacctctgagtgctttgtttcattacccttctgtgggaaaatctgcctcttccattgcaaaggaaaatggttacgagtagagatcacaaatgttcacagcagccgggctcttgatgttcagttcctggactctggcactgtgacatctgtaaaagtgtcagagctcagggaaattccacctcggtttctacaagaaatgattgcaataccacctcaggccattaagtgctgtttagcagatcttccacaatctattggcatgtggacaccagatgcagtgctgtggttaagagattctgttttgaattgctcggactgtagcattaaggttacaaaagtggatgaaaccagagggatcgcacatgtttatttatttacccctaagaacttccctgaccctcatcgcagtattaatcgccagattacaaatgcagacttgtggaagcatcagaaggatgtgtttttgagtgccatatccagtggagctgactctcccaacagcaaaaatggcaacatgcccatgtcgggcaacactggagagaatttcagaaagaacctcacagatgtcatcaaaaagtccatggtggaccatacgagcgctttctccacagaggaactgccacctcctgtccacttatcaaagccaggggaacacatggatgtgtatgtgcctgtggcctgtcacccaggctacttcgtcatccagccttggcaggagatacataagttggaagttctgatggaagagatgattctatattacagcgtgtctgaagagcgccacatagcagtggagaaagaccaagtgtatgctgcaaaagtggaaaataagtggcacagggtgcttttaaaaggaatcctgaccaatggactggtatctgtgtatgagctggattatggcaaacacgaattagtcaacataagaaaagtacagcccctagtggacatgttccgaaagctgcccttccaagcagtcacagctcaacttgcaggagtgaagtgcaaccagtggtctgaggaggcttctatggtgtttcgaaatcatgtggagaagaaacctctggtggcactggtgcagacagtcattgaaaatgctaacccttgggaccggaaagtagtggtctacttagtggacacatcgttgccagacaccgatacctggattcatgattttatgtcagagtatctgatagagctttcaaaagttaattaatgactgcctctgaaaccttgacaactaattcagattttttagcaataacaaaatgtagtaggcttaaaaaaaatcttaactctgctacatggctctgactgctgtgggggattgaaaagaatatgcttatgtttgatgaaagatatttaacaagttttgttttaacagagttgacttttcaaagaaaattgtacttgaattattactataatattagaataaaaatgtttatcaatataaaa

SEQ ID NO: 19410 - protein, 1098 aa, Homo sapiens
MLEGDLVSKMLRAVLQSHKNGVALPRLQGEYRSLTGDWIPFKQLGFPTLEAYLRSVPAVVRIETSRSGEITCYAMACTETARIAQLVARQRSSKRKTGRQVNCQMRVKKTMPFFLEGKPKATLRQPGFASNFSVGKKPNPAPLRDKGNSVGVKPDAEMSPYMLHTTLGNEAFKDIPVQRHVTMSTNNRFSPKASLQPPLQMHLSRTSTKEMSDNLNQTVEKPNVKPPASYTYKMDEVQNRIKEILNKHNNGIWISKLPHFYKELYKEDLNQGILQQFEHWPHICTVEKPCSGGQDLLLYPAKRKQLLRSELDTEKVPLSPLPGPKQTPPLKGCPTVMAGDFKEKVADLLVKYTSGLWASALPKAFEEMYKVKFPEDALKNLASLSDVCSIDYISGNPQKAILYAKLPLPTDKIQKDAGQAHGDNDIKAMVEQEYLQVEESIAESANTFMEDITVPPLMIPTEASPSVLVVELSNTNEVVIRYVGKDYSAAQELMEDEMKEYYSKNPKITPVQAVNVGQLLAVNAEEDAWLRAQVISTEENKIKVCYVDYGFSENVEKSKAYKLNPKFCSLSFQATKCKLAGLEVLSDDPDLVKVVESLTCGKIFAVEILDKADIPLVVLYDTSGEDDININATCLKAICDKSLEVHLQVDAMYTNVKVTNICSDGTLYCQVPCKGLNKLSDLLRKIEDYFHCKHMTSECFVSLPFCGKICLFHCKGKWLRVEITNVHSSRALDVQFLDSGTVTSVKVSELREIPPRFLQEMIAIPPQAIKCCLADLPQSIGMWTPDAVLWLRDSVLNCSDCSIKVTKVDETRGIAHVYLFTPKNFPDPHRSINRQITNADLWKHQKDVFLSAISSGADSPNSKNGNMPMSGNTGENFRKNLTDVIKKSMVDHTSAFSTEELPPPVHLSKPGEHMDVYVPVACHPGYFVIQPWQEIHKLEVLMEEMILYYSVSEERHIAVEKDQVYAAKVENKWHRVLLKGILTNGLVSVYELDYGKHELVNIRKVQPLVDMFRKLPFQAVTAQLAGVKCNQWSEEASMVFRNHVEKKPLVALVQTVIENANPWDRKVVVYLVDTSLPDTDTWIHDFMSEYLIELSKVN

SEQ ID NO: 19411 - DNA, 1754 bp, Homo sapiens
agctcccgcccgcccgcggccgcccgggagctcgtccagccccgcgctgcgctcgcccgcccgctgcccgccggagcaccgcggcctccgcccgcgtccatctgcccgccgcccgcgcctgttccgcagcccgcgtccgcgccggccccacagctctgcgtccgggtattactcagcacagaaattcaggagacacagacaagttcttccacgatgtcgtacagacgagaactagagaaataccgtgacctggatgaagatgaaatccttggagccctaacagaggaagagctgaggaccctggaaaatgagctggatgagctggaccctgataatgcactgctgcctgcaggcctgaggcagaaggatcagaccaccaaggcgcccacgggcccctttaaaagagaggagctcttggatcacttggaaaagcaagcaaaggagtttaaggaccgagaagatctggtcccctacacaggggaaaaacgaggaaaggtctgggttcctaagcagaagccactggatcctgtgctggaaagtgtgacgctggaaccggagctggaggaagccttggcaaatgcttcagatgcagaactctgtgacattgcagcgatcctgggcatgcacacgctcatgagtaaccagcagtactaccaggccctgagcagcagctccatcatgaacaaggaggggctcaacagcgtgattaaacccacacaatacaagcctgtgcccgacgaagaaccaaattcaacagacgtagaggaaacgctggaacggataaagaacaacgacccaaaacttgaagaagttaacctcaataatatccggaatatccccatccccaccctcaaggcatatgcagaagccctgaaagaaaactcatatgtgaagaagttcagcatcgtggggacacggagtaatgaccccgtggcgtatgcccttgctgagatgctcaaggagaacaaggtgttgaagacactgaatgtggaatccaacttcatttctggagctgggattctgcgcctggtagaagccctcccatacaacacttctctggtggaaatgaaaattgacaaccagagccagcccctgggcaacaaagtggaaatggagattgtgagcatgttggaaaaaaacgcaacacttctcaaattcggctaccactttacccagcaaggaccccggcttcgggcatccaacgcaatgatgaacaacaatgaccttgtgaggaagaggaggcttgcggacctgactgggcccatcattcccaagtgccggagtggtgtctagtgtgtggcggtggagtccatgcctttgaactggatgtgttctattgatgacctgtgctctgcaggggaaaccagaaggcaaaatgctggcagcatgaaacccttttgtggttcagttctttatgcactaaggttttaggttgactagtggttgtagttgaaaattttataaaataccgttaatgtgaagtttttctttagtcacagaagttgaatctggttattatttaaaaactagaagcccccaaaccagcagatcttactgaagatgatgttccagcagcagcgacttagccccaggagcccagtttcaatggccttgctgtgtggtgtttcaagtgcatttaaaatgtgtgacacagaaacggcacactcttccacatgcttttgaagtattataaaacactttattacaaatttgtcttagctattagcaaataaaactgattatcattctttatt

SEQ ID NO: 19412 - protein, 359 aa, Homo sapiens; identical to SEQ ID NO: 2393

SEQ ID NO: 19413 - DNA, 2848 bp, Homo sapiens
agctcccgcccgcccgcggccgcccgggagctcgtccagccccgcgctgcgctcgcccgcccgctgcccgccggagcaccgcggcctccgcccgcgtccatctgcccgccgcccgcgcctgttccgcagcccgcgtccgcgccggccccacagctctgcgtccgggtattactcagcacagaaattcaggagacacagacaagttcttccacgatgtcgtacagacgagaactagagaaataccgtgacctggatgaagatgaaatccttggagccctaacagaggaagagctgaggaccctggaaaatgagctggatgagctggaccctgataatgcactgctgcctgcaggcctgaggcagaaggatcagaccaccaaggcgcccacgggcccctttaaaagagaggagctcttggatcacttggaaaagcaagcaaaggagtttaaggaccgagaagatctggtcccctacacaggggaaaaacgaggaaaggtctgggttcctaagcagaagccactggatcctgtgctggaaagtgtgacgctggaaccggagctggaggaagccttggcaaatgcttcagatgcagaactctgtgacattgcagcgatcctgggcatgcacacgctcatgagtaaccagcagtactaccaggccctgagcagcagctccatcatgaacaaggaggggctcaacagcgtgattaaacccacacaatacaagcctgtgcccgacgaagaaccaaattcaacagacgtagaggaaacgctggaacggataaagaacaacgacccaaaacttgaagaagttaacctcaataatatccggaatatccccatccccaccctcaaggcatatgcagaagccctgaaagaaaactcatatgtgaagaagttcagcatcgtggggacacggagtaatgaccccgtggcgtatgcccttgctgagatgctcaaggagaacaaggtgttgaagacactgaatgtggaatccaacttcatttctggagctgggattctgcgcctggtagaagccctcccatacaacacttctctggtggaaatgaaaattgacaaccagagccagcccctgggcaacaaagtggaaatggagattgtgagcatgttggaaaaaaacgcaacacttctcaaattcggctaccactttacccagcaaggaccccggcttcgggcatccaacgcaatgatgaacaacaatgaccttgtgaggaagaggaggcttgcggacctgactgggcccatcattcccaagtgccggagtggtgtctagtgtgtggcggtggagtccatgcctttgaactggatgtgttctattgatgacctgtgctctgcaggggaaaccagaaggcaaaatgctggcagcatgaaacccttttgtggttcagttctttatgcactaaggttttaggttgactagtggttgtagttgaaaattttataaaataccgttaatgtgaagtttttctttagtcacagaagttgaatctggttattatttaaaaactagaagcccccaaaccagcagatcttactgaagatgatgttccagcagcagcgacttagccccaggagcccagtttcaatggccttgctgtgtggtgtttcaagtgcatttaaaatgtgtgacacagaaacggcacactcttccacatgcttttgaagtattataaaacactttattacaaatttgtcttagctattagcaaataaaactgattatcattctttattaaccctccttggaattttgaaaacctcgattaaagttgccaaattgattactggatccagaacacaattttcccctcagaacagatagacagactgaagccactgaactctgccaggagtcaacatgagattccttttgctggatatgcagaaatgataggaaaaaaaccaatggtgaaatttcaagtttcaaaaaccaacctttcattaccaatcccaggcaacaaacatgtccctgagtgttctttaagaacatttgggatttatgtacaatttaatactggagttagaactttttccttattgaatgccaaccttatgatggatgtgaaaatctacggccaaatacttttgaaaacacctttctatattgcacagtgggcaaatggcttatgtgaggtaagacactagagggataaatttccagatcaacatggctatggtatttagtaatggcccagcttagagacttcagctactgatctcatcacttattagacaaattgctgctgaccttacgcctgtatattaagcctccgcaggatgccggacaatggtgaagaaactccagatatcaaggaattgggaaatcctggccaaaccaccccaagatgattacactgaaatgtagtattagtactgctgccagatctctttttaacatcatgtgcgtctcttgggatccagcaaaagtgttaagccacaatgcccttgtgccttttaatataccacagtgccagttaaactaatatttttgtttgttgcttttgggagttattttcattagtgatttcagcaaatctcatgataaaggacaaggtcaagaactccagagcactgagcagagaggctggtgatgaaaaggtgaaggcctgcgcactgaactgtaaggcagtgggcagtacagggtaactggaggcggggccagggcctcagcgctatggaagagtgtccactgaggctgcacatggcccaggagtggcaccatgttgcagggacaaccatccccatttggcttctccttaaaacacaattgcagctgcattctgcatcgctgaaaactgcaatataatattaaatctgttggtctatgc

SEQ ID NO: 19414 - protein, 359 aa, Homo sapiens; identical to SEQ ID NO: 2393

SEQ ID NO: 19415 - DNA, 3342 bp, Homo sapiens
agctcccgcccgcccgcggccgcccgggagctcgtccagccccgcgctgcgctcgcccgcccgctgcccgccggagcaccgcggcctccgcccgcgtccatctgcccgccgcccgcgcctgttccgcagcccgcgtccgcgccggccccacagctctgcgtccgggtattactcagcacagaaattcaggagacacagacaagttcttccacgatgtcgtacagacgagaactagagaaataccgtgacctggatgaagatgaaatccttggagccctaacagaggaagagctgaggaccctggaaaatgagctggatgagctggaccctgataatgcactgctgcctgcaggcctgaggcagaaggatcagaccaccaaggcgcccacgggcccctttaaaagagaggagctcttggatcacttggaaaagcaagcaaaggagtttaaggaccgagaagatctggtcccctacacaggggaaaaacgaggaaaggtctgggttcctaagcagaagccactggatcctgtgctggaaagtgtgacgctggaaccggagctggaggaagccttggcaaatgcttcagatgcagaactctgtgacattgcagcgatcctgggcatgcacacgctcatgagtaaccagcagtactaccaggccctgagcagcagctccatcatgaacaaggaggggctcaacagcgtgattaaacccacacaatacaagcctgtgcccgacgaagaaccaaattcaacagacgtagaggaaacgctggaacggataaagaacaacgacccaaaacttgaagaagttaacctcaataatatccggaatatccccatccccaccctcaaggcatatgcagaagccctgaaagaaaactcatatgtgaagaagttcagcatcgtggggacacggagtaatgaccccgtggcgtatgcccttgctgagatgctcaaggagaacaaggtgttgaagacactgaatgtggaatccaacttcatttctggagctgggattctgcgcctggtagaagccctcccatacaacacttctctggtggaaatgaaaattgacaaccagagccagcccctgggcaacaaagtggaaatggagattgtgagcatgttggaaaaaaacgcaacacttctcaaattcggctaccactttacccagcaaggaccccggcttcgggcatccaacgcaatgatgaacaacaatgaccttgtgaggaagaggaggcttgcggacctgactgggcccatcattcccaagtgccggagtggtgtctagtgtgtggcggtggagtccatgcctttgaactggatgtgttctattgatgacctgtgctctgcaggggaaaccagaaggcaaaatgctggcagcatgaaacccttttgtggttcagttctttatgcactaaggttttaggttgactagtggttgtagttgaaaattttataaaataccgttaatgtgaagtttttctttagtcacagaagttgaatctggttattatttaaaaactagaagcccccaaaccagcagatcttactgaagatgatgttccagcagcagcgacttagccccaggagcccagtttcaatggccttgctgtgtggtgtttcaagtgcatttaaaatgtgtgacacagaaacggcacactcttccacatgcttttgaagtattataaaacactttattacaaatttgtcttagctattagcaaataaaactgattatcattctttattaaccctccttggaattttgaaaacctcgattaaagttgccaaattgattactggatccagaacacaattttcccctcagaacagatagacagactgaagccactgaactctgccaggagtcaacatgagattccttttgctggatatgcagaaatgataggaaaaaaaccaatggtgaaatttcaagtttcaaaaaccaacctttcattaccaatcccaggcaacaaacatgtccctgagtgttctttaagaacatttgggatttatgtacaatttaatactggagttagaactttttccttattgaatgccaaccttatgatggatgtgaaaatctacggccaaatacttttgaaaacacctttctatattgcacagtgggcaaatggcttatgtgaggtaagacactagagggataaatttccagatcaacatggctatggtatttagtaatggcccagcttagagacttcagctactgatctcatcacttattagacaaattgctgctgaccttacgcctgtatattaagcctccgcaggatgccggacaatggtgaagaaactccagatatcaaggaattgggaaatcctggccaaaccaccccaagatgattacactgaaatgtagtattagtactgctgccagatctctttttaacatcatgtgcgtctcttgggatccagcaaaagtgttaagccacaatgcccttgtgccttttaatataccacagtgccagttaaactaatatttttgtttgttgcttttgggagttattttcattagtgatttcagcaaatctcatgataaaggacaaggtcaagaactccagagcactgagcagagaggctggtgatgaaaaggtgaaggcctgcgcactgaactgtaaggcagtgggcagtacagggtaactggaggcggggccagggcctcagcgctatggaagagtgtccactgaggctgcacatggcccaggagtggcaccatgttgcagggacaaccatccccatttggcttctccttaaaacacaattgcagctgcattctgcatcgctgaaaactgcaatataatattaaatctgttggtctatgcatggctgcgtatgtgtttcttggaacctgtgtgacagggacatgtgcctggcacactggccagaagactgggcagccaccatggcagtgctggatgacctcagtaagaatgtgtcatgtattccaggtgctgatctaaaaactgtggctcaaatgtcaccgagcttatatgaagctcccagagagaacatttaaaagctcagagagtaagtgctggggaaagcagagctatcagaggaaatctctcatagaaacgaaaccaaaccaacagaaaatgaagaaggccacatctttaaggccacctctgcctctatcagatgagctgctggtctagatcaggggctggcaaacttttctgtaaaaggccagacagtaaaaatttccgattttgcaggccacatagtgtctgttgcaactattcaactctgccatagatcatgtgtaaaggaatgggtgtggctgttcaataaactatacagttgacccttgaacaat

SEQ ID NO: 19416 - protein, 359 aa, Homo sapiens; identical to SEQ ID NO: 2393

SEQ ID NO: 19417 - DNA, 3483 bp, Homo sapiens
agctcccgcccgcccgcggccgcccgggagctcgtccagccccgcgctgcgctcgcccgcccgctgcccgccggagcaccgcggcctccgcccgcgtccatctgcccgccgcccgcgcctgttccgcagcccgcgtccgcgccggccccacagctctgcgtccgggtattactcagcacagaaattcaggagacacagacaagttcttccacgatgtcgtacagacgagaactagagaaataccgtgacctggatgaagatgaaatccttggagccctaacagaggaagagctgaggaccctggaaaatgagctggatgagctggaccctgataatgcactgctgcctgcaggcctgaggcagaaggatcagaccaccaaggcgcccacgggcccctttaaaagagaggagctcttggatcacttggaaaagcaagcaaaggagtttaaggaccgagaagatctggtcccctacacaggggaaaaacgaggaaaggtctgggttcctaagcagaagccactggatcctgtgctggaaagtgtgacgctggaaccggagctggaggaagccttggcaaatgcttcagatgcagaactctgtgacattgcagcgatcctgggcatgcacacgctcatgagtaaccagcagtactaccaggccctgagcagcagctccatcatgaacaaggaggggctcaacagcgtgattaaacccacacaatacaagcctgtgcccgacgaagaaccaaattcaacagacgtagaggaaacgctggaacggataaagaacaacgacccaaaacttgaagaagttaacctcaataatatccggaatatccccatccccaccctcaaggcatatgcagaagccctgaaagaaaactcatatgtgaagaagttcagcatcgtggggacacggagtaatgaccccgtggcgtatgcccttgctgagatgctcaaggagaacaaggtgttgaagacactgaatgtggaatccaacttcatttctggagctgggattctgcgcctggtagaagccctcccatacaacacttctctggtggaaatgaaaattgacaaccagagccagcccctgggcaacaaagtggaaatggagattgtgagcatgttggaaaaaaacgcaacacttctcaaattcggctaccactttacccagcaaggaccccggcttcgggcatccaacgcaatgatgaacaacaatgaccttgtgaggaagaggaggcttgcggacctgactgggcccatcattcccaagtgccggagtggtgtctagtgtgtggcggtggagtccatgcctttgaactggatgtgttctattgatgacctgtgctctgcaggggaaaccagaaggcaaaatgctggcagcatgaaacccttttgtggttcagttctttatgcactaaggttttaggttgactagtggttgtagttgaaaattttataaaataccgttaatgtgaagtttttctttagtcacagaagttgaatctggttattatttaaaaactagaagcccccaaaccagcagatcttactgaagatgatgttccagcagcagcgacttagccccaggagcccagtttcaatggccttgctgtgtggtgtttcaagtgcatttaaaatgtgtgacacagaaacggcacactcttccacatgcttttgaagtattataaaacactttattacaaatttgtcttagctattagcaaataaaactgattatcattctttattaaccctccttggaattttgaaaacctcgattaaagttgccaaattgattactggatccagaacacaattttcccctcagaacagatagacagactgaagccactgaactctgccaggagtcaacatgagattccttttgctggatatgcagaaatgataggaaaaaaaccaatggtgaaatttcaagtttcaaaaaccaacctttcattaccaatcccaggcaacaaacatgtccctgagtgttctttaagaacatttgggatttatgtacaatttaatactggagttagaactttttccttattgaatgccaaccttatgatggatgtgaaaatctacggccaaatacttttgaaaacacctttctatattgcacagtgggcaaatggcttatgtgaggtaagacactagagggataaatttccagatcaacatggctatggtatttagtaatggcccagcttagagacttcagctactgatctcatcacttattagacaaattgctgctgaccttacgcctgtatattaagcctccgcaggatgccggacaatggtgaagaaactccagatatcaaggaattgggaaatcctggccaaaccaccccaagatgattacactgaaatgtagtattagtactgctgccagatctctttttaacatcatgtgcgtctcttgggatccagcaaaagtgttaagccacaatgcccttgtgccttttaatataccacagtgccagttaaactaatatttttgtttgttgcttttgggagttattttcattagtgatttcagcaaatctcatgataaaggacaaggtcaagaactccagagcactgagcagagaggctggtgatgaaaaggtgaaggcctgcgcactgaactgtaaggcagtgggcagtacagggtaactggaggcggggccagggcctcagcgctatggaagagtgtccactgaggctgcacatggcccaggagtggcaccatgttgcagggacaaccatccccatttggcttctccttaaaacacaattgcagctgcattctgcatcgctgaaaactgcaatataatattaaatctgttggtctatgcatggctgcgtatgtgtttcttggaacctgtgtgacagggacatgtgcctggcacactggccagaagactgggcagccaccatggcagtgctggatgacctcagtaagaatgtgtcatgtattccaggtgctgatctaaaaactgtggctcaaatgtcaccgagcttatatgaagctcccagagagaacatttaaaagctcagagagtaagtgctggggaaagcagagctatcagaggaaatctctcatagaaacgaaaccaaaccaacagaaaatgaagaaggccacatctttaaggccacctctgcctctatcagatgagctgctggtctagatcaggggctggcaaacttttctgtaaaaggccagacagtaaaaatttccgattttgcaggccacatagtgtctgttgcaactattcaactctgccatagatcatgtgtaaaggaatgggtgtggctgttcaataaactatacagttgacccttgaacaatatgggtttgaactgcatggctgcacttatatatggatttttttcaaccatacaggttgaaaatacagtattggcagggggcgaaacctgcgtacatggagggctgatttatcacatacgtgggttctgtagggcccactgt

SEQ ID NO: 19418 - protein, 359 aa, Homo sapiens; identical to SEQ ID NO: 2393

SEQ ID NO: 19419 - DNA, 1027 bp, Homo sapiens
ccctattaaacactaactcccctttctctcctcccccagcccctggcaaccacattctcctttctgtctatgcgaattggactactccgggggccaccgatgactggagtcatgctgtgttgtctctttgtgactggaatcctgtctctttaacatccttggatctgtccctcctctcccttctcacggcactgcctcttatgatctcagtgagtacagtggtctccaaactagtcccctgcctcagttctccctccttcctatcctcactcaactcagcctccaaatgatcttggtgaaaatcagtcctcatgctactcccaagctgaaaactccaactgcttcccaagctccaactcctaagctccaactgcttcccaagctccaactgcttcccatggatggatagagagcatgtctttaaagcgcacctcaccacacaggctcccggcacccctggttgggataatgcccccctctgctcccacacctctgtaggaagctctaaagaagcagcgctgcccctgcctagcggaggagactgggactccccacatctctctgtgttcccagattgagccgggcaagatcacatctgacatctgcacatctcagcgcccagcccctgcctggctcagagtgaagtgtcttccaatccattgaaatttctagtcccggggtctcgaggacactagggccactgtgcaatggcagaaggagcattgccatagaagtcagggggcctggttacaagtcctgactttagttgaggacctgccatatgaccttgagcaaactgctgtacttctctggatctcagtttctacaacctaattcactgggcccagcctgcagcctgcaagcaccggatgagtggacgtggctgagcagccatgagaaagatgtggggctctccggtgactgtagacccagcataaatcaacagttcaaggtgctcatccccaaagccatggtgagaccttagctgctgtaataaaagtgtagtgccaaagtaagggcaatgaca

SEQ ID NO: 19420 - protein, 67 aa, Homo sapiens
MTLSKLLYFSGSQFLQPNSLGPACSLQAPDEWTWLSSHEKDVGLSGDCRPSINQQFKVLIPKAMVRP

SEQ ID NO: 19421 - DNA, 5786 bp, Homo sapiens
gccgcccctgagcagcctcgccttcgcctcccgcgtttcctgccgtccgccctcccccggccgagctccaggggctgccgcctagcagctcccggcgggagagcggttcagagcgcgcacgggggcgggcggaggcggcccggtgcggggcggccgcgctggagagaggcgcgcgcggagacgccggcccccctctccgcgtttgctcgcttgctccccgcctcccgcactccgctcgctcccaccccttcccggcgtgattgatccgtcacgggcgccgccgctgccgccgccgccgccgcggccgttctgagccgagccggaaccctagcccgagacggagccggggcccgggccggcgccattgcgcgggcgccgcgggaagaccttggcgcggggcggcgggccgggccaggccatgcgggccgagtgagccggcgcccgcagcccgcggcgcggcatggcttccccgcggagctccgggcagcccgggccgccgccgccgccgccaccgccgcccgcgcgcctgctactgctactgctgctgccgctgctgctgcctctggcgcccggggcctggggctgggcgcggggcgccccccggccgccgcccagcagcccgccgctctccatcatgggcctcatgccgctcaccaaggaggtggccaagggcagcatcgggcgcggtgtgctccccgccgtggaactggccatcgagcagatccgcaacgagtcactcctgcgcccctacttcctcgacctgcggctctatgacacggagtgcgacaacgcaaaagggttgaaagccttctacgatgcaataaaatacgggcctaaccacttgatggtgtttggaggcgtctgtccatccgtcacatccatcattgcagagtccctccaaggctggaatctggtgcagctttcttttgctgcaaccacgcctgttctagccgataagaaaaaatacccttatttctttcggaccgtcccatcagacaatgcggtgaatccagccattctgaagttgctcaagcactaccagtggaagcgcgtgggcacgctgacgcaagacgttcagaggttctctgaggtgcggaatgacctgactggagttctgtatggcgaggacattgagatttcagacaccgagagcttctccaacgatccctgtaccagtgtcaaaaagctgaaggggaatgatgtgcggatcatccttggccagtttgaccagaatatggcagcaaaagtgttctgttgtgcatacgaggagaacatgtatggtagtaaatatcagtggatcattccgggctggtacgagccttcttggtgggagcaggtgcacacggaagccaactcatcccgctgcctccggaagaatctgcttgctgccatggagggctacattggcgtggatttcgagcccctgagctccaagcagatcaagaccatctcaggaaagactccacagcagtatgagagagagtacaacaacaagcggtcaggcgtggggcccagcaagttccacgggtacgcctacgatggcatctgggtcatcgccaagacactgcagagggccatggagacactgcatgccagcagccggcaccagcggatccaggacttcaactacacggaccacacgctgggcaggatcatcctcaatgccatgaacgagaccaacttcttcggggtcacgggtcaagttgtattccggaatggggagagaatggggaccattaaatttactcaatttcaagacagcagggaggtgaaggtgggagagtacaacgctgtggccgacacactggagatcatcaatgacaccatcaggttccaaggatccgaaccaccaaaagacaagaccatcatcctggagcagctgcggaagatctccctacctctctacagcatcctctctgccctcaccatcctcgggatgatcatggccagtgcttttctcttcttcaacatcaagaaccggaatcagaagctcataaagatgtcgagtccatacatgaacaaccttatcatccttggagggatgctctcctatgcttccatatttctctttggccttgatggatcctttgtctctgaaaagacctttgaaacactttgcaccgtcaggacctggattctcaccgtgggctacacgaccgcttttggggccatgtttgcaaagacctggagagtccacgccatcttcaaaaatgtgaaaatgaagaagaagatcatcaaggaccagaaactgcttgtgatcgtggggggcatgctgctgatcgacctgtgtatcctgatctgctggcaggctgtggaccccctgcgaaggacagtggagaagtacagcatggagccggacccagcaggacgggatatctccatccgccctctcctggagcactgtgagaacacccatatgaccatctggcttggcatcgtctatgcctacaagggacttctcatgttgttcggttgtttcttagcttgggagacccgcaacgtcagcatccccgcactcaacgacagcaagtacatcgggatgagtgtctacaacgtggggatcatgtgcatcatcggggccgctgtctccttcctgacccgggaccagcccaatgtgcagttctgcatcgtggctctggtcatcatcttctgcagcaccatcaccctctgcctggtattcgtgccgaagctcatcaccctgagaacaaacccagatgcagcaacgcagaacaggcgattccagttcactcagaatcagaagaaagaagattctaaaacgtccacctcggtcaccagtgtgaaccaagccagcacatcccgcctggagggcctacagtcagaaaaccatcgcctgcgaatgaagatcacagagctggataaagacttggaagaggtcaccatgcagctgcaggacacaccagaaaagaccacctacattaaacagaaccactaccaagagctcaatgacatcctcaacctgggaaacttcactgagagcacagatggaggaaaggccattttaaaaaatcacctcgatcaaaatccccagctacagtggaacacaacagagccctctcgaacatgcaaagatcctatagaagatataaactctccagaacacatccagcgtcggctgtccctccagctccccatcctccaccacgcctacctcccatccatcggaggcgtggacgccagctgtgtcagcccctgcgtcagccccaccgccagcccccgccacagacatgtgccaccctccttccgagtcatggtctcgggcctgtaagggtgggaggcctgggcccggggcctcccccgtgacagaaccacactgggcagaggggtctgctgcagaaacactgtcggctctggctgcggagaagctgggcaccatggctggcctctcaggaccactcggatggcactcaggtggacaggacggggcagggggagacttggcacctgacctcgagccttatttgtgaagtccttatttcttcacaaagaagaggaacggaaatgggacgtcttccttaacatctgcaaacaaggaggcgctgggatatcaaacttgcaaaaaaaaaaaaaaaaaaaaaaaaacaaaaaaactagacaaggagagaggcactagaactccagctggaagtcacggagtggctcgagcagccttgggaagaggcaaggagcttctgaagaaactgcctctgcacacacatcactggctgtgacccctcaggctagcccttctccactctgggggaggaggtgggaagggccaccaggcccccagctgccaggccagctgaccccagccttcctggaacagggagtctgcaggagcgcagacaggcacagccctggagcaggcaggccgagggctgcggcactggagcaggctgacttacatgctccacatgggacctgtgtcacccaatgagatgtttgttactctggtaaatgccacacgttaacacaataacacccattcctgggaccgtggggatttagggcacgtcactgcagacacgctctgcagcattcaccgacagtctgtcatgcacccaccacgttggccatgtccttgtgttcctatcggatgctcccagtaaccagggggaccacccgagctaatcatggaatgtctgttcccagcaaacacgataaagaaagattgtgcactttaacctctctcatcagggcccaagggctggctgggattttttttttttttttcccactaactttgtttctgaccaaagtgaattggaggcactctgctaaaagacatccccgtagacataggggagagagttgctggctgagggcttcccttggcttccagaaggcagccttccatccagacaagccagtgagctctccccttgggatcactggggtgatcagtcagcagattgattctcattcataagatcattcctccctttaaattgagcccctaagagcactggcctgggagtcagacagacctgggttcaagtcctcagtcccctgcccactccctacgtgactttgatcaggtcactagtgtctctctgagcctcagtttcccctctgtaacttggggttgaactaaaacacctgtcctgcctacctcacaaggtcactctgaggattgaaacttgatcttgtccaggaaagctttgtaccaaacagtgaagccgccctgatccgtgaggtatgagtatgactctgaccttcagccctccctacagccgggggtgtggcccagagaagcttccagcacagccctctacccagaacatccgggctggagggaggctcccagtgacttttctgacattcctagacaggttcattctttgctcaagaaaggcctgaatgacaatgtccaggatgtctgcacaactgagcagctcgctcactccctaaagaaacctattggcagcttcaacaggcaggcaataatctcttcccagaaccactgcagtcaggaataaactgttttctccaccaggctttgacaaaagggcccacaggaatcttaccaatgccaacatttcaaagcaccctatttcacgtagcatagctttctgctccccttccccaaagagaggttatggaggtactgtagcttttagggaaaaaaaaatgttaacacatcacaggtcaagttgaagtcattctctgtttaggcactaaaaatcggtgttgtcactcactgtgtattaccagtatttacttgctttcttgatttcaccaaaaccaaatttaatttaaaggaccacattaatttttcaaagggaaagagacaattaattgtacataatgtatacacacacacaaaaaaaaatacctgtagaaatattattccagcatagcaggaaaacaaacaaaagtattggactgtcggaggtgagcctgtgcgtctgtaaccctttgtgactcctgagcgtgcgctgtcttctaggttaactcacgaagtacattctctgtcttactgatactgtaggttcacccatttttttttaatttcctcgcaaataacaagacccacagaagtgactctagctacttaatggttctgttcttttatatgcagcaaacacaccgtccatttctgaagaggcttcggcctgaaggcattttccaatgatgttagtgcacaaaacgctttaaattagactggaactgccagaatcaaatgtaaatgaggaatttctcgtacccctactgcatggtatcgatttttaataaattgttgcaaatttgtttttatgaataaaaggaaaaaacctgtcgtcttt

SEQ ID NO: 19422 - protein, 941 aa, Homo sapiens; identical to SEQ ID NO: 2395

SEQ ID NO: 19423 - DNA, 5620 bp, Homo sapiens
agcgcctccccctcccccggcgcgcacggctcgtccccgtccctggaggcggcccgagccgcccctgagcagcctcgccttcgcctcccgcgtttcctgccgtccgccctcccccggccgagctccaggggctgccgcctagcagctcccggcgggagagcggttcagagcgcgcacgggggcgggcggaggcggcccggtgcggggcggccgcgctggagagaggcgcgcgcggagacgccggcccccctctccgcgtttgctcgcttgctccccgcctcccgcactccgctcgctcccaccccttcccggcgtgattgatccgtcacgggcgccgccgctgccgccccgcccgcgcgcctgctactgctactgctgctgccgctgctgctgcctctggcgcccggggcctggggctgggcgcggggcgccccccggccgccgcccagcagcccgccgctctccatcatgggcctcatgccgctcaccaaggaggtggccaagggcagcatcgggcgcggtgtgctccccgccgtggaactggccatcgagcagatccgcaacgagtcactcctgcgcccctacttcctcgacctgcggctctatgacacggagtgcgacaacgcaaaagggttgaaagccttctacgatgcaataaaatacgggcctaaccacttgatggtgtttggaggcgtctgtccatccgtcacatccatcattgcagagtccctccaaggctggaatctggtgcagctttcttttgctgcaaccacgcctgttctagccgataagaaaaaatacccttatttctttcggaccgtcccatcagacaatgcggtgaatccagccattctgaagttgctcaagcactaccagtggaagcgcgtgggcacgctgacgcaagacgttcagaggttctctgaggtgcggaatgacctgactggagttctgtatggcgaggacattgagatttcagacaccgagagcttctccaacgatccctgtaccagtgtcaaaaagctgaaggggaatgatgtgcggatcatccttggccagtttgaccagaatatggcagcaaaagtgttctgttgtgcatacgaggagaacatgtatggtagtaaatatcagtggatcattccgggctggtacgagccttcttggtgggagcaggtgcacacggaagccaactcatcccgctgcctccggaagaatctgcttgctgccatggagggctacattggcgtggatttcgagcccctgagctccaagcagatcaagaccatctcaggaaagactccacagcagtatgagagagagtacaacaacaagcggtcaggcgtggggcccagcaagttccacgggtacgcctacgatggcatctgggtcatcgccaagacactgcagagggccatggagacactgcatgccagcagccggcaccagcggatccaggacttcaactacacggaccacacgctgggcaggatcatcctcaatgccatgaacgagaccaacttcttcggggtcacgggtcaagttgtattccggaatggggagagaatggggaccattaaatttactcaatttcaagacagcagggaggtgaaggtgggagagtacaacgctgtggccgacacactggagatcatcaatgacaccatcaggttccaaggatccgaaccaccaaaagacaagaccatcatcctggagcagctgcggaagatctccctacctctctacagcatcctctctgccctcaccatcctcgggatgatcatggccagtgcttttctcttcttcaacatcaagaaccggaatcagaagctcataaagatgtcgagtccatacatgaacaaccttatcatccttggagggatgctctcctatgcttccatatttctctttggccttgatggatcctttgtctctgaaaagacctttgaaacactttgcaccgtcaggacctggattctcaccgtgggctacacgaccgcttttggggccatgtttgcaaagacctggagagtccacgccatcttcaaaaatgtgaaaatgaagaagaagatcatcaaggaccagaaactgcttgtgatcgtggggggcatgctgctgatcgacctgtgtatcctgatctgctggcaggctgtggaccccctgcgaaggacagtggagaagtacagcatggagccggacccagcaggacgggatatctccatccgccctctcctggagcactgtgagaacacccatatgaccatctggcttggcatcgtctatgcctacaagggacttctcatgttgttcggttgtttcttagcttgggagacccgcaacgtcagcatccccgcactcaacgacagcaagtacatcgggatgagtgtctacaacgtggggatcatgtgcatcatcggggccgctgtctccttcctgacccgggaccagcccaatgtgcagttctgcatcgtggctctggtcatcatcttctgcagcaccatcaccctctgcctggtattcgtgccgaagctcatcaccctgagaacaaacccagatgcagcaacgcagaacaggcgattccagttcactcagaatcagaagaaagaagattctaaaacgtccacctcggtcaccagtgtgaaccaagccagcacatcccgcctggagggcctacagtcagaaaaccatcgcctgcgaatgaagatcacagagctggataaagacttggaagaggtcaccatgcagctgcaggacacaccagaaaagaccacctacattaaacagaaccactaccaagagctcaatgacatcctcaacctgggaaacttcactgagagcacagatggaggaaaggccattttaaaaaatcacctcgatcaaaatccccagctacagtggaacacaacagagccctctcgaacatgcaaagatcctatagaagatataaactctccagaacacatccagcgtcggctgtccctccagctccccatcctccaccacgcctacctcccatccatcggaggcgtggacgccagctgtgtcagcccctgcgtcagccccaccgccagcccccgccacagacatgtgccaccctccttccgagtcatggtctcgggcctgtaagggtgggaggcctgggcccggggcctcccccgtgacagaaccacactgggcagaggggtctgctgcagaaacactgtcggctctggctgcggagaagctgggcaccatggctggcctctcaggaccactcggatggcactcaggtggacaggacggggcagggggagacttggcacctgacctcgagccttatttgtgaagtccttatttcttcacaaagaagaggaacggaaatgggacgtcttccttaacatctgcaaacaaggaggcgctgggatatcaaacttgcaaaaaaaaaaaaaaaaaaaaaaaaacaaaaaaactagacaaggagagaggcactagaactccagctggaagtcacggagtggctcgagcagccttgggaagaggcaaggagcttctgaagaaactgcctctgcacacacatcactggctgtgacccctcaggctagcccttctccactctgggggaggaggtgggaagggccaccaggcccccagctgccaggccagctgaccccagccttcctggaacagggagtctgcaggagcgcagacaggcacagccctggagcaggcaggccgagggctgcggcactggagcaggctgacttacatgctccacatgggacctgtgtcacccaatgagatgtttgttactctggtaaatgccacacgttaacacaataacacccattcctgggaccgtggggatttagggcacgtcactgcagacacgctctgcagcattcaccgacagtctgtcatgcacccaccacgttggccatgtccttgtgttcctatcggatgctcccagtaaccagggggaccacccgagctaatcatggaatgtctgttcccagcaaacacgataaagaaagattgtgcactttaacctctctcatcagggcccaagggctggctgggattttttttttttttttcccactaactttgtttctgaccaaagtgaattggaggcactctgctaaaagacatccccgtagacataggggagagagttgctggctgagggcttcccttggcttccagaaggcagccttccatccagacaagccagtgagctctccccttgggatcactggggtgatcagtcagcagattgattctcattcataagatcattcctccctttaaattgagcccctaagagcactggcctgggagtcagacagacctgggttcaagtcctcagtcccctgcccactccctacgtgactttgatcaggtcactagtgtctctctgagcctcagtttcccctctgtaacttggggttgaactaaaacacctgtcctgcctacctcacaaggtcactctgaggattgaaacttgatcttgtccaggaaagctttgtaccaaacagtgaagccgccctgatccgtgaggtatgagtatgactctgaccttcagccctccctacagccgggggtgtggcccagagaagcttccagcacagccctctacccagaacatccgggctggagggaggctcccagtgacttttctgacattcctagacaggttcattctttgctcaagaaaggcctgaatgacaatgtccaggatgtctgcacaactgagcagctcgctcactccctaaagaaacctattggcagcttcaacaggcaggcaataatctcttcccagaaccactgcagtcaggaataaactgttttctccaccaggctttgacaaaagggcccacaggaatcttaccaatgccaacatttcaaagcaccctatttcacgtagcatagctttctgctccccttccccaaagagaggttatggaggtactgtagcttttagggaaaaaaaaatgttaacacatcacaggtcaagttgaagtcattctctgtttaggcactaaaaatcggtgttgtcactcactgtgtattaccagtatttacttgctttcttgatttcaccaaaaccaaatttaatttaaaggaccacattaatttttcaaagggaaagagacaattaattgtacataatgtatacacacacacaaaaaaaaatacctgtagaaatattattccagcatagcaggaaaacaaacaaaagtattggactgtcggaggtgagcctgtgcgtctgtaaccctttgtgactcctgagcgtgcgctgtcttctaggttaactcacgaagtacattctctgtcttactgatactgtaggttcacccatttttttttaatttcctcgcaaataacaagacccacagaagtgactctagctacttaatggttctgttcttttatatgcagcaaacacaccgtccatttctgaagaggcttcggcctgaaggcattttccaatgatgttagtgcacaaaacgctttaaattagactggaactgccagaatcaaatgtaaatgaggaatttctcgtacccctactgcatggtatcgatttttaataaattgttgcaaatttgtttttatgaataaaaggaaaaaacctgtcgtcttt

SEQ ID NO: 19424 - protein, 883 aa, Homo sapiens
MGLMPLTKEVAKGSIGRGVLPAVELAIEQIRNESLLRPYFLDLRLYDTECDNAKGLKAFYDAIKYGPNHLMVFGGVCPSVTSIIAESLQGWNLVQLSFAATTPVLADKKKYPYFFRTVPSDNAVNPAILKLLKHYQWKRVGTLTQDVQRFSEVRNDLTGVLYGEDIEISDTESFSNDPCTSVKKLKGNDVRIILGQFDQNMAAKVFCCAYEENMYGSKYQWIIPGWYEPSWWEQVHTEANSSRCLRKNLLAAMEGYIGVDFEPLSSKQIKTISGKTPQQYEREYNNKRSGVGPSKFHGYAYDGIWVIAKTLQRAMETLHASSRHQRIQDFNYTDHTLGRIILNAMNETNFFGVTGQVVFRNGERMGTIKFTQFQDSREVKVGEYNAVADTLEIINDTIRFQGSEPPKDKTIILEQLRKISLPLYSILSALTILGMIMASAFLFFNIKNRNQKLIKMSSPYMNNLIILGGMLSYASIFLFGLDGSFVSEKTFETLCTVRTWILTVGYTTAFGAMFAKTWRVHAIFKNVKMKKKIIKDQKLLVIVGGMLLIDLCILICWQAVDPLRRTVEKYSMEPDPAGRDISIRPLLEHCENTHMTIWLGIVYAYKGLLMLFGCFLAWETRNVSIPALNDSKYIGMSVYNVGIMCIIGAAVSFLTRDQPNVQFCIVALVIIFCSTITLCLVFVPKLITLRTNPDAATQNRRFQFTQNQKKEDSKTSTSVTSVNQASTSRLEGLQSENHRLRMKITELDKDLEEVTMQLQDTPEKTTYIKQNHYQELNDILNLGNFTESTDGGKAILKNHLDQNPQLQWNTTEPSRTCKDPIEDINSPEHIQRRLSLQLPILHHAYLPSIGGVDASCVSPCVSPTASPRHRHVPPSFRVMVSGL

SEQ ID NO: 19425 - DNA, 3365 bp, Homo sapiens
tgggtgtggtgaagctgctcctggaagccggtgcctttgtggaccatcaccacccttcaggcgagcaactggggttgggcggcagcagggatgagcccttggacatcacagccctgatggctgccatccagcacgggcacgaggccgtggtgcgtctactgatggagtggggcgcggaccccaaccacgcagcccggaccgtgggctggagcccgctgatgctggccgcactcactgggcggcttggagtggcccagcagctggtggagaagggcgccaaccctgaccacctcagcgtgctggagaagaccgccttcgaggttgcactggactgcaagcacagggaccttgtagactacctggacccgctgaccaccgtcaggcccaaaacagatgaggagaaaaggcgacctgatattttccatgcattgaaaatgggaaacttccagctggtcaaagagattgccgatgaagaccccagccacgtgaacttggtcaatggggacggggcgacgccactgatgctagcagctgttacggggcagctggctctggtgcagctgctggtggagaggcacgcggatgttgacaagcaggacagcgtgcatggctggacggccctcatgcaggcaacctaccatgggaataaggaaattgtgaaatatctgctaaaccaaggggccgatgtcactcttcgtgcaaaaaatggatacacggcctttgacctggtgatgctgctgaatgatcccgacacggaacttgttcgactgctggcatctgtctgcatgcaggtgaataaagacaaaggccggccgagccaccagcctcccctgccccactcgaaggtccgacagccctggagcatcccagtgctgcccgatgacaagggtggactgaagtcctggtggaaccgaatgtccaatcggttccgaaagctcaaactgatgcagacgctgccccgtgggctgtccagcaaccagcctttgcctttctctgacgagcctgagccagctctggactccacaatgagggctgccccccaggacaagacaagccgctctgcactccctgatgcggcccctgtgaccaaagacaatggtcctgggagcacaagaggagaaaaggaagacacgttattgacaaccatgcttcgaaacggagctcccctcaccagactcccgagtgacaagctgaaagcagtcatccccccattcctacccccttccagttttgagctgtggagctctgatcggtcccggacgcgtcacaacgggaaggcagaccccatgaagactgcgctgccccagagagccagcaggggccaccccgtgggcggcgggggcacagacactacacccgtcaggcctgttaaatttccaagcctccccagaagcccagcctcttctgccaattctggaaacttcaaccactcgcctcattcatcgggcggctccagtggggtaggtgtgagccggcacggtggggagctgcttaaccgctcaggtggcagcatagacaatgtcttgtcccaaatcgctgcccagaggaaaaaagcagccggattattggagcagaaacccagccatcggtcaagccctgtggggccagcaccggggtccagcccgtctgagcttccagcctcccctgcaggtggcagcgctcctgttggcaagaaattggagaccagcaaaaggcctccatctggaacttccactacctccaagagcacctctccaaccctcacgccctccccctcacccaaagggcacactgcagagtcctcagtgtcttcctcgtcatcccatcggcagtccaagagcagtgggggctccagcagtggcaccatcacagatgaggatgaactgactggaatccttaagaaattatcacttgagaaatatcagcccatttttgaggaacaagaggtggacatggaagcgttcctcacactgactgacggtgacttgaaggagctgggaattaagacagatgggtccaggcagcagattctggcagcgatttctgaactgaacgcaggcaagggacgcgagagacaaattttacaggaaaccattcacaactttcactcttcctttgagagcagtgccagcaacaccagggcccctggcaacagcccctccatggttgggtgggtgaggccagaagaaactgcctccggcaagaggtagcagccgctcaggtggctctgctggcatcggagcccacagaagtgaggagtggccgatggacctgccctccaaatgtgcctgactctgggtcttgctgtcactggatttcctggcatggcagacagaaagaaagatagtttgaccaagtcgtagaagctgatccagcgggtaaaaagggggcagggaactcgtcccttttattcttgcctcagagctgcctgaagacatgggccaggccggaggctggacaactttggataacgctgacctgtacttccaagtaaatgcctcctgaagagcccgggacccttcctgggagaattctgcagccagaatgaaggtgccatcagcaggaggcactgtgaagcaccatcctgtcgctgtccttgtccattcctagcaagttaatcgtgtcttgttaaccagcagttcctgttcaacgtgtaaagagacctgatgttttccctaataaagctgataacagattttgcaggactggcttgcagaaggaatctccctgggtgaggtgggtcctctggcctcagggggctctgctcctccttaacatgcagcctaagagtggatttagaccctgccttaatttcagccccccagctgagaatccagtcccaaaaataacagttgttgttgccaaagcttgggaatgatagaagggaaatccacacagaatcacgggtagtgagctcgagcacaaagcccagttcattgtcctcggctcccctccccggcactgcgcttccttcctaaggctgagaccacctctccctgcccttgagaactccctttgctccaggacccccgccaacttggggccctgcccagcagagtggagccatctcgcatcagcatagggacctcccaggttcccatttcctgctggagccctctccaaggctgagacacagggcatggccatccttgtgtcggagaccctgtctccacctctaggtttggccttcccctatagggccctcactagggccagtgtattcactgccaagagtctagaatgccattttagtttctgcccaagggagtgtctattttcctcaccatagacactttttattattttattgttatgtttgtgcagggacttaattctttgaaagattattgtttgtcggcctgtgtatattaaatgatgtaaagtta

SEQ ID NO: 19426 - protein, 690 aa, Homo sapiens
MAAIQHGHEAVVRLLMEWGADPNHAARTVGWSPLMLAALTGRLGVAQQLVEKGANPDHLSVLEKTAFEVALDCKHRDLVDYLDPLTTVRPKTDEEKRRPDIFHALKMGNFQLVKEIADEDPSHVNLVNGDGATPLMLAAVTGQLALVQLLVERHADVDKQDSVHGWTALMQATYHGNKEIVKYLLNQGADVTLRAKNGYTAFDLVMLLNDPDTELVRLLASVCMQVNKDKGRPSHQPPLPHSKVRQPWSIPVLPDDKGGLKSWWNRMSNRFRKLKLMQTLPRGLSSNQPLPFSDEPEPALDSTMRAAPQDKTSRSALPDAAPVTKDNGPGSTRGEKEDTLLTTMLRNGAPLTRLPSDKLKAVIPPFLPPSSFELWSSDRSRTRHNGKADPMKTALPQRASRGHPVGGGGTDTTPVRPVKFPSLPRSPASSANSGNFNHSPHSSGGSSGVGVSRHGGELLNRSGGSIDNVLSQIAAQRKKAAGLLEQKPSHRSSPVGPAPGSSPSELPASPAGGSAPVGKKLETSKRPPSGTSTTSKSTSPTLTPSPSPKGHTAESSVSSSSSHRQSKSSGGSSSGTITDEDELTGILKKLSLEKYQPIFEEQEVDMEAFLTLTDGDLKELGIKTDGSRQQILAAISELNAGKGRERQILQETIHNFHSSFESSASNTRAPGNSPSMVGWVRPEETASGKR

SEQ ID NO: 19427 - DNA, 791 bp, Homo sapiens
tgtgcgtgatcctccttcccgcagccaccagcgtgagctctctgaatcccgggaccccttcacgtggccacagccccagccctgcccccgtcacactgctgtgccttagtcatgttgttccctttgctcgggatgcccacttcacgtcgacggcattcattggtagtacttcttgctgcaacaaacttcaacacacagagacagattcccatgtaacagtccagtgggggtgcttctgcttggcagccatggttgggtgggtgaggccagaagaaactgcctccggcaagaggtagcagccgctcaggtggctctgctggcatcggagcccacagaagtgaggagtggccgatggacctgccctccaaatgtgcctgactctgggtcttgctgtcactggatttcctggcatggcagacagaaagaaagatagtttgaccaagtcgtagaagctgatccagcgggtaaaaagggggcagggaactcgtcccttttattcttgcctcagagctgcctgaagacatgggccaggccggaggctggacaactttggataacgctgacctgtacttccaagtaaatgcctcctgaagagcccgggacccttcctgggagaattctgcagccagaatgaaggtgccatcagcaggaggcactgtgaagcaccatcctgtcgctgtccttgtccattcctagcaagttaatcgtgtcttgttaaccagcagttcctgttcaacgtgtaaagagacctgatgttttccctaataaagctgataacagattttgcagga

SEQ ID NO: 19428 - protein, 34 aa, Homo sapiens
MLFPLLGMPTSRRRHSLVVLLAATNFNTQRQIPM

SEQ ID NO: 19429 - DNA, 3316 bp, Homo sapiens
tgggcatgtgagtgtggcacacctcctgttggatcacggggctgatgtcaatgcccagaaccggctgggggccagtgtgctcactgtggcttctcggggcggccacctgggtgtggtgaagctgctcctggaagccggtgcctttgtggaccatcaccacccttcaggcgagcaactggggttgggcggcagcagggatgagcccttggacatcacagccctgatggctgccatccagcacgggcacgaggccgtggtgcgtctactgatggagtggggcgcggaccccaaccacgcagcccggaccgtgggctggagcccgctgatgctggccgcactcactgggcggcttggagtggcccagcagctggtggagaagggcgccaaccctgaccacctcagcgtgctggagaagaccgccttcgaggttgcactggactgcaagcacagggaccttgtagactacctggacccgctgaccaccgtcaggcccaaaacagatgaggagaaaaggcgacctgatattttccatgcattgaaaatgggaaacttccagctggtcaaagagattgccgatgaagaccccagccacgtgaacttggtcaatggggacggggcgacgccactgatgctagcagctgttacggggcagctggctctggtgcagctgctggtggagaggcacgcggatgttgacaagcaggacagcgtgcatggctggacggccctcatgcaggcaacctaccatgggaataaggaaattgtgaaatatctgctaaaccaaggggccgatgtcactcttcgtgcaaaaaatggatacacggcctttgacctggtgatgctgctgaatgatcccgacacggaacttgttcgactgctggcatctgtctgcatgcaggtgaataaagacaaaggccggccgagccaccagcctcccctgccccactcgaaggtccgacagccctggagcatcccagtgctgcccgatgacaagggtggactgaagtcctggtggaaccgaatgtccaatcggttccgaaagctcaaactgatgcagacgctgccccgtgggctgtccagcaaccagcctttgcctttctctgacgagcctgagccagctctggactccacaatgagggctgccccccaggacaagacaagccgctctgcactccctgatgcggcccctgtgaccaaagacaatggtcctgggagcacaagaggagaaaaggaagacacgttattgacaaccatgcttcgaaacggagctcccctcaccagactcccgagtgacaagctgaaagcagtcatccccccattcctacccccttccagttttgagctgtggagctctgatcggtcccggacgcgtcacaacgggaaggcagaccccatgaagactgcgctgccccagagagccagcaggggccaccccgtgggcggcgggggcacagacactacacccgtcaggcctgttaaatttccaagcctccccagaagcccagcctcttctgccaattctggaaacttcaaccactcgcctcattcatcgggcggctccagtggggtaggtgtgagccggcacggtggggagctgcttaaccgctcaggtggcagcatagacaatgtcttgtcccaaatcgctgcccagaggaaaaaagcagccggattattggagcagaaacccagccatcggtcaagccctgtggggccagcaccggggtccagcccgtctgagcttccagcctcccctgcaggtggcagcgctcctgttggcaagaaattggagaccagcaaaaggcctccatctggaacttccactacctccaagagcacctctccaaccctcacgccctccccctcacccaaagggcacactgcagagtcctcagtgtcttcctcgtcatcccatcggcagtccaagagcagtgggggctccagcagtggcaccatcacagatgaggatgaactgactggaatccttaagaaattatcacttgagaaatatcagcccatttttgaggaacaagaggtggacatggaagcgttcctcacactgactgacggtgacttgaaggagctgggaattaagacagatgggtccaggcagcagattctggcagcgatttctgaactgaacgcaggcaagggacgcgagagacaaattttacaggaaaccattcacaactttcactcttcctttgagagcagtgccagcaacaccagggcccctggcaacagcccctgtgcgtgatcctccttcccgcagccaccagcgtgagctctctgaatcccgggaccccttcacgtggccacagccccagccctgcccccgtcacactgctgtgccttagtcatgttgttccctttgctcgggatgcccacttcacgtcgacggcattcattggtagtacttcttgctgcaacaaacttcaacacacagagacagattcccatgtaacagtccagtgggggtgcttctgcttggcaggttggttcacacagtgatgcagggactcagctcctttcatcctgtgctctgccctccccgggagcctcagagtttgcttctggctggcggcaagggaaagggacgatggagaaggcacggctgcttcttacctgccttgctcttaactgacacacatcactcctgctcacgtcctcttggccactggtagtcatgtggccccacctggatgcagaggaggccaggatgtgcagtctccacatagtggcttcccagcaacaacttttgacttagatgggggccatggttgggtgggtgaggccagaagaaactgcctccggcaagaggtagcagccgctcaggtggctctgctggcatcggagcccacagaagtgaggagtggccgatggacctgccctccaaatgtgcctgactctgggtcttgctgtcactggatttcctggcatggcagacagaaagaaagatagtttgaccaagtcgtagaagctgatccagcgggtaaaaagggggcagggaactcgtcccttttattcttgcctcagagctgcctgaagacatgggccaggccggaggctggacaactttggataacgctgacctgtacttccaagtaaatgcctcctgaagagcccgggacccttcctgggagaattctgcagccagaatgaaggtgccatcagcaggaggcactgtgaagcaccatcctgtcgctgtccttgtccattcctagcaagttaatcgtgtcttgttaaccagcagttcctgttcaacgtgtaaagagacctgatgttttccctaataaagctgataacagattttgcagga

SEQ ID NO: 19430 - protein, 676 aa, Homo sapiens
MAAIQHGHEAVVRLLMEWGADPNHAARTVGWSPLMLAALTGRLGVAQQLVEKGANPDHLSVLEKTAFEVALDCKHRDLVDYLDPLTTVRPKTDEEKRRPDIFHALKMGNFQLVKEIADEDPSHVNLVNGDGATPLMLAAVTGQLALVQLLVERHADVDKQDSVHGWTALMQATYHGNKEIVKYLLNQGADVTLRAKNGYTAFDLVMLLNDPDTELVRLLASVCMQVNKDKGRPSHQPPLPHSKVRQPWSIPVLPDDKGGLKSWWNRMSNRFRKLKLMQTLPRGLSSNQPLPFSDEPEPALDSTMRAAPQDKTSRSALPDAAPVTKDNGPGSTRGEKEDTLLTTMLRNGAPLTRLPSDKLKAVIPPFLPPSSFELWSSDRSRTRHNGKADPMKTALPQRASRGHPVGGGGTDTTPVRPVKFPSLPRSPASSANSGNFNHSPHSSGGSSGVGVSRHGGELLNRSGGSIDNVLSQIAAQRKKAAGLLEQKPSHRSSPVGPAPGSSPSELPASPAGGSAPVGKKLETSKRPPSGTSTTSKSTSPTLTPSPSPKGHTAESSVSSSSSHRQSKSSGGSSSGTITDEDELTGILKKLSLEKYQPIFEEQEVDMEAFLTLTDGDLKELGIKTDGSRQQILAAISELNAGKGRERQILQETIHNFHSSFESSASNTRAPGNSPCA

SEQ ID NO: 19431 - DNA, 599 bp, Homo sapiens
tgtgcgtgatcctccttcccgcagccaccagcgtgagctctctgaatcccgggaccccttcacgtggccacagccccagccctgcccccgtcacactgctgtgccttagtcatgttgttccctttgctcgggatgcccacttcacgtcgacggcattcattggtagtacttcttgctgcaacaaacttcaacacacagagacagattcccatgtaacagtccagtgggggtgcttctgcttggcaggttggttcacacagtgatgcagggactcagctcctttcatcctgtgctctgccctccccgggagcctcagaagctgcctgaagacatgggccaggccggaggctggacaactttggataacgctgacctgtacttccaagtaaatgcctcctgaagagcccgggacccttcctgggagaattctgcagccagaatgaaggtgccatcagcaggaggcactgtgaagcaccatcctgtcgctgtccttgtccattcctagcaagttaatcgtgtcttgttaaccagcagttcctgttcaacgtgtaaagagacctgatgttttccctaataaagctgataacagattttgcagg

SEQ ID NO: 19432 - protein, 45 aa, Homo sapiens [sequence omitted]

SEQ ID NO: 19433 - DNA, 678 bp, Homo sapiens
accccgcagcgagacctgaactctccttctgtcttcttctgtctccttcatccgttctctgaagacactaacaacacttctgtcttttggaaacttccagctggtcaaagagattgccgatgaagaccccagccacgtgaacttggtcaatggggacggggcgacgccactgatgctagcagctgttacggggcagctggctctggtgcagctgctggtggagaggcacgcggatgttgacaagcaggacagcgtgcatggctggacggccctcatgcaggcaacctaccatgggtcagtgccagccccacgccctcagcgacaaggccagacagatgctctggcctgagatggaggttcccaatgggctcttctggtcctgagatgctgcatacaaaccccaggactatgacgacattgaggcatggaaaaaaaaaaaaaaagcggcacaggctcattttagtcccacccttctgtgtccagatttcctgttcccccatcacagaatttcacaatggccctgaaaaaccatgcagcaggagcattttatgcagagagataaggttctctaggttggtttcagttgaacacagtgactgattcattggagttttcacattgagatatagtgacctccttaagtagctcctgtatgaagtaaacattggttattcatac

SEQ ID NO: 19434 - protein, 78 aa, Homo sapiens [sequence omitted]

SEQ ID NO: 19435 - DNA, 648 bp, Homo sapiens
tcttgggtaataaaccttccagaagagctgctggatttgtccattacgtaggtctccaattagattgcttttgagaattagatgtgccgatgaagaccccagccacgtgaacttggtcaatggggacggggcgacgccactgatgctagcagctgttacggggcagctggctctggtgcagctgctggtggagaggcacgcggatgttgacaagcaggacagcgtgcatggctggacggccctcatgcaggcaacctaccatgggtcagtgccagccccacgccctcagcgacaaggccagacagatgctctggcctgagatggaggttcccaatgggctcttctggtcctgagatgctgcatacaaaccccaggactatgacgacattgaggcatggaaaaaaaaaaaaaaagcggcacaggctcattttagtcccacccttctgtgtccagatttcctgttcccccatcacagaatttcacaatggccctgaaaaaccatgcagcaggagcattttatgcagagagataaggttctctaggttggtttcagttgaacacagtgactgattcattggagttttcacattgagatatagtgacctccttaagtagctcctgtatgaagtaaacattggttattcatac

SEQ ID NO: 19436 - protein, 78 aa, Homo sapiens [sequence omitted]

SEQ ID NO: 19437 - DNA, 888 bp, Homo sapiens
ggcgggcaacaccgcactgcagttcgccgcggccgggggccacgaaccgctggtgcgcttcctgctgcgccgcggtgcctcggtcaacagccgcaaccactacggctggagcgcgctcatgcaggcggccaggtgaggcggcggggcccgggggcccgggaccagagtggtgcccggcgctggcccgagacgcggtccccggcggccggatgccccgggaggtgaagagttaaggactccttagagttggaatgatgaggagaaaaggcgacctgatattttccatgcattgaaaatgggaaacttccagctggtcaaagagattgccgatgaagaccccagccacgtgaacttggtcaatggggacggggcgacgccactgatgctagcagctgttacggggcagctggctctggtgcagctgctggtggagaggcacgcggatgttgacaagcaggacagcgtgcatggctggacggccctcatgcaggcaacctaccatgggtcagtgccagccccacgccctcagcgacaaggccagacagatgctctggcctgagatggaggttcccaatgggctcttctggtcctgagatgctgcatacaaaccccaggactatgacgacattgaggcatggaaaaaaaaaaaaaaagcggcacaggctcattttagtcccacccttctgtgtccagatttcctgttcccccatcacagaatttcacaatggccctgaaaaaccatgcagcaggagcattttatgcagagagataaggttctctaggttggtttcagttgaacacagtgactgattcattggagttttcacattgagatatagtgacctccttaagtagctcctgtatgaagtaaacattggttattcatac

SEQ ID NO: 19438 - protein, 87 aa, Homo sapiens [sequence omitted]

SEQ ID NO: 19439 - DNA, 910 bp, Homo sapiens
gccgacgcggccggcggggcggacgggagcgggccgcgcgtggcggcggcgatgggcgagggcgggctgcccccggccttccagctgctgctgcgcgcgtgtgaccagggcgacacggagacggcgcggcggctgctggagccgggggcggcggagccagccgagcgcggcgcggagccggaggcgggcgcggagccggcgggggccgaggtggccgggcccggggccgcagcggcgggggcagtcggggctccggtgcccgtggattgctcggacgaggcgggcaacaccgcactgcagttcgccgcggccgggggccacgaaccgctggtgcgcttcctgctgcgccgcggtgcctcggtcaacagccgcaaccactacggctggagcgcgctcatgcaggcggccagatttgggcatgtgagtgtggcacacctcctgttggatcacggggctgatgtcaatgcccagaaccggctgggggccagtgtgctcactgtggcttctcggggcggccacctgggtgtggtgaagctgctcctggaagccggtgcctttgtggaccatcaccacccttcaggcgagcaactggggttgggcggcagcagggatgagcccttggacatcacagccctgatggctgccatccagcacgggcacgaggccgtggtgcgtctactgatggagtggggcgcggaccccaaccacgcagcccggaccgtgggctggagcccgctgatgctggccgcactcactgggcggcttggagtggcccagcagctggtggagaagggcgccaaccctgaccacctcagcgtgctggagaagaccgccttcgaggttgcactggactgcaagcacagggaccttgtagactacctggacccgctgaccaccgtcaggcccaaaa

SEQ ID NO: 19440 - protein, 285 aa, Homo sapiens
MGEGGLPPAFQLLLRACDQGDTETARRLLEPGAAEPAERGAEPEAGAEPAGAEVAGPGAAAAGAVGAPVPVDCSDEAGNTALQFAAAGGHEPLVRFLLRRGASVNSRNHYGWSALMQAARFGHVSVAHLLLDHGADVNAQNRLGASVLTVASRGGHLGVVKLLLEAGAFVDHHHPSGEQLGLGGSRDEPLDITALMAAIQHGHEAVVRLLMEWGADPNHAARTVGWSPLMLAALTGRLGVAQQLVEKGANPDHLSVLEKTAFEVALDCKHRDLVDYLDPLTTVRP

SEQ ID NO: 19441 - DNA, 2042 bp, Homo sapiens
atgtgggggcgcacggcgcggcggcgctgcccgcgggaactgcggcgcggccgggaggcgctgttggtgctcctggcgctactggcgttggccgggctgggctcggtgctgcgggcgcagcgtggggccggggccggggctgccgagccgggacccccgcgcaccccgcgccccgggcggcgcgagccggtcatgccgcggccgccggtgccggcgaacgcgctgggcgcgcggggcgaggcggtgcggctgcagctgcagggcgaggagctgcggctgcaggaggagagcgtgcggctgcaccagattaacatctacctcagcgaccgcatctcactgcaccgccgcctgcccgagcgctggaacccgctgtgcaaagagaagaaatatgattatgataatttgcccaggacatctgttatcatagcattttataatgaagcctggtcaactctccttcggacagtttacagtgtccttgagacatccccggatatcctgctagaagaagtgatccttgtagatgactacagtgatagagagcacctgaaggagcgcttggccaatgagctttcgggactgcccaaggtgcgcctgatccgcgccaacaagagagagggcctggtgcgagcccggctgctgggggcgtctgcggcgaggggcgatgttctgaccttcctggactgtcactgtgagtgccacgaagggtggctggagccgctgctgcagaggatccatgaagaggagtcggcagtggtgtgcccggtgattgatgtgatcgactggaacaccttcgaatacctggggaactccggggagccccagatcggcggtttcgactggaggctggtgttcacgtggcacacagttcctgagagggagaggatacggatgcaatcccccgtcgatgtcatcaggtctccaacaatggctggtgggctgtttgctgtgagtaagaaatattttgaatatctggggtcttatgatacaggaatggaagtttggggaggagaaaacctcgaattttcctttaggatctggcagtgtggtggggttctggaaacacacccatgttcccatgttggccatgttttccccaagcaagctccctactcccgcaacaaggctctggccaacagtgttcgtgcagctgaagtatggatggatgaatttaaagagctctactaccatcgcaacccccgtgcccgcttggaaccttttggggatgtgacagagaggaagcagctccgggacaagctccagtgtaaagacttcaagtggttcttggagactgtgtatccagaactgcatgtgcctgaggacaggcctggcttcttcgggatgctccagaacaaaggactaacagactactgctttgactataaccctcccgatgaaaaccagattgtgggacaccaggtcattctgtacctctgtcatgggatgggccagaatcagtttttcgagtacacgtcccagaaagaaatacgctataacacccaccagcctgagggctgcattgctgtggaagcaggaatggatacccttatcatgcatctctgcgaagaaactgccccagagaatcagaagttcatcttgcaggaggatggatctttatttcacgaacagtccaagaaatgtgtccaggctgcgaggaaggagtcgagtgacagtttcgttccactcttacgagactgcaccaactcggatcatcagaaatggttcttcaaagagcgcatgttatgaagcctcgtgtatcaaggagcccatcgaaggagactgtggagccaggactctgcccaacaaagacttagctaagcagtgaccagaacccaccaaaaactaggctgcattgctttgaagaggcaatcattttgccatttgtgaaagttgtgttggatttagtaaaaatgtgaataagctttgtacttattttgagaactttttaaatgttccaaaataccctattttcaaagggtaatcgtaagatgttaacccttggtatttagaaaattaaaaccttataatatttttctatcaag

SEQ ID NO: 19442 - protein, 581 aa, Homo sapiens [sequence omitted]

SEQ ID NO: 19443 - DNA, 2735 bp, Homo sapiens
atgtgggggcgcacggcgcggcggcgctgcccgcgggaactgcggcgcggccgggaggcgctgttggtgctcctggcgctactggcgttggccgggctgggctcggtgctgcgggcgcagcgtggggccggggccggggctgccgagccgggacccccgcgcaccccgcgccccgggcggcgcgagccggtcatgccgcggccgccggtgccggcgaacgcgctgggcgcgcggggcgaggcggtgcggctgcagctgcagggcgaggagctgcggctgcaggaggagagcgtgcggctgcaccagattaacatctacctcagcgaccgcatctcactgcaccgccgcctgcccgagcgctggaacccgctgtgcaaagagaagaaatatgattatgataatttgcccaggacatctgttatcatagcattttataatgaagcctggtcaactctccttcggacagtttacagtgtccttgagacatccccggatatcctgctagaagaagtgatccttgtagatgactacagtgatagagagcacctgaaggagcgcttggccaatgagctttcgggactgcccaaggtgcgcctgatccgcgccaacaagagagagggcctggtgcgagcccggctgctgggggcgtctgcggcgaggggcgatgttctgaccttcctggactgtcactgtgagtgccacgaagggtggctggagccgctgctgcagaggatccatgaagaggagtcggcagtggtgtgcccggtgattgatgtgatcgactggaacaccttcgaatacctggggaactccggggagccccagatcggcggtttcgactggaggctggtgttcacgtggcacacagttcctgagagggagaggatacggatgcaatcccccgtcgatgtcatcaggtctccaacaatggctggtgggctgtttgctgtgagtaagaaatattttgaatatctggggtcttatgatacaggaatggaagtttggggaggagaaaacctcgaattttcctttaggatctggcagtgtggtggggttctggaaacacacccatgttcccatgttggccatgttttccccaagcaagctccctactcccgcaacaaggctctggccaacagtgttcgtgcagctgaagtatggatggatgaatttaaagagctctactaccatcgcaacccccgtgcccgcttggaaccttttggggatgtgacagagaggaagcagctccgggacaagctccagtgtaaagacttcaagtggttcttggagactgtgtatccagaactgcatgtgcctgaggacaggcctggcttcttcgggatgctccagaacaaaggactaacagactactgctttgactataaccctcccgatgaaaaccagattgtgggacaccaggtcattctgtacctctgtcatgggatgggccagaatcagtttttcgagtacacgtcccagaaagaaatacgctataacacccaccagcctgagggctgcattgctgtggaagcaggaatggatacccttatcatgcatctctgcgaagaaactgccccagagaatcagaagttcatcttgcaggaggatggatctttatttcacgaacagtccaagaaatgtgtccaggctgcgaggaaggagtcgagtgacagtttcgttccactcttacgagactgcaccaactcggatcatcagaaatggttcttcaaagagcgcatgttatgaagcctcgtgtatcaaggagcccatcgaaggagactgtggagccaggactctgcccaacaaagacttagctaagcagtgaccagaacccaccaaaaactaggctgcattgctttgaagaggcaatcattttgccatttgtgaaagttgtgttggatttagtaaaaatgtgaataagctttgtacttattttgagaactttttaaatgttccaaaataccctattttcaaagggtaatcgtaagatgttaacccttggtatttagaaaattaaaaccttataatatttttctatcaagatgtatattttacagtcgtgccttttactctcattagcaaaaaagataaagattttattttggtatttacaagaattcccaggtacgaagatatctgcatgggtggaaatcaggttcaagcaacgtactttgcattaactgataatacctcagctgcggggttaaagttttcccagtatagagagactgtcactaggaacattgtattgatttattcaggtcattgagatcttctagatgtattttaaaaagaatgctttttggttatgtgttgctaccacagttaacactccataatgttcatgtcagccaaagaggactaaccaaagctgaaatctcagagaacaatttgctttactaagctgagtcaacttgagagcgaacttctaacaatgccgcactgtagtgtggctggttctaccactatgactttaaaacatgtttatatcatttttaatttttatgatacggtagtgtcagggagaaatgtaatgttctatatgaaattcctttttcaagtttgttcattaataacagttattaatttaaatcagcgttagagtttgtgctgctgcaactgctgtgaaaatttctctgagtaattctgatttgtgaatgatcccagaccaaccctgagattttgtcaacctgattaagtcaatatgaatgattaaaaagatgtgagaacactga

SEQ ID NO: 19444 - protein, 581 aa, Homo sapiens [sequence omitted]

SEQ ID NO: 19445 - DNA, 1897 bp, Homo sapiens
ggacttgaccctgagcaggtagaagccactgaagggatcggagcaggaagtgacctgagcatgtgctgcgtgccatgtggtctccaacaatggctggtgggctgtttgctgtgagtaagaaatattttgaatatctggggtcttatgatacaggaatggaagtttggggaggagaaaacctcgaattttcctttaggatctggcagtgtggtggggttctggaaacacacccatgttcccatgttggccatgttttccccaagcaagctccctactcccgcaacaaggctctggccaacagtgttcgtgcagctgaagtatggatggatgaatttaaagagctctactaccatcgcaacccccgtgcccgcttggaaccttttggggatgtgacagagaggaagcagctccgggacaagctccagtgtaaagacttcaagtggttcttggagactgtgtatccagaactgcatgtgcctgaggacaggcctggcttcttcgggatgctccagaacaaaggactaacagactactgctttgactataaccctcccgatgaaaaccagattgtgggacaccaggtcattctgtacctctgtcatgggatgggccagaatcagtttttcgagtacacgtcccagaaagaaatacgctataacacccaccagcctgagggctgcattgctgtggaagcaggaatggatacccttatcatgcatctctgcgaagaaactgccccagagaatcagaagttcatcttgcaggaggatggatctttatttcacgaacagtccaagaaatgtgtccaggctgcgaggaaggagtcgagtgacagtttcgttccactcttacgagactgcaccaactcggatcatcagaaatggttcttcaaagagcgcatgttatgaagcctcgtgtatcaaggagcccatcgaaggagactgtggagccaggactctgcccaacaaagacttagctaagcagtgaccagaacccaccaaaaactaggctgcattgctttgaagaggcaatcattttgccatttgtgaaagttgtgttggatttagtaaaaatgtgaataagctttgtacttattttgagaactttttaaatgttccaaaataccctattttcaaagggtaatcgtaagatgttaacccttggtatttagaaaattaaaaccttataatatttttctatcaagatgtatattttacagtcgtgccttttactctcattagcaaaaaagataaagattttattttggtatttacaagaattcccaggtacgaagatatctgcatgggtggaaatcaggttcaagcaacgtactttgcattaactgataatacctcagctgcggggttaaagttttcccagtatagagagactgtcactaggaacattgtattgatttattcaggtcattgagatcttctagatgtattttaaaaagaatgctttttggttatgtgttgctaccacagttaacactccataatgttcatgtcagccaaagaggactaaccaaagctgaaatctcagagaacaatttgctttactaagctgagtcaacttgagagcgaacttctaacaatgccgcactgtagtgtggctggttctaccactatgactttaaaacatgtttatatcatttttaatttttatgatacggtagtgtcagggagaaatgtaatgttctatatgaaattcctttttcaagtttgttcattaataacagttattaatttaaatcagcgttagagtttgtgctgctgcaactgctgtgaaaatttctctgagtaattctgatttgtgaatgatcccagaccaaccctgagattttgtcaacctgattaagtcaatatgaatgattaaaaagatgtgagaacactga

SEQ ID NO: 19446 - protein, 277 aa, Homo sapiens
MWSPTMAGGLFAVSKKYFEYLGSYDTGMEVWGGENLEFSFRIWQCGGVLETHPCSHVGHVFPKQAPYSRNKALANSVRAAEVWMDEFKELYYHRNPRARLEPFGDVTERKQLRDKLQCKDFKWFLETVYPELHVPEDRPGFFGMLQNKGLTDYCFDYNPPDENQIVGHQVILYLCHGMGQNQFFEYTSQKEIRYNTHQPEGCIAVEAGMDTLIMHLCEETAPENQKFILQEDGSLFHEQSKKCVQAARKESSDSFVPLLRDCTNSDHQKWFFKERML

SEQ ID NO: 19447 - DNA, 460 bp, Homo sapiens
gacgatgttccctagtctaatctgctctttccttccttcattcattcaatcaatcattcacgcagctggccagcagacactggatgaccacccctgggccaggccttgtggcaaatgctacagtaatgaccagacacatcacacccgccttctagaagccctccctcacaaaccggatcaactgctatgataaagtgtccactaccattccttgagggcttacaatggcttctggttgggagaaagatgggaagaggaggacattcaagaagatcagagacgtctggggtgtgcagaagtatttttccttcttattttcctgtattcaataggtaacaccatggtgtgtggcttttctgggcagcctgcaaatgtcattgctagtgacaacatttttctgcaggaaaacatattccagcttttaatcatctttagaataaacccatttataagcagtata

SEQ ID NO: 19448 - protein, 49 aa, Homo sapiens
MIKCPLPFLEGLQWLLVGRKMGRGGHSRRSETSGVCRSIFPSYFPVFNR

SEQ ID NO: 19449 - DNA, 1219 bp, Homo sapiens
gtacaagcctggtgctgtgtccccgggacagtcctgagttgctgcgttacacggaagacacttacccctcaataaatatttctgaaatggatggatctttatttcacgaacagtccaagaaatgtgtccaggctgcgaggaaggagtcgagtgacagtttcgttccactcttacgagactgcaccaactcggatcatcagaaatggttcttcaaagagcgcatgttatgaagcctcgtgtatcaaggagcccatcgaaggagactgtggagccaggactctgcccaacaaagacttagctaagcagtgaccagaacccaccaaaaactaggctgcattgctttgaagaggcaatcattttgccatttgtgaaagttgtgttggatttagtaaaaatgtgaataagctttgtacttattttgagaactttttaaatgttccaaaataccctattttcaaagggtaatcgtaagatgttaacccttggtatttagaaaattaaaaccttataatatttttctatcaagatgtatattttacagtcgtgccttttactctcattagcaaaaaagataaagattttattttggtatttacaagaattcccaggtacgaagatatctgcatgggtggaaatcaggttcaagcaacgtactttgcattaactgataatacctcagctgcggggttaaagttttcccagtatagagagactgtcactaggaacattgtattgatttattcaggtcattgagatcttctagatgtattttaaaaagaatgctttttggttatgtgttgctaccacagttaacactccataatgttcatgtcagccaaagaggactaaccaaagctgaaatctcagagaacaatttgctttactaagctgagtcaacttgagagcgaacttctaacaatgccgcactgtagtgtggctggttctaccactatgactttaaaacatgtttatatcatttttaatttttatgatacggtagtgtcagggagaaatgtaatgttctatatgaaattcctttttcaagtttgttcattaataacagttattaatttaaatcagcgttagagtttgtgctgctgcaactgctgtgaaaatttctctgagtaattctgatttgtgaatgatcccagaccaaccctgagattttgtcaacctgattaagtcaatatgaatgattaaaaagatgtgagaacactga

SEQ ID NO: 19450 - protein, 47 aa, Homo sapiens
MDGSLFHEQSKKCVQAARKESSDSFVPLLRDCTNSDHQKWFFKERML

SEQ ID NO: 19451 - DNA, 2495 bp, Homo sapiens
ctccgccccctccgcgccagccttttgctctttcctttcattaaacaaacaggagatcctgaaacctggaccctgtgcaagctgcagcgccaggaggaggcagcggaggaagcagagcgcgggatgggcgcccagcggcatctgtgatcccgcgcacctccgccccacgggcgcgcgcacaaacacggacacacacatacacacactcgcgcacacactcgcacaaacacacactcgtacacgcccgcgccgctcgctcgccggcttgctctcccacgcaagcggaatgcagcagcgcctggagagcgtgtctcggaccgccgcctgaatgtacctcgctcccgggagccggacggcccagtagggcgcactggaggacgctccgctgcgggagcctggacagtttttgacggtgcagtcttgctatatggtgtgagaaatggctgtaggaaacaacactcaacgaagttattccatcatcccgtgttttatatttgttgagcttgtcatcatggctgggacagtgctgcttgcctactacttcgaatgcactgacacttttcaggtgcatatccaaggattcttctgtcaggacggagacttaatgaagccttacccagggacagaggaagaaagcttcatcacccctctggtgctctattgtgtgctggctgccaccccaactgctattatttttattggtgagatatccatgtatttcataaaatcaacaagagaatccctgattgctcaggagaaaacaattctgaccggagaatgctgttacctgaaccccttacttcgaaggatcataagattcacaggggtgtttgcatttggactttttgctactgacatttttgtaaacgccggacaagtggtcactgggcacttaacgccatacttcctgactgtgtgcaagccaaactacaccagtgcagactgccaagcgcaccaccagtttataaacaatgggaacatttgtactggggacctggaagtgatagaaaaggctcggagatcctttccctccaaacacgctgctctgagcatttactccgccttatatgccacgatgtatattacaagcacaatcaagacgaagagcagtcgactggccaagccggtgctgtgcctcggaactctctgcacagccttcctgacaggcctcaaccgggtctctgagtatcggaaccactgctcggacgtgattgctggtttcatcctgggcactgcagtggccctgtttctgggaatgtgtgtggttcataactttaaaggaacgcaaggatctccttccaaacccaagcctgaggatccccgtggagtacccctaatggctttcccaaggatagaaagccctctggaaaccttaagtgcacagaatcactctgcgtccatgaccgaagttacctgagacgactgatgtgtcacaagctgttttttaaaatcatcttccaattctatacttcaaaacacacagttgctcaatgtcaaactgtgatgacaaatattacgtttatctagttagaagctaatgttttgtacattttttgtatgaggaagtgatgtagcttgccctgattttttttttttttttttggtcagctttaatatatttatgccagaattttaaaaccaacaaaattttcttgttcaagcgtgcattgaagaaccacatttattcaatggttgacgttgttttgtgatatttgtacacaaattttcttttctcagttttataaacacagaatataacaattcactttaaacttttattaccacagttgctgcctcctccagaatttttgaattttaataaaaggcaaacttttgagctgcaggaaggacaatgttggttaataataaatctcaaagtcaattgtagaaaaaaaattgtcttcaaaaagaatgttgcactctgatctcttaacaaattgttacgttcaaagtttaaagtgatatattaacaaagtcacctagttatacaaacaattgtcagagaattctggatttggagggtattggggttatatgattctttcttagataatggcctctactaaataactcaagatctttctggaatgtcttctggcaggcaggtgccactgtcagcttttctccaaaaagcagccaacatcagcctcccctgtcaactcaacagttttgtatctcatattatatggactttatatgaaaatgaatattttacagtttgcacagtattattttacagaaaaggaatcagagaatctacaacatagggccccagaacaacagtttcactttgtggcttttaattattctagaattttaactgcatctcatttttctagcatggtgagaactaatatgtaactcctttgattgaaggagctcttttgtccgtacctatcagaatgttttcttgacacttccatgttggctcttctcagctttttttgtacatattttttttttctaaagagaagaaaaagttatcacaaaatgta

SEQ ID NO: 19452 - protein, 325 aa, Homo sapiens; identical to SEQ ID NO: 2401

SEQ ID NO: 19453 - DNA, 584 bp, Homo sapiens
cacataagacatgcctgcttccccttccgccatgattataaattttctgaggcctctccagccatgcagaactactttttcagataaaattatcctgttgtggtagccatggagatgcaacacttggagtgcccttcaagatagaaattcctgattagctgggaagaatgcagtttgctgactggctccatccttccgggtggacaatagaaatcttgaatgcttatggtatgggtgaccgtaaaagaacaaattcaatgtctaaggaggcttttacaccagaacaactccatcttgaaaaggagctgggtgaaatgaggctgagacctactgtgctgcattcccagacggatcaccaaggattcagaccgataccaatgatgcaataaagacatcatttttcctccaggaaaaaaagagaaatatgggtttagtcaccaaggaagaaggcagtaaatagctttgaacactcacatttacactctaatatatctgtgtaaaggatatgaaggatataaataatttagaaattgtgggggaagtaggtatctctaatattgaataaaaagaaaataaatgaccag

SEQ ID NO: 19454 - protein, 73 aa, Homo sapiens
MQFADWLHPSGWTIEILNAYGMGDRKRTNSMSKEAFTPEQLHLEKELGEMRLRPTVLHSQTDHQGFRPIPMMQ

SEQ ID NO: 19455 - DNA, 2171 bp, Homo sapiens
gatgtcacctttcaacatcaccagtttgaacttacaatacttaagtcctggcaagtcataagtggggaaaatgtctctcccaagattccaaagagtaaactttgggccatatgataattacattccagtcagtgaattaagcaaaaaatcatggaatcagcaacactttgccctgttatttcccaaaccacaacggccaggaaccaaaaggagatcaaaaccttctcaaatacgggacaacacggtttctataattgatgaagaacaattaagaggagatcgtagacaaccattatggatgtaccgttctttaatgagaatttctgagagaccatctgtttatttagctgccaggaggcagcctctcaaaccaactcgtactgtcgaggtggattctaaagcagcagaaattggtaagaaaggtgaagacaagacaacacagaaggacacaacagattcggaatcagaattaaaacaaggaaaaaaagattcaaagaaaggcaaggatatagagaaaggaaaagaagaaaagctagatgcaaagaaagatagcaaaaaaggtaaaaaggatgcagagaagggcaaagactcagcaacagaatctgaagatgaaaaaggaggtgcaaagaaagataacaaaaaagataaaaaggattcaaacaaaggcaaagactcggcaacagaatctgaaggtgaaaaaggaggtacagagaaagatagcaaaaaaggtaaaaaggattcaaagaagggcaaggattcagccatagaattacaagctgtaaaagcagatgaaaagaaggatgaggatggaaaaaaagatgcaaacaaaggtgatgaatcgaaggatgccaagaaagatgcaaaggagattaaaaaaggtaagaaagataagaagaagcccagtagtacagacagtgactcaaaggatgatgtcaagaaagagtctaagaaggacgccacgaaagatgccaagaaagttgccaagaaagatactgagaaagaatctgctgattcaaagaaggatgcaaagaaaaatgctaagaaggatgcaaagaaggatgcaaagaagaatgcaaagaaggatgaaaagaaggatgcaaagaagaagggcaagtaggccttggataagaatttgaaccgaaagaataattcaaaagcatatttgatgaaacaatagtggtagtctgcagctgaatttgtgagaaaacaagaggcctcaaagaattaaataatttttaaaaggtggtaaagaaggatacaaaggagaactcagcagagatttataaaaatatataagaaagatgttaagaaaaattaaggggggatccattgaaagacttgaagaatacatatacttatattcggggatatgaaggattcaatgaatgatctctagaaagatttaaagaagaatattcagataaggatgttgaagataatgacactaaatctatggacacacacacacacacacacacacacacacacacacacacacacacacacacacagtttaatgaaggcttaaagaatccaaggagacagatgttgtatctatagatttaaaataatctcaagctgcatccacagatacaaaaaaatataggagccatgaaatgaagttaaacaccttgtagaaagcctactttcaagtaaatatagcattcctttggcaaaaagaaaaaaaaagtaaaagaaaagaaaaaaaatgtattaccacccgatgagcctacatctttctttctgaagtttaaacaaccacagtcatgtttatggttgttggatgtgccacttccaatccaaaagaagcacacttgtctcgctctgttgccctggctggagttcagtgacatgatctcaggcttactacagcctccaccttcaggttcaagtgattctcctgcctcagcctctctggtagctgggattacagggaaggaaaatagctggcatttcttgctggagaaagttatcacaagtggaaaggttaccctagaaacaaaagatgactaccgtgaggatggattggacattacaccacactggaaaagtgaaacatctcattcagttggtgatcttcctgtcatgaaagttgcttgacagctctaattacgaattgaacacattaaacacctggtgaaattatcaattaaaaacatctagtcaccata

SEQ ID NO: 19456 - protein, 348 aa, Homo sapiens; identical to SEQ ID NO: 2405

SEQ ID NO: 19457 - DNA, 3693 bp, Homo sapiens
aggtgtcgtttatccggatgctgcatgattaagaccaccatactcttatcaagcatacaggtgttaatgtctattttaaagaggagagaactcaagaagttctgtagaaactgctttcttcatcatatctcaaaggatttgctgaggatttcagaggtgccacgagttgagagaagacttcggacatttcacttaatgctgaaaattcactctactgccactactcaggacttctgatgggcatgaaaatccaagcctgctttatgatattaacctctgaatttcataaaccgcttaaaactttagaatgtccagaaaacactggtagaatacggacacatgagacaaggccagaaaggaagtcaataaaatgtgattactaagcaaattaccaccagagaagcagaaggaaatccctcttcaatattttgagagacagtaaagaacattccctggagttaggacaaatgaagagcaagaagtttcatcttgctctgtcatccaggctggagtgcaggggcaccatctcggctcactgaaacctccacttcccgggttcaagcgattctcctgcctcagcctcctgagtaactggggttacagagtgaatagacaacctacagaatgggagaaaatacttgcaagctatgtatccaacaaaggactaatatcgagaatttacaaggaactcaaacaaaactcaacaagagtaaaacaaccccaataaaaaggaaagtgaacacatttggaaatattggctcagcattgcagctataccctttagacaggaaacacactttccagttctccttgacagagaggctgaagctgcttatgtgtctggaattggtgggttcttggtctcactgacttcaagaatgaagccacggaccctcgcgtgaagcaatacaggcattcatgtctggacaaaaggaataagtggactacatgcagaggcagagtgaggctggaaaatacatcctgccatgggtatacaacccaagctatctatgtagattttttttgtttttttgagacggagtctcgctctgttgccaggctggagtgcagtggcggggtctcggctcactgcaacctccacctcctgggttcaagcgattctcctgcctcagcctcccaagtagctgggattacaggcatgtgccaccatgcctggctaatttttgtattttcagtagagagggggtttcaccatggtagccaggctggtcttgcactcctgacctcgtgatccacccgcctcggcctcccaaagtgctgggattgcaggcatgagccaccacacctggcctatgtagatttttttgttgccttttgattttttttttttttgcttattctgattctaattgtacaaatcaataataaaaatgttaaaaacagacttaaaatattcatgactatgcaaatgattcaaatatagttatttaaagtttctttcttttttaaattgggacatggtcttgctcttcaacccaaggctgggtggcataggtgaaagagcaagaccaaggcatgaccaaggctcactgcagccttgacctcctgatctcgttatcctcccacttcagcctcccaagtagctgggtataggcatgcaccacagtccccagctaatattttaattttttgtgtgtggagacatggtcttgccctgttgcccaggctggtcttgaattcctgagttcaagtgatccttgcttctcaggctccctaagtgctaagattacgggtgtgggtccccagccaaaacaatcttcctagggaagccctcacattttcaagggttttacctttagtacctccataaattcgtatcaagcaacaaaatgtactgtcaaggaacaaaaaatataaagggaccttaaatgcatatttctaagaccaagaagtcagtctgaaatggctacatactatataatcctatatgactcctatatgaaagatatgacattctggaaaaggcagaacaatagagtaaaaagatcaatggttgcttgggtttggtatgcatgtgtgttagagggcagggtggctggtgagaggaatacataggtgaagcacaagtgatttttatggcactgcaactgttctgcatgataccataataataataaatgacatttttcatttgtcaaaacacatagaatgtacaagagaaagagtagaacttaatgtaaattatgaactgtagttactattgatatgtaaatattggtgttctaattgtatcaaatgcaccacaccagtgaaagacattagtaataggagaaatgtgtacgagtttgggaggttatatggcaatttctgtactatctgctcttgtttttattgtaattttaaaattgtgctaaaataaagtttattagtttaattttcaagagattaagaatgtatgtttaaatgtaataatatatatgcagagctttatgtctatccatatacttcaagccaaatctacttttggtgagttcgtctgtttataaaacacacagaaataggaagaaaaataattgacaaatatttactatgaaataactttataagcagtaaattgaaagcacatacatatattttaaaaaggcatttatatacttaagcaaattattttccaaatatagaatattagccagccaacaaataatgtttaagaaagtttgtaattttctgagacaatacggatgataaaatattaagtaaagaacaactttgttgtaatgtgatatataacatgacataaataaaaagaaaaaatctagattaatgtgtagtcaataagaattgccatgaaacattgtcaaactgatatttgaaatttattgttttaaagccccttataactaatattctgtttttccatataatcctattaatgtataaataaaatcttctatttaccaattggatattaaatcaaaataatgtaaattaacatctacaaatcataacttttcttaatgtttattctttgagaatacatagtagttgcacatatttaaggcatacatgtgatattttgatatgtgtgtatcacgtgtaatgatcaaatcagagtaattgggatatccatcacctgaaacatttatcatagctttaaagggccaaagccaggatttaactctcttagattccaaagtccacgttcttagaaatattaattaaaataatgacaatgtttgcctctgggttatgctattatgagaaatttaatatttttaaagcagaaattgaaatttttgtaataggaagatatttaataaatatggaaatgtataactgattttttctcctatgtcattattgttgaaagaaaatcttcatatcttacgtaaatatattctagatcatctgacagattttataatttctcattataaattaagatttttttttattatcttcggtggtgaaaaatacgctcgccaaactgacaggaaaatgtaatgtaatgctaattgcttaattgattattactaggagtccacaattttcagtgcttttctttctatttctgtgtattttataaagagacaaattcaccaaaaatcagtttggcttgaagtatatggacacacataaagctctgcacatgtattattacatttaaacatacattcttaatctgttggaaattaaactaataaactttatttgagcacaattttaaatatg

SEQ ID NO: 19458 - protein, 81 aa, Homo sapiens
MGENTCKLCIQQRTNIENLQGTQTKLNKSKTTPIKRKVNTFGNIGSALQLYPLDRKHTFQFSLTERLKLLMCLELVGSWSH

SEQ ID NO: 19459 - DNA, 833 bp, Homo sapiens
gccgtgtggctggaagacatggccgctcccgtcggtgttgagcacggagagcagtctcaggcctttagtgatgatggtgcagtcagcctcagtttccaaagccggaaaaggatcctctagtagccacggtgtggcagctgctctgaaccaggacctggacccggacccaaagtgccatgtctttaatgtgtgttagctcccagcgatgccagatgggatcagcacagccctgcctctgctgctaattgttcctctaaagtaatcgccatgcgttctttgggcttcacctttaaaggaatgaagcaactgagattattctggaaaaccttttggcagttagtgaaattagagtacaactaagaacattttcagacctccactgtggatgacctgggtataatctcacaaatcgatgggactgcaaggattgtaaactgaaatgaacatgattatactctgttggaagagcctaagaggaaactgatgccatgagtttcagagagtaatgcttaaccccagttacacaggatgccatcttgtgtttcctcttgtttagttacccactacagtgattttgtgatctgctaatggttgccacccacaaccattgctttagcacttttacttcaaatcaatgaaggattgataaaagttctcctggtgtctcctcagagtggcttccaggaacagatctttgcatagaatatcagtggtttccttttttgtttcaaatagtggtcagaaaatacccagtgttgactcaccaaggcaatcagcttcctttttccctttttttttacattttatatttttgctttactaacgctatttta

SEQ ID NO: 19460 - protein, 41 aa, Homo sapiens
MMVQSASVSKAGKGSSSSHGVAAALNQDLDPDPKCHVFNVC

SEQ ID NO: 19461 - DNA, 655 bp, Homo sapiens
gccgtgtggctggaagacatggccgctcccgtcggtgttgagcacggagagcagtctcaggcctttagtgatgatggtgcagtcagcctcagtttccaaagccggaaaaggatcctctagtagccacggtgtggcagctgctctgaaccaggacctggacccggacccaaagtgccatgtctttaatgtgtgttagctcccagcgatgccagatgggatcagcacagccctgcctctgctgctaattgttcctctaaagtaatcgccatgcgttctttgggcttcacctttaaaggaatgaagcaactgagattattctggaaaaccttttggcagttagtgaaattagagtacaactaagaacattttcagacctccactgtggatgacctgggtataatctcacaaatcgatgggactgcaaggattgtaaactgaaatgaacatgattatactctgttggaagagcctaagaggaaactgatgccatgagtttcagagagtaatgcttaaccccagttacacaggatgccatcttgtgtttcctcttgtttagttacccactacagtgattttgtgatctgctaatggttgccacccacaaccattgctttagcacttttacttcaaatcaatgaaggattgataaaagttc

SEQ ID NO: 19462 - protein, 41 aa, Homo sapiens; identical to SEQ ID NO: 19460

SEQ ID NO: 19463 - DNA, 662 bp, Homo sapiens
aataattatacctaatcctcaaatctcaggcaacactaaacctttgcttctgatgtgtctatgagtctaaacgggggttctgatgctctcacctgaattcgtttatgtgcatgagttagctgagggacaactgatttgcattatgctcagctgggattggcttcaatctgcaagtcgcatccagatccattcctcatgtctcccacggtcctgaaaccaacaagctctcaggagaagttgatggtgactgaaattctgaaaatatgcagtcagcacttttgtcttcatggaaagtgaacacatttggaaatattggctcagcattgcagctataccctttagacaggaaacacactttccagttctccttgacagagaggctgaaggtcaactgatggtccagaatattgctggagctccagccatcatttctgaatgccaagaaacagaaatggggaaaagcttgactgcaaaaggatcctcttatcagctaagccagcttactttccacagatgtcttggaaatctttcacaacacttttatttttgtctcagtgaccagctcttgccatgtggtcacacctggatgaaggacaaagaagtacagccttttggctaggcacatttctgctctgaataaaatttggactaaagaagagaaa

SEQ ID NO: 19464 - protein, 110 aa, Homo sapiens
MESEHIWKYWLSIAAIPFRQETHFPVLLDREAEGQLMVQNIAGAPAIISECQETEMGKSLTAKGSSYQLSQLTFHRCLGNLSQHFYFCLSDQLLPCGHTWMKDKEVQPFG

SEQ ID NO: 19465 - DNA, 389 bp, Homo sapiens
gaattcgtttatgtgcatgagttagctgagggacaactgatttgcattatgctcagctgggattggcttcaatctgcaagtcgcatccagatccattcctcatgtctcccacggtcctgaaaccaacaagctctcaggagaagttgatggtgactgaaattctgaaaatatgcagtcagcacttttgtcttcatggaaagtgaacacatttggaaatattggctcagcattgcagctataccctttagacaggaaacacactttccagttctccttgacagagaggctgaagatagagtgggaagaaaaatgttgatatttaaaactaaagtaaaaaagctacagaagcttctactatttcagataagtaaaataattcatgcaaggtg

SEQ ID NO: 19466 - protein, 64 aa, Homo sapiens
MESEHIWKYWLSIAAIPFRQETHFPVLLDREAEDRVGRKMLIFKTKVKKLQKLLLFQISKIIHA

SEQ ID NO: 19467 - DNA, 569 bp, Homo sapiens
ggcaaaagtgactttgtagagaggacttccattgatcaatagccactcagatgttctgtgtttgccatgagtatcggacttcagtcttctggaaagatggctgtggtgcctaaacacatctgtgcctggcctcacccgcgggacttcggacatttcacttaatgctgaaaattcactctactgccactactcaggacttctgatgggcatgaaaatccaagcctgctttatgatattaacctctgaatttcataaaccgcttaaaactttagaatgtccagaaaacactggtagaatacggacacatgagacaaggccagaaaggaagtcaataaaatgtgattactaagcaaattaccaccagagaagcagaaggaaatccctcttcaatattttgagagacagtaaagaacattccctggagttaggacaaatgaagagcaagaagtttcatcttgctctgtcatccaggctggagtgcaggggcaccatctcggctcactgaaacctccacttcccgggttcaagcgattctcctgcctcagcctcctgagtaactggggttacag

SEQ ID NO: 19468 - protein, 48 aa, Homo sapiens
MGMKIQACFMILTSEFHKPLKTLECPENTGRIRTHETRPERKSIKCDY

SEQ ID NO: 19469 - DNA, 711 bp, Homo sapiens
ctactgctgaaatttctttctcaggtatcattgacaattcataaacaaacaaaatggccttagactacagtagttaaaagaatgatttttgtttgtatctaactactttttgttagccttgcccaacaatcaaatggccttttaccaaggtcatggtccctagaaagaaggctacaaaggaaggctgtgtgtcaactaggtgtgttctaaacatcatttttccagttggaggaatgctgagtttggagatggctgataaatgtgtcatctggataacattctgagattgatataggaatgccttcttttgcttctttagctgccttgaccaatgtagtgatgctgacagaggctataaaaaatgtggctctccaatcttgggcactttatgtaaccttgctcctgggaggccgagcacatattcagcaggaaggaacttgctggctcagttaccatgattcatgccaacaaatcaaagaatgctgctaatgaatcacaaaaggtggagaatgctaaacagcaatgcttctgtcactctgttgtggctattaatcaagatgatgcattgctaagacagctgcctgggtatgacaggaagcaaattgctgtgtctgcctgtcagaagtttatttgctactttgagtatatggaacatgaatgtcaactgaatgtatttaaagaaagtgcaaattaaacatgaagatcttcaaa

SEQ ID NO: 19470 - protein, 79 aa, Homo sapiens
MIHANKSKNAANESQKVENAKQQCFCHSVVAINQDDALLRQLPGYDRKQIAVSACQKFICYFEYMEHECQLNVFKESAN

SEQ ID NO: 19471 - DNA, 1044 bp, Homo sapiens; identical to SEQ ID NO: 2408

SEQ ID NO: 19472 - protein, 347 aa, Homo sapiens; identical to SEQ ID NO: 2409

SEQ ID NO: 19473 - DNA, 963 bp, Homo sapiens; identical to SEQ ID NO: 2410

SEQ ID NO: 19474 - protein, 320 aa, Homo sapiens; identical to SEQ ID NO: 2411

SEQ ID NO: 19475 - DNA, 858 bp, Homo sapiens
atgtatgtggtcatccttctggggaatggtactctcattttaatcagcatcttggaccctcaccttcacacccctatgtacttctttctggggaacctctccttcttggacatctgctacaccaccacctctattccctccacgctagtgagcttcctttcagaaagaaagaccatttccctttctggctgtgcagtgcagatgttcctcagcttggccatggggacaacagagtgtgtgcttctgggcgtgatggcctttgaccgctatgtggctatctgcaaccctctgagatatcccatcatcatgagtaaggatgcctatgtacccatggcagctgggtcctggatcataggagctgtcaattctgcagtacaaacagtgtttgtggtacaattgcctttctgcaggaataacatcatcaatcatttcacctgtgaaattctagctgtcatgaaactggcctgtgctgacatctcaggcaatgagttcatcctgcttgtgaccacaacattgttcctattgacacctttgttattaattattgtctcttacacgttaatcattttgagcatcttcaaaattagctcttcggaggggagaagcaaaccttcctctacctgctcagctcgtctgactgtggtgataacattctgtgggaccatcttcctcatgtacatgaagcccaagtctcaagagacacttaattcagatgacttggatgccactgacaaacttatattcatattctacagggtgatgactcccatgatgaatcctttaatctacagtcttagaaacaaggatgtgaaggaggcagtaaaacacctactgagaagaaaaaattttaacaagtaa

SEQ ID NO: 19476 - protein, 285 aa, Homo sapiens
MYVVILLGNGTLILISILDPHLHTPMYFFLGNLSFLDICYTTTSIPSTLVSFLSERKTISLSGCAVQMFLSLAMGTTECVLLGVMAFDRYVAICNPLRYPIIMSKDAYVPMAAGSWIIGAVNSAVQTVFVVQLPFCRNNIINHFTCEILAVMKLACADISGNEFILLVTTTLFLLTPLLLIIVSYTLIILSIFKISSSEGRSKPSSTCSARLTVVITFCGTIFLMYMKPKSQETLNSDDLDATDKLIFIFYRVMTPMMNPLIYSLRNKDVKEAVKHLLRRKNFNK

SEQ ID NO: 19477 - DNA, 858 bp, Homo sapiens
atgtatgtggtcatccttctggggaatggtactctcattttaatcagcatcttggaccctcaccttcacacccctatgtacttctttctggggaacctctccttcttggacatctgctacaccaccacctctattccctccacgctagtgagcttcctttcagaaagaaagaccatttccctttctggctgtgcagtgcagatgttcctcggcttggccatggggacaacagagtgtgtgcttctgggcatgatggcctttgaccgctatgtggctatctgcaaccctctgagatatcccatcatcatgagtaaggatgcctatgtacccatggcagctgggtcctggatcataggagctgtcaattctgcagtacaatcagtgtttgtggtacaattgcctttctgcaggaataacatcatcaatcatttcacctgtgaaattctggctgtcatgaaactggcctgtgctgacatctcagacaatgagttcatcatgcttgtggccacaacattgttcatattgacacctttgttattaatcattgtctcttacacgttaatcattgtgagcatcttcaaaattagctcttccgaggggagaagcaaagcttcctctacctgttcagcccatctgactgtggtcataatattctatgggaccatcctcttcatgtacatgaagcccaagtctaaagagacacttaattcggatgacttggatgctaccgacaaaattatatccatgttctatggggtgatgactcccatgatgaatcctttaatctacagtcttagaaacaaggatgtgaaagaggcagtaaaacacctactgaacagaaggttctttagcaagtga

SEQ ID NO: 19478 - protein, 285 aa, Homo sapiens
MYVVILLGNGTLILISILDPHLHTPMYFFLGNLSFLDICYTTTSIPSTLVSFLSERKTISLSGCAVQMFLGLAMGTTECVLLGMMAFDRYVAICNPLRYPIIMSKDAYVPMAAGSWIIGAVNSAVQSVFVVQLPFCRNNIINHFTCEILAVMKLACADISDNEFIMLVATTLFILTPLLLIIVSYTLIIVSIFKISSSEGRSKASSTCSAHLTVVIIFYGTILFMYMKPKSKETLNSDDLDATDKIISMFYGVMTPMMNPLIYSLRNKDVKEAVKHLLNRRFFSK

SEQ ID NO: 19479 - DNA, 858 bp, Homo sapiens
atgtatgtggtcatccttctggggaatggtactctcattttaatcagcatcttggaccctcaccttcacacccctatgtacttctttctggggaacctctccttcttggacatctgctacaccaccacctctattccctccacactagtgagcttcctttcagaaagaaagaccatttccttttctggctgtgcagtgcagatgttccttggcttggccatggggacaacagagtgtgtgcttctgggcatgatggcctttgaccgctatgtggctatctgcaaccctctgagatatcccatcatcatgagcaagaatgcctatgtacccatggctgttgggtcctggtttgcagggattgtcaactctgcagtacaaactacatttgtagtacaattgcctttctgcaggaagaatgtcatcaatcatttctcatgtgaaattctagctgtcatgaagttggcctgtgctgacatctcaggcaatgagttcctcatgcttgtggccacaatattgttcacattgatgccactgctcttgatagttatctcttactcattaatcatttccagcatcctcaagattcactcctctgaggggagaagcaaagctttctctacctgctcagcccatctgactgtggtcataatattctatgggaccatcctcttcatgtatatgaagcccaagtctaaagagacacttaattcagatgacttggatgctaccgacaaaattatatccatgttctatggggtgatgactcccatgatgaatcctttaatctacagtcttagaaacaaggatgtgaaagaggcagtaaaacacctaccgaacagaaggttctttagcaagtga

SEQ ID NO: 19480 - protein, 285 aa, Homo sapiens
MYVVILLGNGTLILISILDPHLHTPMYFFLGNLSFLDICYTTTSIPSTLVSFLSERKTISFSGCAVQMFLGLAMGTTECVLLGMMAFDRYVAICNPLRYPIIMSKNAYVPMAVGSWFAGIVNSAVQTTFVVQLPFCRKNVINHFSCEILAVMKLACADISGNEFLMLVATILFTLMPLLLIVISYSLIISSILKIHSSEGRSKAFSTCSAHLTVVIIFYGTILFMYMKPKSKETLNSDDLDATDKIISMFYGVMTPMMNPLIYSLRNKDVKEAVKHLPNRRFFSK

SEQ ID NO: 19481 - DNA, 945 bp, Homo sapiens
atggagacaagaaattactctgccatgactgaattctttctggtggggctttcccaatatccagagctccagctttttctgttcctgctctgcctcatcatgtacatgataatcctcctgggaaatagcctcctcattatcatcaccatcttggattctcgcctccatactcccatgtatttctttcttggaaacctctcattcttggacatctgttacacatcctcatccattcctccaatgcttattatatttatgtctgagagaaaatccatctccttcattggctgtgctctgcagatggttgtgtcccttggcttgggctccactgagtgtgtcctcctggctgtgatggcctatgaccactatgtggccatctgcaacccactgaggtactccatcatcatgaacggagtgctgtatgtgcaaatggctgcatggtcctggatcataggctgtctgacctccctattgcaaacagttctgacaatgatgttgcctttctgtgggaataatgtcattgatcatattacctgtgaaattttggcccttctaaaacttgtttgttcagatatcaccatcaatgtgcttatcatgacagtgacaaatattgtttcactggtgattcttctactgttaattttcatctcctatgtgtttattctctcttccatcctgagaattaattgtgctgagggaagaaagaaagccttctctacctgttcagcgcactcgattgtggtcatcttattctacggttcagccctttttatgtacatgaaacccaagtcaaagaacactaatacatctgatgagattattgggctgtcttatggagtggtaagcccaatgttaaatcccatcatctatagcctcaggaataaagaggtcaaagaggctgtaaagaaagtcctgagcagacatctgcatttattgaaaatgtga

SEQ ID NO: 19482 - protein, 314 aa, Homo sapiens
METRNYSAMTEFFLVGLSQYPELQLFLFLLCLIMYMIILLGNSLLIIITILDSRLHTPMYFFLGNLSFLDICYTSSSIPPMLIIFMSERKSISFIGCALQMVVSLGLGSTECVLLAVMAYDHYVAICNPLRYSIIMNGVLYVQMAAWSWIIGCLTSLLQTVLTMMLPFCGNNVIDHITCEILALLKLVCSDITINVLIMTVTNIVSLVILLLLIFISYVFILSSILRINCAEGRKKAFSTCSAHSIVVILFYGSALFMYMKPKSKNTNTSDEIIGLSYGVVSPMLNPIIYSLRNKEVKEAVKKVLSRHLHLLKM

SEQ ID NO: 19483 - DNA, 1189 bp, Homo sapiens
ccaacgctcagcacagcagagaaagacaccaagctacgggacccgccgcgcctcccgcgccggggtggagctgaccccgccgagccccgccccagcctgcgtctgccaatgatccaggagccgctcctttccactcgggaaaccttcagaggagtctcagaaaggacacggctggctgcttttctcagcgccgaagccgcgccatgctcgtcctcagaagcgccctgactcgggcgctggcctcacggacgctggcgcctcagatgtgctcatcttttgctacgggacccagacaatacgatggaatattctatgaatttcgttcttattaccttaagccctcaaagatgaatgagttcctggaaaattttgagaaaaacgctcatcttcggacagctcactctgaattggttggatactggagtgtagaatttggaggcagaatgaatacagtgtttcatatttggaagtatgataattttgctcatcgaactgaagttcggaaagccttggccaaagataaggaatggcaagaacaattcctcattccaaatttggctctcattgataaacaagagagtgagattacttatctggtaccatggtgcaaattagaaaaacctccaaaagaaggagtctatgaactggccacttttcagatgaaacctggtgggccagctctgtggggtgatgcatttaaaagggcagttcatgctcatgtcaatctaggctacacaaaactagttggagtgttccacacagagtacggagcactcaacagagttcatgttctttggtggaatgagagtgcagatagtcgtgcagctgggagacataagtcccatgaggatcccagagttgtggcagctgttcgggaaagtgtcaactacctagtatctcagcagaatatgcttctgattcctacatcgttttcaccactgaaatagttttctactgaaatacaaaacatttcattaactgctataggatctgtctgctaatggtgcttaaattctcccaagaggttctcacttttatttgaaggaggtgttaagttaatttgctatgtttcttgcattatgaaggctacatctgtgctttgtaagtaccacttcaaaaaatagttctgtttactttctgcatggtatttcagtgtctgtcatacattaaaaatacttgtcactgtttt

SEQ ID NO: 19484 - protein, 247 aa, Homo sapiens; identical to SEQ ID NO: 2421

SEQ ID NO: 19485 - DNA, 1569 bp, Homo sapiens
ccaacgctcagcacagcagagaaagacaccaagctacgggacccgccgcgcctcccgcgccggggtggagctgaccccgccgagccccgccccagcctgcgtctgccaatgatccaggagccgctcctttccactcgggaaaccttcagaggagtctcagaaaggacacggctggctgcttttctcagcgccgaagccgcgccatgctcgtcctcagaagcgccctgactcgggcgctggcctcacggacgctggcgcctcagatgtgctcatcttttgctacgggacccagacaatacgatggaatattctatgaatttcgttcttattaccttaagccctcaaagatgaatgagttcctggaaaattttgagaaaaacgctcatcttcggacagctcactctgaattggttggatactggagtgtagaatttggaggcagaatgaatacagtgtttcatatttggaagtatgataattttgctcatcgaactgaagttcggaaagccttggccaaagataaggaatggcaagaacaattcctcattccaaatttggctctcattgataaacaagagagtgagattacttatctggtaccatggtgcaaattagaaaaacctccaaaagaaggagtctatgaactggccacttttcagatgaaacctggtgggccagctctgtggggtgatgcatttaaaagggcagttcatgctcatgtcaatctaggctacacaaaactagttggagtgttccacacagagtacggagcactcaacagagttcatgttctttggtggaatgagagtgcagatagtcgtgcagctgggagacataagtcccatgaggatcccagagttgtggcagctgttcgggaaagtgtcaactacctagtatctcagcagaatatgcttctgattcctacatcgttttcaccactgaaatagttttctactgaaatacaaaacatttcattaactgctataggatctgtctgctaatggtgcttaaattctcccaagaggttctcacttttatttgaaggaggtgttaagttaatttgctatgtttcttgcattatgaaggctacatctgtgctttgtaagtaccacttcaaaaaatagttctgtttactttctgcatggtatttcagtgtctgtcatacattaaaaatacttgtcactgttttaagatcttgactcttcatttgtttcagaatagctcttctactgtattctgacaactctttgctttatagcattttgttgtattcaaatgataatggtagcatttccatgcttgtgacagcatttttaagttattaatatattttatcaacctttccatcatgtctgttttcctggttttttttggttgttttttgaccagtaaaatttattttgtaataccaaataggatttaagaaaattaacgtatttctttactatggaaaaccacattgtcatttgtgacatcatctatattaaatatggttttcacattagttatttgtcacttacttggaaaatgatgctgttaggtcctggtattaaaaatctagaaaagact

SEQ ID NO: 19486 - protein, 247 aa, Homo sapiens; identical to SEQ ID NO: 2421

SEQ ID NO: 19487 - DNA, 1747 bp, Homo sapiens
ccaacgctcagcacagcagagaaagacaccaagctacgggacccgccgcgcctcccgcgccggggtggagctgaccccgccgagccccgccccagcctgcgtctgccaatgatccaggagccgctcctttccactcgggaaaccttcagaggagtctcagaaaggacacggctggctgcttttctcagcgccgaagccgcgccatgctcgtcctcagaagcgccctgactcgggcgctggcctcacggacgctggcgcctcagatgtgctcatcttttgctacgggacccagacaatacgatggaatattctatgaatttcgttcttattaccttaagccctcaaagatgaatgagttcctggaaaattttgagaaaaacgctcatcttcggacagctcactctgaattggttggatactggagtgtagaatttggaggcagaatgaatacagtgtttcatatttggaagtatgataattttgctcatcgaactgaagttcggaaagccttggccaaagataaggaatggcaagaacaattcctcattccaaatttggctctcattgataaacaagagagtgagattacttatctggtaccatggtgcaaattagaaaaacctccaaaagaaggagtctatgaactggccacttttcagatgaaacctggtgggccagctctgtggggtgatgcatttaaaagggcagttcatgctcatgtcaatctaggctacacaaaactagttggagtgttccacacagagtacggagcactcaacagagttcatgttctttggtggaatgagagtgcagatagtcgtgcagctgggagacataagtcccatgaggatcccagagttgtggcagctgttcgggaaagtgtcaactacctagtatctcagcagaatatgcttctgattcctacatcgttttcaccactgaaatagttttctactgaaatacaaaacatttcattaactgctataggatctgtctgctaatggtgcttaaattctcccaagaggttctcacttttatttgaaggaggtgttaagttaatttgctatgtttcttgcattatgaaggctacatctgtgctttgtaagtaccacttcaaaaaatagttctgtttactttctgcatggtatttcagtgtctgtcatacattaaaaatacttgtcactgttttaagatcttgactcttcatttgtttcagaatagctcttctactgtattctgacaactctttgctttatagcattttgttgtattcaaatgataatggtagcatttccatgcttgtgacagcatttttaagttattaatatattttatcaacctttccatcatgtctgttttcctggttttttttggttgttttttgaccagtaaaatttattttgtaataccaaataggatttaagaaaattaacgtatttctttactatggaaaaccacattgtcatttgtgacatcatctatattaaatatggttttcacattagttatttgtcacttacttggaaaatgatgctgttaggtcctggtattaaaaatctagaaaagacttgttggtttatgtgctgaaatgtctttatttataattaattttaactactatttacttcatttcggatcctgtttaacaaagatacttgagacatccatttgttttaatgaaatctgtatggatatggaaatgcttgccctaataaaagcctacatataccttctggttctttttgtt

SEQ ID NO: 19488 - protein, 247 aa, Homo sapiens; identical to SEQ ID NO: 2421

SEQ ID NO: 19489 - DNA, 1261 bp, Homo sapiens
gagaaagacaccaagctacgggacccgccgcgcctcccgcgccggggtggagctgaccccgccgagccccgccccagcctgcgtctgccaatgatccaggagccgctcctttccactcgggaaaccttcagaggagtctcagaaaggacacggctggctgcttttctcagcgccgaagccgcgccatgctcgtcctcagaagcgccctgactcgggcgctggcctcacggacgctggcgcctcagatgtgctcatcttttgctacgggacccagacaatacgatggaatattctatgaatttcgttcttattaccttaagccctcaaagatgaatgagttcctggaaaattttgagaaaaacgctcatcttcggacagctcactctgaattggttggatactggagtgtagaatttggaggcagaatgaatacagtgtttcatatttggaagtatgataattttgctcatcgaactgaagttcggaaagccttggccaaagataaggaatggcaagaacaattcctcattccaaatttggctctcattgataaacaagagagtgagattacttatctggtaccatggtgcaaattagaaaaacctccaaaagaaggagtctatgaactggccacttttcagatgaaacctggtgggccagctctgtggggtgatgcatttaaaagggcagttcatgctcatgtcaatctaggctacacaaaactagttggagtgttccacacagagtacggagcactcaacagagttcatgttctttggtggaatgagagtgcagatagtcgtgcagctgggagacataagtcccatgaggatcccagagttgtggcagctggtaagctgtttgactaggcatgaattatttttagaacaaatgtgtttcagtcagtaactctatatgcctttctatgaaatgtttttccagttcgggaaagtgtcaactacctagtatctcagcagaatatgcttctgattcctacatcgttttcaccactgaaatagttttctactgaaatacaaaacatttcattaactgctataggatctgtctgctaatggtgcttaaattctcccaagaggttctcacttttatttgaaggaggtgttaagttaatttgctatgtttcttgcattatgaaggctacatctgtgctttgtaagtaccacttcaaaaaatagttctgtttactttctgcatggtatttcagtgtctgtcatacattaaaaatacttgtcactgtttt

SEQ ID NO: 19490 - protein, 227 aa, Homo sapiens
MLVLRSALTRALASRTLAPQMCSSFATGPRQYDGIFYEFRSYYLKPSKMNEFLENFEKNAHLRTAHSELVGYWSVEFGGRMNTVFHIWKYDNFAHRTEVRKALAKDKEWQEQFLIPNLALIDKQESEITYLVPWCKLEKPPKEGVYELATFQMKPGGPALWGDAFKRAVHAHVNLGYTKLVGVFHTEYGALNRVHVLWWNESADSRAAGRHKSHEDPRVVAAGKLFD

SEQ ID NO: 19491 - DNA, 1641 bp, Homo sapiens
gagaaagacaccaagctacgggacccgccgcgcctcccgcgccggggtggagctgaccccgccgagccccgccccagcctgcgtctgccaatgatccaggagccgctcctttccactcgggaaaccttcagaggagtctcagaaaggacacggctggctgcttttctcagcgccgaagccgcgccatgctcgtcctcagaagcgccctgactcgggcgctggcctcacggacgctggcgcctcagatgtgctcatcttttgctacgggacccagacaatacgatggaatattctatgaatttcgttcttattaccttaagccctcaaagatgaatgagttcctggaaaattttgagaaaaacgctcatcttcggacagctcactctgaattggttggatactggagtgtagaatttggaggcagaatgaatacagtgtttcatatttggaagtatgataattttgctcatcgaactgaagttcggaaagccttggccaaagataaggaatggcaagaacaattcctcattccaaatttggctctcattgataaacaagagagtgagattacttatctggtaccatggtgcaaattagaaaaacctccaaaagaaggagtctatgaactggccacttttcagatgaaacctggtgggccagctctgtggggtgatgcatttaaaagggcagttcatgctcatgtcaatctaggctacacaaaactagttggagtgttccacacagagtacggagcactcaacagagttcatgttctttggtggaatgagagtgcagatagtcgtgcagctgggagacataagtcccatgaggatcccagagttgtggcagctggtaagctgtttgactaggcatgaattatttttagaacaaatgtgtttcagtcagtaactctatatgcctttctatgaaatgtttttccagttcgggaaagtgtcaactacctagtatctcagcagaatatgcttctgattcctacatcgttttcaccactgaaatagttttctactgaaatacaaaacatttcattaactgctataggatctgtctgctaatggtgcttaaattctcccaagaggttctcacttttatttgaaggaggtgttaagttaatttgctatgtttcttgcattatgaaggctacatctgtgctttgtaagtaccacttcaaaaaatagttctgtttactttctgcatggtatttcagtgtctgtcatacattaaaaatacttgtcactgttttaagatcttgactcttcatttgtttcagaatagctcttctactgtattctgacaactctttgctttatagcattttgttgtattcaaatgataatggtagcatttccatgcttgtgacagcatttttaagttattaatatattttatcaacctttccatcatgtctgttttcctggttttttttggttgttttttgaccagtaaaatttattttgtaataccaaataggatttaagaaaattaacgtatttctttactatggaaaaccacattgtcatttgtgacatcatctatattaaatatggttttcacattagttatttgtcacttacttggaaaatgatgctgttaggtcctggtattaaaaatctagaaaagact

SEQ ID NO: 19492 - protein, 227 aa, Homo sapiens; identical to SEQ ID NO: 19490

SEQ ID NO: 19493 - DNA, 1819 bp, Homo sapiens
gagaaagacaccaagctacgggacccgccgcgcctcccgcgccggggtggagctgaccccgccgagccccgccccagcctgcgtctgccaatgatccaggagccgctcctttccactcgggaaaccttcagaggagtctcagaaaggacacggctggctgcttttctcagcgccgaagccgcgccatgctcgtcctcagaagcgccctgactcgggcgctggcctcacggacgctggcgcctcagatgtgctcatcttttgctacgggacccagacaatacgatggaatattctatgaatttcgttcttattaccttaagccctcaaagatgaatgagttcctggaaaattttgagaaaaacgctcatcttcggacagctcactctgaattggttggatactggagtgtagaatttggaggcagaatgaatacagtgtttcatatttggaagtatgataattttgctcatcgaactgaagttcggaaagccttggccaaagataaggaatggcaagaacaattcctcattccaaatttggctctcattgataaacaagagagtgagattacttatctggtaccatggtgcaaattagaaaaacctccaaaagaaggagtctatgaactggccacttttcagatgaaacctggtgggccagctctgtggggtgatgcatttaaaagggcagttcatgctcatgtcaatctaggctacacaaaactagttggagtgttccacacagagtacggagcactcaacagagttcatgttctttggtggaatgagagtgcagatagtcgtgcagctgggagacataagtcccatgaggatcccagagttgtggcagctggtaagctgtttgactaggcatgaattatttttagaacaaatgtgtttcagtcagtaactctatatgcctttctatgaaatgtttttccagttcgggaaagtgtcaactacctagtatctcagcagaatatgcttctgattcctacatcgttttcaccactgaaatagttttctactgaaatacaaaacatttcattaactgctataggatctgtctgctaatggtgcttaaattctcccaagaggttctcacttttatttgaaggaggtgttaagttaatttgctatgtttcttgcattatgaaggctacatctgtgctttgtaagtaccacttcaaaaaatagttctgtttactttctgcatggtatttcagtgtctgtcatacattaaaaatacttgtcactgttttaagatcttgactcttcatttgtttcagaatagctcttctactgtattctgacaactctttgctttatagcattttgttgtattcaaatgataatggtagcatttccatgcttgtgacagcatttttaagttattaatatattttatcaacctttccatcatgtctgttttcctggttttttttggttgttttttgaccagtaaaatttattttgtaataccaaataggatttaagaaaattaacgtatttctttactatggaaaaccacattgtcatttgtgacatcatctatattaaatatggttttcacattagttatttgtcacttacttggaaaatgatgctgttaggtcctggtattaaaaatctagaaaagacttgttggtttatgtgctgaaatgtctttatttataattaattttaactactatttacttcatttcggatcctgtttaacaaagatacttgagacatccatttgttttaatgaaatctgtatggatatggaaatgcttgccctaataaaagcctacatataccttctggttctttttgtt

SEQ ID NO: 19494 - protein, 227 aa, Homo sapiens; identical to SEQ ID NO: 19490

SEQ ID NO: 19495 - DNA, 827 bp, Homo sapiens
gccggggtggagctgaccccgccgagccccgccccagcctgcgtctgccaatgatccaggagccgctcctttccactcgggaaaccttcagaggagtctcagaaaggacacggctggctgcttttctcagcgccgaagccgcgccatgctcgtcctcagaagcgccctgactcgggcgctggcctcacggacgctggcgcctcagatgtgctcatcttttgctacgggacccagacaatacgatggaatattctatgaatttcgttcttattaccttaagccctcaaagatgaatgagttcctggaaaattttgagaaaaacgctcatcttcggacagctcactctgaattggttggatactggagtgtagaatttggaggcagaatgaatacagtgtttcatatttggaagtatgataattttgctcatcgaactgaagttcggaaagccttggccaaagataaggaatggcaagaacaattcctcattccaaatttggctctcattgataaacaagagagtgagattacttatctggtaccatggtgcaaattagaaaaacctccaaaagaaggtaagtccttccttcttagtcactgagttttgatgaataaaatactaaagaacttaagtgatcaaaactgaagttcctttggaaaaaaataaaattaattctttgttttatatagaaacatacagtgattgttgtggtaaaaataaatgggagctcttaccccatcctttaaaaaaatgagcataaaataatgagatatttttcaaattgagaccttgcagatttgtaaagcttaactgtgttatagagaaa

SEQ ID NO: 19496 - protein, 151 aa, Homo sapiens
MLVLRSALTRALASRTLAPQMCSSFATGPRQYDGIFYEFRSYYLKPSKMNEFLENFEKNAHLRTAHSELVGYWSVEFGGRMNTVFHIWKYDNFAHRTEVRKALAKDKEWQEQFLIPNLALIDKQESEITYLVPWCKLEKPPKEGKSFLLSH

SEQ ID NO: 19497 - DNA, 1078 bp, Homo sapiens
gccggggtggagctgaccccgccgagccccgccccagcctgcgtctgccaatgatccaggagccgctcctttccactcgggaaaccttcagaggagtctcagaaaggacacggctggctgcttttctcagcgccgaagccgcgccatgctcgtcctcagaagcgccctgactcgggcgctggcctcacggacgctggcgcctcagatgtgctcatcttttgctacgggacccagacaatacgatggaatattctatgaatttcgttcttattaccttaagccctcaaagatgaatgagttcctggaaaattttgagaaaaacgctcatcttcggacagctcactctgaattggttggatactggagtgtagaatttggaggcagaatgaatacagtgtttcatatttggaagtatgataattttgctcatcgaactgaagttcggaaagccttggccaaagataaggaatggcaagaacaattcctcattccaaatttggctctcattgataaacaagagagtgagattacttatctggtaccatggtgcaaattagaaaaacctccaaaagaaggagtctatgaactggccacttttcagatgaaacctggtgggccagctctgtggggtgatgcatttaaaagggcagttcatgctcatgtcaatctaggttcatgttctttggtggaatgagagtgcagatagtcgtgcagctgggagacataagtcccatgaggatcccagagttgtggcagctgttcgggaaagtgtcaactacctagtatctcagcagaatatgcttctgattcctacatcgttttcaccactgaaatagttttctactgaaatacaaaacatttcattaactgctataggatctgtctgctaatggtgcttaaattctcccaagaggttctcacttttatttgaaggaggtgttaagttaatttgctatgtttcttgcattatgaaggctacatctgtgctttgtaagtaccacttcaaaaaatagttctgtttactttctgcatggtatttcagtgtctgtcatacattaaaaatacttgtcactgtttt

SEQ ID NO: 19498 - protein, 182 aa, Homo sapiens
MLVLRSALTRALASRTLAPQMCSSFATGPRQYDGIFYEFRSYYLKPSKMNEFLENFEKNAHLRTAHSELVGYWSVEFGGRMNTVFHIWKYDNFAHRTEVRKALAKDKEWQEQFLIPNLALIDKQESEITYLVPWCKLEKPPKEGVYELATFQMKPGGPALWGDAFKRAVHAHVNLGSCSLVE

SEQ ID NO: 19499 - DNA, 1458 bp, Homo sapiens
gccggggtggagctgaccccgccgagccccgccccagcctgcgtctgccaatgatccaggagccgctcctttccactcgggaaaccttcagaggagtctcagaaaggacacggctggctgcttttctcagcgccgaagccgcgccatgctcgtcctcagaagcgccctgactcgggcgctggcctcacggacgctggcgcctcagatgtgctcatcttttgctacgggacccagacaatacgatggaatattctatgaatttcgttcttattaccttaagccctcaaagatgaatgagttcctggaaaattttgagaaaaacgctcatcttcggacagctcactctgaattggttggatactggagtgtagaatttggaggcagaatgaatacagtgtttcatatttggaagtatgataattttgctcatcgaactgaagttcggaaagccttggccaaagataaggaatggcaagaacaattcctcattccaaatttggctctcattgataaacaagagagtgagattacttatctggtaccatggtgcaaattagaaaaacctccaaaagaaggagtctatgaactggccacttttcagatgaaacctggtgggccagctctgtggggtgatgcatttaaaagggcagttcatgctcatgtcaatctaggttcatgttctttggtggaatgagagtgcagatagtcgtgcagctgggagacataagtcccatgaggatcccagagttgtggcagctgttcgggaaagtgtcaactacctagtatctcagcagaatatgcttctgattcctacatcgttttcaccactgaaatagttttctactgaaatacaaaacatttcattaactgctataggatctgtctgctaatggtgcttaaattctcccaagaggttctcacttttatttgaaggaggtgttaagttaatttgctatgtttcttgcattatgaaggctacatctgtgctttgtaagtaccacttcaaaaaatagttctgtttactttctgcatggtatttcagtgtctgtcatacattaaaaatacttgtcactgttttaagatcttgactcttcatttgtttcagaatagctcttctactgtattctgacaactctttgctttatagcattttgttgtattcaaatgataatggtagcatttccatgcttgtgacagcatttttaagttattaatatattttatcaacctttccatcatgtctgttttcctggttttttttggttgttttttgaccagtaaaatttattttgtaataccaaataggatttaagaaaattaacgtatttctttactatggaaaaccacattgtcatttgtgacatcatctatattaaatatggttttcacattagttatttgtcacttacttggaaaatgatgctgttaggtcctggtattaaaaatctagaaaagact

SEQ ID NO: 19500 - protein, 182 aa, Homo sapiens; identical to SEQ ID NO: 19498

SEQ ID NO: 19501 - DNA, 1636 bp, Homo sapiens
gccggggtggagctgaccccgccgagccccgccccagcctgcgtctgccaatgatccaggagccgctcctttccactcgggaaaccttcagaggagtctcagaaaggacacggctggctgcttttctcagcgccgaagccgcgccatgctcgtcctcagaagcgccctgactcgggcgctggcctcacggacgctggcgcctcagatgtgctcatcttttgctacgggacccagacaatacgatggaatattctatgaatttcgttcttattaccttaagccctcaaagatgaatgagttcctggaaaattttgagaaaaacgctcatcttcggacagctcactctgaattggttggatactggagtgtagaatttggaggcagaatgaatacagtgtttcatatttggaagtatgataattttgctcatcgaactgaagttcggaaagccttggccaaagataaggaatggcaagaacaattcctcattccaaatttggctctcattgataaacaagagagtgagattacttatctggtaccatggtgcaaattagaaaaacctccaaaagaaggagtctatgaactggccacttttcagatgaaacctggtgggccagctctgtggggtgatgcatttaaaagggcagttcatgctcatgtcaatctaggttcatgttctttggtggaatgagagtgcagatagtcgtgcagctgggagacataagtcccatgaggatcccagagttgtggcagctgttcgggaaagtgtcaactacctagtatctcagcagaatatgcttctgattcctacatcgttttcaccactgaaatagttttctactgaaatacaaaacatttcattaactgctataggatctgtctgctaatggtgcttaaattctcccaagaggttctcacttttatttgaaggaggtgttaagttaatttgctatgtttcttgcattatgaaggctacatctgtgctttgtaagtaccacttcaaaaaatagttctgtttactttctgcatggtatttcagtgtctgtcatacattaaaaatacttgtcactgttttaagatcttgactcttcatttgtttcagaatagctcttctactgtattctgacaactctttgctttatagcattttgttgtattcaaatgataatggtagcatttccatgcttgtgacagcatttttaagttattaatatattttatcaacctttccatcatgtctgttttcctggttttttttggttgttttttgaccagtaaaatttattttgtaataccaaataggatttaagaaaattaacgtatttctttactatggaaaaccacattgtcatttgtgacatcatctatattaaatatggttttcacattagttatttgtcacttacttggaaaatgatgctgttaggtcctggtattaaaaatctagaaaagacttgttggtttatgtgctgaaatgtctttatttataattaattttaactactatttacttcatttcggatcctgtttaacaaagatacttgagacatccatttgttttaatgaaatctgtatggatatggaaatgcttgccctaataaaagcctacatataccttctggttctttttgtt

SEQ ID NO: 19502 - protein, 182 aa, Homo sapiens; identical to SEQ ID NO: 19498

SEQ ID NO: 19503 - DNA, 990 bp, Homo sapiens
ctcagaaaggacacggctggctgcttttctcagcgccgaagccgcgccatgctcgtcctcagaaatgtgctcatcttttgctacgggacccagacaatacgatggaatattctatgaatttcgttcttattaccttaagccctcaaagatgaatgagttcctggaaaattttgagaaaaacgctcatcttcggacagctcactctgaattggttggatactggagtgtagaatttggaggcagaatgaatacagtgtttcatatttggaagtatgataattttgctcatcgaactgaagttcggaaagccttggccaaagataaggaatggcaagaacaattcctcattccaaatttggctctcattgataaacaagagagtgagattacttatctggtaccatggtgcaaattagaaaaacctccaaaagaaggagtctatgaactggccacttttcagatgaaacctggtgggccagctctgtggggtgatgcatttaaaagggcagttcatgctcatgtcaatctaggctacacaaaactagttggagtgttccacacagagtacggagcactcaacagagttcatgttctttggtggaatgagagtgcagatagtcgtgcagctgggagacataagtcccatgaggatcccagagttgtggcagctgttcgggaaagtgtcaactacctagtatctcagcagaatatgcttctgattcctacatcgttttcaccactgaaatagttttctactgaaatacaaaacatttcattaactgctataggatctgtctgctaatggtgcttaaattctcccaagaggttctcacttttatttgaaggaggtgttaagttaatttgctatgtttcttgcattatgaaggctacatctgtgctttgtaagtaccacttcaaaaaatagttctgtttactttctgcatggtatttcagtgtctgtcatacattaaaaatacttgtcactgtttt

SEQ ID NO: 19504 - protein, 227 aa, Homo sapiens
MCSSFATGPRQYDGIFYEFRSYYLKPSKMNEFLENFEKNAHLRTAHSELVGYWSVEFGGRMNTVFHIWKYDNFAHRTEVRKALAKDKEWQEQFLIPNLALIDKQESEITYLVPWCKLEKPPKEGVYELATFQMKPGGPALWGDAFKRAVHAHVNLGYTKLVGVFHTEYGALNRVHVLWWNESADSRAAGRHKSHEDPRVVAAVRESVNYLVSQQNMLLIPTSFSPLK

SEQ ID NO: 19505 - DNA, 1370 bp, Homo sapiens
ctcagaaaggacacggctggctgcttttctcagcgccgaagccgcgccatgctcgtcctcagaaatgtgctcatcttttgctacgggacccagacaatacgatggaatattctatgaatttcgttcttattaccttaagccctcaaagatgaatgagttcctggaaaattttgagaaaaacgctcatcttcggacagctcactctgaattggttggatactggagtgtagaatttggaggcagaatgaatacagtgtttcatatttggaagtatgataattttgctcatcgaactgaagttcggaaagccttggccaaagataaggaatggcaagaacaattcctcattccaaatttggctctcattgataaacaagagagtgagattacttatctggtaccatggtgcaaattagaaaaacctccaaaagaaggagtctatgaactggccacttttcagatgaaacctggtgggccagctctgtggggtgatgcatttaaaagggcagttcatgctcatgtcaatctaggctacacaaaactagttggagtgttccacacagagtacggagcactcaacagagttcatgttctttggtggaatgagagtgcagatagtcgtgcagctgggagacataagtcccatgaggatcccagagttgtggcagctgttcgggaaagtgtcaactacctagtatctcagcagaatatgcttctgattcctacatcgttttcaccactgaaatagttttctactgaaatacaaaacatttcattaactgctataggatctgtctgctaatggtgcttaaattctcccaagaggttctcacttttatttgaaggaggtgttaagttaatttgctatgtttcttgcattatgaaggctacatctgtgctttgtaagtaccacttcaaaaaatagttctgtttactttctgcatggtatttcagtgtctgtcatacattaaaaatacttgtcactgttttaagatcttgactcttcatttgtttcagaatagctcttctactgtattctgacaactctttgctttatagcattttgttgtattcaaatgataatggtagcatttccatgcttgtgacagcatttttaagttattaatatattttatcaacctttccatcatgtctgttttcctggttttttttggttgttttttgaccagtaaaatttattttgtaataccaaataggatttaagaaaattaacgtatttctttactatggaaaaccacattgtcatttgtgacatcatctatattaaatatggttttcacattagttatttgtcacttacttggaaaatgatgctgttaggtcctggtattaaaaatctagaaaagact

SEQ ID NO: 19506 - protein, 227 aa, Homo sapiens; identical to SEQ ID NO: 19504

SEQ ID NO: 19507 - DNA, 1548 bp, Homo sapiens
ctcagaaaggacacggctggctgcttttctcagcgccgaagccgcgccatgctcgtcctcagaaatgtgctcatcttttgctacgggacccagacaatacgatggaatattctatgaatttcgttcttattaccttaagccctcaaagatgaatgagttcctggaaaattttgagaaaaacgctcatcttcggacagctcactctgaattggttggatactggagtgtagaatttggaggcagaatgaatacagtgtttcatatttggaagtatgataattttgctcatcgaactgaagttcggaaagccttggccaaagataaggaatggcaagaacaattcctcattccaaatttggctctcattgataaacaagagagtgagattacttatctggtaccatggtgcaaattagaaaaacctccaaaagaaggagtctatgaactggccacttttcagatgaaacctggtgggccagctctgtggggtgatgcatttaaaagggcagttcatgctcatgtcaatctaggctacacaaaactagttggagtgttccacacagagtacggagcactcaacagagttcatgttctttggtggaatgagagtgcagatagtcgtgcagctgggagacataagtcccatgaggatcccagagttgtggcagctgttcgggaaagtgtcaactacctagtatctcagcagaatatgcttctgattcctacatcgttttcaccactgaaatagttttctactgaaatacaaaacatttcattaactgctataggatctgtctgctaatggtgcttaaattctcccaagaggttctcacttttatttgaaggaggtgttaagttaatttgctatgtttcttgcattatgaaggctacatctgtgctttgtaagtaccacttcaaaaaatagttctgtttactttctgcatggtatttcagtgtctgtcatacattaaaaatacttgtcactgttttaagatcttgactcttcatttgtttcagaatagctcttctactgtattctgacaactctttgctttatagcattttgttgtattcaaatgataatggtagcatttccatgcttgtgacagcatttttaagttattaatatattttatcaacctttccatcatgtctgttttcctggttttttttggttgttttttgaccagtaaaatttattttgtaataccaaataggatttaagaaaattaacgtatttctttactatggaaaaccacattgtcatttgtgacatcatctatattaaatatggttttcacattagttatttgtcacttacttggaaaatgatgctgttaggtcctggtattaaaaatctagaaaagacttgttggtttatgtgctgaaatgtctttatttataattaattttaactactatttacttcatttcggatcctgtttaacaaagatacttgagacatccatttgttttaatgaaatctgtatggatatggaaatgcttgccctaataaaagcctacatataccttctggttctttttgtt

SEQ ID NO: 19508 - protein, 227 aa, Homo sapiens; identical to SEQ ID NO: 19504

SEQ ID NO: 19509 - DNA, 1785 bp, Homo sapiens
gagttcgccagtggtccaggagccgcttttttccactcgggaagacttcagagaagtctcacaaaggactcggctggctgcttttctcagtgccgaagccgcgccatgctcgttctcagaagcggcctgaccaaggcgcttgcctcacggacgctcgcgcctcaggtgtgttcatcttttgctacgggccctagacaatacgatggaacgttctatgaatttcgtacttattaccttaaaccttcaaatatgaatgcgttcatggaaaatcttaagaaaaacattcatcttcggacctcttactctgaattggttggattctggagtgtagaatttggaggcagaacgaataaagtgtttcatatttggaagtatgataattttgctcatcgagctgaagttcggaaagccttagccaactgtaaggaatggcaagaacaatctatcattccaaatttggctcgcattgataaacaagagacggaaattacttacctgataccatggtccaaattagaaaagcctccaaaagaaggagtctatgaactagctgtttttcagatgaaacctggtgggccagctctgtggggtgatgcatttgaaagagcaattaatgcccatgtcaatttaggctacacaaaagtagttggtgttttccacacagaatatggagaactcaacagagttcatgttctttggtggaatgagagtgcagatagtcgtgcagctgggagacataagtcccatgaggatcccagagttgtggcggctgttcgggaaagtgtcaactacctagtttctcagcagaatatgcttctgattcctgcatcattttcaccattgaaatagttttctactgaaatacaaaacatttcattaactgctctaagatgtgtctgctaatggtgcttaaattctcccaagaggttctcgcttttatttgaaggaggtggtaagttaattagttaatttgctgtgcttcttgcatttttgaaagttacatattctccactgctttaagaaataattcagttcactttcaccttggcatttcagtatctgttacacattagaagtagttgtcactatttcatcatcttggtttttcatttgttttagaatacctcttctgtattttgataactcattgctttatagcattttcttttactcaaataaggattttacatttccttgcctgacagtatttttgaattatttatataaaatatctatcttttcatcatgtctatagttcctgagattttaaaaaaatttgcttagtaaaggttattttgtgatataaaatgggatttataaaaatattagattgtttatttctttactgtggaaaagtacaatgtcatctgtattaattattgcttttacattcattgattattagtcattctaacttggaaaataatgcaattgggtcacagtgttaaaaatctagaaaagacttgttggtttatatgctgaaattgttcatttataattaattttactaatttctacttagtttggatcactaacagagatcttgggacatttatttgttttaaagaaatatttatggttatggaaacgcttgccctaataaaaatcctgcatattcattgtttttttaaattcacattttatacttatatgatctctaaagctcttgctatgttgctataagacagtaatatagtgataatttaccaactttattgaaaatgttgttacatcaataaaatagcatgctgggaacctgagaaggaaggtttctttagtactgcc

SEQ ID NO: 19510 - protein, 247 aa, Homo sapiens; identical to SEQ ID NO: 2423

SEQ ID NO: 19511 - DNA, 5233 bp, Homo sapiens
gagttcgccagtggtccaggagccgcttttttccactcgggaagacttcagagaagtctcacaaaggactcggctggctgcttttctcagtgccgaagccgcgccatgctcgttctcagaagcggcctgaccaaggcgcttgcctcacggacgctcgcgcctcaggtgtgttcatcttttgctacgggccctagacaatacgatggaacgttctatgaatttcgtacttattaccttaaaccttcaaatatgaatgcgttcatggaaaatcttaagaaaaacattcatcttcggacctcttactctgaattggttggattctggagtgtagaatttggaggcagaacgaataaagtgtttcatatttggaagtatgataattttgctcatcgagctgaagttcggaaagccttagccaactgtaaggaatggcaagaacaatctatcattccaaatttggctcgcattgataaacaagagacggaaattacttacctgataccatggtccaaattagaaaagcctccaaaagaaggagtctatgaactagctgtttttcagatgaaacctggtgggccagctctgtggggtgatgcatttgaaagagcaattaatgcccatgtcaatttaggctacacaaaagtagttggtgttttccacacagaatatggagaactcaacagaggttcacggggtacatgtgaagatttgttacttaggtaaacccatgtcatgggggtttgttgtacagattatttaatcactcagttcatgttctttggtggaatgagagtgcagatagtcgtgcagctgggagacataagtcccatgaggatcccagagttgtggcggctgttcgggaaagtgtcaactacctagtttctcagcagaatatgcttctgattcctgcatcattttcaccattgaaatagttttctactgaaatacaaaacatttcattaactgctctaagatgtgtctgctaatggtgcttaaattctcccaagaggttctcgcttttatttgaaggaggtgatgctggacactgccaaggcacctgaaccttccattgaccatgattgccatcctagtgcaaagagcttcacattcttccatactgcggtaaaacagaaagaggttttagttttagagagattctctgtaaccatgagaacatcaccatgacttccagcattccagcttcctagggaattgtattctgttacaagtacatgtggatatagggatgatgctgttcagtgtagtggtgtttacaattgtgaacaagttggaaataatccaaatgtctacaaaagggggaatagttaaataagagtatatcctaatggaatactatccagctataagaaatgacacctaaatgcactgacttggaataatgtttacaatatattaagtgaaaaagagcagtatttatactgggcttgcatttttgtaagaatatgcatatataatttcaggtaataattgttttactctttgcttttctgtattttctaatttttacaaaatgatcgcatattctacttggaaagttaaaacatcccacagtgaggaacccaagactttactacggacctatgagatggaatgaacacaaagatgattagaaagaatgttccagagaaagatcaaatcacatatccagcctcaatcacgctaagaaacaaagtgcttggagtgcctctatttgggagcatctgcaggcatggtacagccaccccagtgtgtgccaagggagaagcttccctctgcttttccaaggttgctctgctgtccctgggggaagacaagccaatcatacaacagccctggacatataggacttttgaacagtcatgttttccactcaggccagaacaacagttttccatccacagttatactcaccagaaacaccacaggaggcccgccgatcaaagccatggctgtagagagcttgcgtttgttgcctccactatagttaccagcatatttttctccatacttcacgaggcccagtttccgaatcgcccactcaccaacctacagtgataaaaagcaccttgactttggtctggcttgggaattttatcatgctgtcctacacatacatgtatgaaagttctttcactgagtaggactagattctataatcataacctgacaactggtgaggagccaaagcagggagaagggactcgtgtggtgggagcagcactccctctctgcccacccagccctgccccaccaccgttacaggtttccaccctgaaagcagatacaaagaaccagcattttgtgctgctgcattcatgaggaaaaacagcctgaagtcaatgcgtgtggaaaagccataaggtatatattgtcaggatgccaaaggagacaggctggctttcaggtgcccacagtaccttgccaacttctttctctgggactcctctcaaaagggcaaagaactccacgtgttctctcccagtcaacagctctgtgatggcatcaaactgagggcagtagcccatgttctgatgtacttcatggatgtttgataagatactgcaaaggacaagaaaactacttagattttaagcaggtagagatactctggttagacaatctggcctaatgttcctgtaaagtatgcttctccattacaaagataccaatacatctgctgctacttgaaagcacagcctttctgcccccaggatgctagctcttcctggcaggcagggttcctgcctctaccctccccagtccttgcacctccctggctctctgaacacttcagtctgcaggtgcagtcccatttcagaatttctgaggtcatgccaaccactgcacattctttaccaacaatctcagtcacactaccccagggctttaacgctaaggccccatcctagacttcactcatatgcaccattcacatgcaccaaatgagaaggcccagaaattttgagtgtgagcaacacagaacctagagacacaatttatgtggtggtggggtggctttggggttctatgaagccagtcaagtgaagaatcacatgtgagagaagttcagtgttcacgttccagactgatgactgcacctcagccacagcggcattgccatgaacttggccttctggcagcattcattcctctctgtgtatctaattagcacccccagggtcagcctttttcagaattaggattgaggcacacgtggacaccgtgccaggccctcacagctataccaaccaaatcagttcttacaaccagtccctgtgacaaaccttactatgggctggttattactgccactgctatatgcgtcaggagcttggtactaggagcaagcctaggaaagcagttgtgcagcgctaggcctgctattcccagaatgtctgttctcttaggattcctttacattgctactgcaaaaatgtaagagacaggagaggagatcatgaatacattaatttccttgctcttttcaattttattggctatccccctgtccagtgtgttcaaattgtgagtcattgttcattagtggtttgggaaataaatttagtgggtcatgaccagcacttttttaatgacgcagtataaggtagaataagaaatagcagagtgcactacaattagtaacagtaggtactgctttatgaaactttaggttatacatgtgtctacatgtctgtgtgtacatactaggttgagatataaaatgtatttcccacaacggtcatggtcaaaaaactctgaaagccactgccttgtactatctctccacataataagtccagagaagccgggcgcagtggctcatgcctgtaatcccagaactttgggaggctgaggcaggtggatcacctgaggtcaggagctcgagaccagtctggccaacatggtgaaaccccatctctactgaaaatacaaaaaaattaggcaggcattgtggcgggcacctgtaatctcagctactcaggaggctgaggcaggagaatcgcttgaacctgggaggcggaggttgcagtgagccaaggtcgcgccattgctctccagcctgggcagtaagagtgaaactccgtctcaaaaaaaaaaaagcccagagaagccccacatatttaaagtacttagagtaacattatctaagaagcctataaaatgtagctgtattcccaaagatcagattgctttgtgacctgtgcagtctcagaaaatggcctaacggtggctcagtcaatttgtatgctctttagagagggcaatttactttgtaggaattgttcctgaggaaataataaaagatgtatacagggacatatttacatagtgaaaaatggaaactaatgtgtccaacatttataaggaatttattaaataaattataggtacatgtacatagggggattttatgtagcaatgtaaaattccacatcttaggaaatgtaacccactgggaaatattcataatacactcattaacaataaaaactaattttaaattctacatacagtatgatctcaattgtatggcacatttatatgtgtatataagacagatgtggggtgatggaaaagttctaaaactggattgtggtgatggttgcaaaactctcaatttaccaaaaatcactaaattatactcttaaaaaacaagcaaattatattgtatgtaaattatacctgaataaagctgttaaaagaagagaatgagactgaaaggaaatgtaaattgtgattatctctagatattgaaatcatggatgattttatgtgcttctttaccctttactatatttcaacatttttatgaactctaaaaataccactgtaatcaaaaataacaacctatttctttaaataaattaaaaacaaagtctttgcagcaaaatacaagccacttcttttctcacctatttttgttaaggaaagcatctcctctggtaacagtggtatctcctgttaacatcttgaaagttgatgattttccagccccattaactcccaggagcccaaagcactgaaaaggaaagattaagttgtataagcaaactctaaaaacatgaatataaatgcccctaacacgtaactacctcaaaccttcaattcttaaatatcagagaagaatcaaatattttcttggttttaacacatcgtatagatatttaaatatgtatttcataatgggaccattttaagtgtggctgtatttataaatattatttgagttgtc

SEQ ID NO: 19512 - protein, 205 aa, Homo sapiens
MLVLRSGLTKALASRTLAPQVCSSFATGPRQYDGTFYEFRTYYLKPSNMNAFMENLKKNIHLRTSYSELVGFWSVEFGGRTNKVFHIWKYDNFAHRAEVRKALANCKEWQEQSIIPNLARIDKQETEITYLIPWSKLEKPPKEGVYELAVFQMKPGGPALWGDAFERAINAHVNLGYTKVVGVFHTEYGELNRGSRGTCEDLLLR

SEQ ID NO: 19513 - DNA, 1418 bp, Homo sapiens
gccgcttttttccactcgggaagacttcagagaagtctcacaaaggactcggctggctgcttttctcagtgccgaagccgcgccatgctcgttctcagaagcggcctgaccaaggcgcttgcctcacggacgctcgcgcctcaggtgtgttcatcttttgctacgggccctagacaatacgatggaacgttctatgaatttcgtacttattaccttaaaccttcaaatatgaatgcgttcatggaaaatcttaagaaaaacattcatcttcggacctcttactctgaattggttggattctggagtgtagaatttggaggcagaacgaataaagtgtttcatatttggaagtatgataattttgctcatcgagctgaagttcggaaagccttagccaactgtaaggaatggcaagaacaatctatcattccaaatttggctcgcattgataaacaagagacggaaattacttacctgataccatggtccaaattagaaaagcctccaaaagaagttcatgttctttggtggaatgagagtgcagatagtcgtgcagctgggagacataagtcccatgaggatcccagagttgtggcggctgttcgggaaagtgtcaactacctagtttctcagcagaatatgcttctgattcctgcatcattttcaccattgaaatagttttctactgaaatacaaaacatttcattaactgctctaagatgtgtctgctaatggtgcttaaattctcccaagaggttctcgcttttatttgaaggaggtggaagagaaacagatatgcaaccaatctgatttggttccacaccctgccacagaagtcccaaaggagaagcaaatgccacttgtagactcaaactctggacttcattctcagcaccatctcttaacctactgagtaaatcctatgaacctgactagggtggcaactgaagttgtagtactttctgtcttcaaaggagggtgaacctggagtatgttggaagaagtgttaggttcattagagacacctctttcataactgctgtcacctagaatgtctattctctaagcaccttcttgaaagaagcacattcccccaggaggaggaaatggtttgttttctttagtgacagttggcccaggatcctaaggtaaaggagtatgggcactagacaaaatgagttttataatagtcgattggaaggaatggaagtttttgaatcacaggcttctgccttgaaagggcaagtccgtggtggtcatgaaccacccagagtgtgtacaaggctcctgccagaagaaatgcctgtaggattaaaagcaaaacagcagaatcaaaaaggaagggcacgatgatgcccaggtgcagcctatattattaacagacaaggaaagaatccaaataaaagttctgtaaacca

SEQ ID NO: 19514 - protein, 197 aa, Homo sapiens
MLVLRSGLTKALASRTLAPQVCSSFATGPRQYDGTFYEFRTYYLKPSNMNAFMENLKKNIHLRTSYSELVGFWSVEFGGRTNKVFHIWKYDNFAHRAEVRKALANCKEWQEQSIIPNLARIDKQETEITYLIPWSKLEKPPKEVHVLWWNESADSRAAGRHKSHEDPRVVAAVRESVNYLVSQQNMLLIPASFSPLK

SEQ ID NO: 19515 - DNA, 8192 bp, Homo sapiens
ggaggagggagagcacaggctttgaccgatagtaacctctgcgctcggtgcagccgaatctataaaaggaactagtcccggcaaaaaccccgtaattgcgagcgagagtgagtggggccgggacccgcagagccgagccgacccttctctcccgggctgcggcagggcagggcggggagctccgcgcaccaacagagccggttctcagggcgctttgctccttgttttttccccggttctgttttctccccttctccggaaggcttgtcaaggggtaggagaaagagacgcaaacacaaaagtggaaaacagttaatgaccagccacggcgtccctgctgtgagctctggccgctgccttccagggctcccgagccacacgctgggggtgctggctgagggaacatggcttgttggcctcagctgaggttgctgctgtggaagaacctcactttcagaagaagacaaacatgtcagctgctgctggaagtggcctggcctctatttatcttcctgatcctgatctctgttcggctgagctacccaccctatgaacaacatgaatgccattttccaaataaagccatgccctctgcaggaacacttccttgggttcaggggattatctgtaatgccaacaacccctgtttccgttacccgactcctggggaggctcccggagttgttggaaactttaacaaatccattgtggctcgcctgttctcagatgctcggaggcttcttttatacagccagaaagacaccagcatgaaggacatgcgcaaagttctgagaacattacagcagatcaagaaatccagctcaaacttgaagcttcaagatttcctggtggacaatgaaaccttctctgggttcctgtatcacaacctctctctcccaaagtctactgtggacaagatgctgagggctgatgtcattctccacaaggtatttttgcaaggctaccagttacatttgacaagtctgtgcaatggatcaaaatcagaagagatgattcaacttggtgaccaagaagtttctgagctttgtggcctaccaagggagaaactggctgcagcagagcgagtacttcgttccaacatggacatcctgaagccaatcctgagaacactaaactctacatctcccttcccgagcaaggagctggctgaagccacaaaaacattgctgcatagtcttgggactctggcccaggagctgttcagcatgagaagctggagtgacatgcgacaggaggtgatgtttctgaccaatgtgaacagctccagctcctccacccaaatctaccaggctgtgtctcgtattgtctgcgggcatcccgagggaggggggctgaagatcaagtctctcaactggtatgaggacaacaactacaaagccctctttggaggcaatggcactgaggaagatgctgaaaccttctatgacaactctacaactccttactgcaatgatttgatgaagaatttggagtctagtcctctttcccgcattatctggaaagctctgaagccgctgctcgttgggaagatcctgtatacacctgacactccagccacaaggcaggtcatggctgaggtgaacaagaccttccaggaactggctgtgttccatgatctggaaggcatgtgggaggaactcagccccaagatctggaccttcatggagaacagccaagaaatggaccttgtccggatgctgttggacagcagggacaatgaccacttttgggaacagcagttggatggcttagattggacagcccaagacatcgtggcgtttttggccaagcacccagaggatgtccagtccagtaatggttctgtgtacacctggagagaagctttcaacgagactaaccaggcaatccggaccatatctcgcttcatggagtgtgtcaacctgaacaagctagaacccatagcaacagaagtctggctcatcaacaagtccatggagctgctggatgagaggaagttctgggctggtattgtgttcactggaattactccaggcagcattgagctgccccatcatgtcaagtacaagatccgaatggacattgacaatgtggagaggacaaataaaatcaaggatgggtactgggaccctggtcctcgagctgacccctttgaggacatgcggtacgtctgggggggcttcgcctacttgcaggatgtggtggagcaggcaatcatcagggtgctgacgggcaccgagaagaaaactggtgtctatatgcaacagatgccctatccctgttacgttgatgacatctttctgcgggtgatgagccggtcaatgcccctcttcatgacgctggcctggatttactcagtggctgtgatcatcaagggcatcgtgtatgagaaggaggcacggctgaaagagaccatgcggatcatgggcctggacaacagcatcctctggtttagctggttcattagtagcctcattcctcttcttgtgagcgctggcctgctagtggtcatcctgaagttaggaaacctgctgccctacagtgatcccagcgtggtgtttgtcttcctgtccgtgtttgctgtggtgacaatcctgcagtgcttcctgattagcacactcttctccagagccaacctggcagcagcctgtgggggcatcatctacttcacgctgtacctgccctacgtcctgtgtgtggcatggcaggactacgtgggcttcacactcaagatcttcgctagcctgctgtctcctgtggcttttgggtttggctgtgagtactttgccctttttgaggagcagggcattggagtgcagtgggacaacctgtttgagagtcctgtggaggaagatggcttcaatctcaccacttcggtctccatgatgctgtttgacaccttcctctatggggtgatgacctggtacattgaggctgtctttccaggccagtacggaattcccaggccctggtattttccttgcaccaagtcctactggtttggcgaggaaagtgatgagaagagccaccctggttccaaccagaagagaatatcagaaatctgcatggaggaggaacccacccacttgaagctgggcgtgtccattcagaacctggtaaaagtctaccgagatgggatgaaggtggctgtcgatggcctggcactgaatttttatgagggccagatcacctccttcctgggccacaatggagcggggaagacgaccaccatgtcaatcctgaccgggttgttccccccgacctcgggcaccgcctacatcctgggaaaagacattcgctctgagatgagcaccatccggcagaacctgggggtctgtccccagcataacgtgctgtttgacatgctgactgtcgaagaacacatctggttctatgcccgcttgaaagggctctctgagaagcacgtgaaggcggagatggagcagatggccctggatgttggtttgccatcaagcaagctgaaaagcaaaacaagccagctgtcaggtggaatgcagagaaagctatctgtggccttggcctttgtcgggggatctaaggttgtcattctggatgaacccacagctggtgtggacccttactcccgcaggggaatatgggagctgctgctgaaataccgacaaggccgcaccattattctctctacacaccacatggatgaagcggacgtcctgggggacaggattgccatcatctcccatgggaagctgtgctgtgtgggctcctccctgtttctgaagaaccagctgggaacaggctactacctgaccttggtcaagaaagatgtggaatcctccctcagttcctgcagaaacagtagtagcactgtgtcatacctgaaaaaggaggacagtgtttctcagagcagttctgatgctggcctgggcagcgaccatgagagtgacacgctgaccatcgatgtctctgctatctccaacctcatcaggaagcatgtgtctgaagcccggctggtggaagacatagggcatgagctgacctatgtgctgccatatgaagctgctaaggagggagcctttgtggaactctttcatgagattgatgaccggctctcagacctgggcatttctagttatggcatctcagagacgaccctggaagaaatattcctcaaggtggccgaagagagtggggtggatgctgagacctcagatggtaccttgccagcaagacgaaacaggcgggccttcggggacaagcagagctgtcttcgcccgttcactgaagatgatgctgctgatccaaatgattctgacatagacccagaatccagagagacagacttgctcagtgggatggatggcaaagggtcctaccaggtgaaaggctggaaacttacacagcaacagtttgtggcccttttgtggaagagactgctaattgccagacggagtcggaaaggattttttgctcagattgtcttgccagctgtgtttgtctgcattgcccttgtgttcagcctgatcgtgccaccctttggcaagtaccccagcctggaacttcagccctggatgtacaacgaacagtacacatttgtcagcaatgatgctcctgaggacacgggaaccctggaactcttaaacgccctcaccaaagaccctggcttcgggacccgctgtatggaaggaaacccaatcccagacacgccctgccaggcaggggaggaagagtggaccactgccccagttccccagaccatcatggacctcttccagaatgggaactggacaatgcagaacccttcacctgcatgccagtgtagcagcgacaaaatcaagaagatgctgcctgtgtgtcccccaggggcaggggggctgcctcctccacaaagaaaacaaaacactgcagatatccttcaggacctgacaggaagaaacatttcggattatctggtgaagacgtatgtgcagatcatagccaaaagcttaaagaacaagatctgggtgaatgagtttaggtatggcggcttttccctgggtgtcagtaatactcaagcacttcctccgagtcaagaagttaatgatgccatcaaacaaatgaagaaacacctaaagctggccaaggacagttctgcagatcgatttctcaacagcttgggaagatttatgacaggactggacaccaaaaataatgtcaaggtgtggttcaataacaagggctggcatgcaatcagctctttcctgaatgtcatcaacaatgccattctccgggccaacctgcaaaagggagagaaccctagccattatggaattactgctttcaatcatcccctgaatctcaccaagcagcagctctcagaggtggctctgatgaccacatcagtggatgtccttgtgtccatctgtgtcatctttgcaatgtccttcgtcccagccagctttgtcgtattcctgatccaggagcgggtcagcaaagcaaaacacctgcagttcatcagtggagtgaagcctgtcatctactggctctctaattttgtctgggatatgtgcaattacgttgtccctgccacactggtcattatcatcttcatctgcttccagcagaagtcctatgtgtcctccaccaatctgcctgtgctagcccttctacttttgctgtatgggtggtcaatcacacctctcatgtacccagcctcctttgtgttcaagatccccagcacagcctatgtggtgctcaccagcgtgaacctcttcattggcattaatggcagcgtggccacctttgtgctggagctgttcaccgacaataagctgaataatatcaatgatatcctgaagtccgtgttcttgatcttcccacatttttgcctgggacgagggctcatcgacatggtgaaaaaccaggcaatggctgatgccctggaaaggtttggggagaatcgctttgtgtcaccattatcttgggacttggtgggacgaaacctcttcgccatggccgtggaaggggtggtgttcttcctcattactgttctgatccagtacagattcttcatcaggcccagacctgtaaatgcaaagctatctcctctgaatgatgaagatgaagatgtgaggcgggaaagacagagaattcttgatggtggaggccagaatgacatcttagaaatcaaggagttgacgaagatatatagaaggaagcggaagcctgctgttgacaggatttgcgtgggcattcctcctggtgagtgctttgggctcctgggagttaatggggctggaaaatcatcaactttcaagatgttaacaggagataccactgttaccagaggagatgctttccttaacaaaaatagtatcttatcaaacatccatgaagtacatcagaacatgggctactgccctcagtttgatgccatcacagagctgttgactgggagagaacacgtggagttctttgcccttttgagaggagtcccagagaaagaagttggcaaggttggtgagtgggcgattcggaaactgggcctcgtgaagtatggagaaaaatatgctggtaactatagtggaggcaacaaacgcaagctctctacagccatggctttgatcggcgggcctcctgtggtgtttctggatgaacccaccacaggcatggatcccaaagcccggcggttcttgtggaattgtgccctaagtgttgtcaaggaggggagatcagtagtgcttacatctcatagtatggaagaatgtgaagctctttgcactaggatggcaatcatggtcaatggaaggttcaggtgccttggcagtgtccagcatctaaaaaataggtttggagatggttatacaatagttgtacgaatagcagggtccaacccggacctgaagcctgtccaggatttctttggacttgcatttcctggaagtgttctaaaagagaaacaccggaacatgctacaataccagcttccatcttcattatcttctctggccaggatattcagcatcctctcccagagcaaaaagcgactccacatagaagactactctgtttctcagacaacacttgaccaagtatttgtgaactttgccaaggaccaaagtgatgatgaccacttaaaagacctctcattacacaaaaaccagacagtagtggacgttgcagttctcacatcttttctacaggatgagaaagtgaaagaaagctatgtatgaagaatcctgttcatacggggtggctgaaagtaaagaggaactagactttcctttgcaccatgtgaagtgttgtggagaaaagagccagaagttgatgtgggaagaagtaaactggatactgtactgatactattcaatgcaatgcaattcaatgcaatgaaaacaaaattccattacaggggcagtgcctttgtagcctatgtcttgtatggctctcaagtgaaagacttgaatttagttttttacctatacctatgtgaaactctattatggaacccaatggacatatgggtttgaactcacacttttttttttttttttgttcctgtgtattctcattggggttgcaacaataattcatcaagtaatcatggccagcgattattgatcaaaatcaaaaggtaatgcacatcctcattcactaagccatgccatgcccaggagactggtttcccggtgacacatccattgctggcaatgagtgtgccagagttattagtgccaagtttttcagaaagtttgaagcaccatggtgtgtcatgctcacttttgtgaaagctgctctgctcagagtctatcaacattgaatatcagttgacagaatggtgccatgcgtggctaacatcctgctttgattccctctgataagctgttctggtggcagtaacatgcaacaaaaatgtgggtgtctccaggcacgggaaacttggttccattgttatattgtcctatgcttcgagccatgggtctacagggtcatccttatgagactcttaaatatacttagatcctggtaagaggcaaagaatcaacagccaaactgctggggctgcaagctgctgaagccagggcatgggattaaagagattgtgcgttcaaacctagggaagcctgtgcccatttgtcctgactgtctgctaacatggtacactgcatctcaagatgtttatctgacacaagtgtattatttctggctttttgaattaatctagaaaatgaaaa

SEQ ID NO: 19516 - protein, 2261 aa, Homo sapiens; identical to SEQ ID NO: 2425

SEQ ID NO: 19517 - DNA, 761 bp, Homo sapiens
ccacccagccccagcccagcagcaaaccttgagtcagcgccaccagcatcagaactgctctgagaaacactgtcctcctgatggcaaagaaggaggtgagaacgggtcagggacggagcaaggcagagccaccagcaccttcgccggggagggcttccaagaagctctgttgtgtgagaactaaaggaaaaagctttccctgggacacatgcactggcagccgtggcttcagaggaccctgtctggcatgtgtgtgccgtgtgaacagcctcgcttcctgagggtgaaaggtcaggaagcagagctgccaaaagaactgtggcctgccaatgaatgctgcaatgaggcctttgccaaccatctcaggcaaggcctttacctggctacatgtctagttcaatgcttctcatgctttaatgtgtgttcaaccactcaagaaccttgttaaaatgcacagattctgattcggtaggtctgagctgggcccaggttgctgaatttctaacaagttcccaagtgatcctgatgctgctggtcctcagactgcacttgagttaagaggctcattaaaaggtaaataagtggataggagtttcaggttgggatgtaaatacattaggtaccactggcttcaacacacaaataaatctcaggcatgtactgcggtacagaggaaaacatacctggtaattgggtctggtcccaccactgttatttacctgctgggtgaccttgaatcagctaccaattccctacaagcc

SEQ ID NO: 19518 - protein, 79 aa, Homo sapiens
MHWQPWLQRTLSGMCVPCEQPRFLRVKGQEAELPKELWPANECCNEAFANHLRQGLYLATCLVQCFSCFNVCSTTQEPC

SEQ ID NO: 19519 - DNA, 3729 bp, Homo sapiens
ccctttccgctggggagcagctgctgcagcaggagcagagcaggagacgcgtagccgccgtcgccgccgccgggggatgtggccggcgcctgcctctagccgcgccgcctcttgagtaccagccgccgctgcagccgccgccgccgcctagccgtgcggtgccaggccgcgccctccccgggcgcccgccggctcgcatgccgaggggctccggggcgtagctgcgcgcccggcgccgcctccgggctccttcggccccgccatgggctgctgcagctccgcctcctccgccgcgcagagctccaaacgagaatggaagccgctggaggaccgtagctgcacagacataccatggctgctgctcttcatcctcttctgcattgggatgggatttatttgtggcttttcaatagcaacaggtgcagcagcaagactagtgtcaggatacgacagctatggaaatatctgtgggcagaaaaatacaaagttggaagcaataccaaacagtggcatggaccacacccagcggaagtatgtattctttttggatccatgcaacctggacttgataaaccggaagattaagtctgtagcactgtgtgtagcagcgtgtccaaggcaagaactgaaaactctgagtgatgttcagaagtttgcagagataaatggttcagccctatgtagctacaacctaaagccttctgaatacactacatctccaaaatcttctgttctctgccccaaactaccagttccagcgagtgcacctattccattcttccatcgctgtgctcctgtgaacatttcctgctatgccaagtttgcagaggccctgatcacctttgtcagtgacaatagtgtcttacacaggctgattagtggagtaatgaccagcaaagaaattatattgggactttgcttgttatcactagttctatccatgattttgatggtgataatcaggtatatatcaagagtacttgtgtggatcttaacgattctggtcatactcggttcacttggaggcacaggtgtactatggtggctgtatgcaaagcaaagaaggtctcccaaagaaactgttactcctgagcagcttcagatagctgaagacaatcttcgggccctcctcatttatgccatttcagctacagtgttcacagtgatcttattcctgataatgttggttatgcgcaaacgtgttgctcttaccatcgccttgttccacgtagctggcaaggtcttcattcacttgccactgctagtcttccaacccttctggactttctttgctcttgtcttgttttgggtgtactggatcatgacacttctttttcttggcactaccggcagtcctgttcagaatgagcaaggctttgtggagttcaaaatttctgggcctctgcagtacatgtggtggtaccatgtggtgggcctgatttggatcagtgaatttattctagcatgtcagcagatgacagtggcaggagctgtggtaacatactattttactagggataaaaggaatttgccatttacacctattttggcatcagtaaatcgccttattcgttaccacctaggtacggtggcaaaaggatctttcattatcacattagtcaaaattccgcgaatgatccttatgtatattcacagtcagctcaaaggaaaggaaaatgcttgtgcacgatgtgtgctgaaatcttgcatttgttgcctttggtgtcttgaaaagtgcctaaattatttaaatcagaatgcatacacagccacagctatcaacagcaccaacttctgcacctcagcaaaggatgcctttgtcattctggtggagaatgctttgcgagtggctaccatcaacacagtaggagattttatgttattccttggcaaggtgctgatagtctgcagcacaggtttagctgggattatgctgctcaactaccagcaggactacacagtatgggtgctgcctctgatcatcgtctgcctctttgctttcctagtcgctcattgcttcctgtctatttatgaaatggtagtggatgtattattcttgtgttttgccattgatacaaaatacaatgatgggagccctggcagagaattctatatggataaagtgctgatggagtttgtggaaaacagtaggaaagcaatgaaagaagctggtaagggaggcgtcgctgattccagagagctaaagccgatgattaagtaatgctgggaggaataaagaagggacagaaacatggaacataaagcattgaaaattccggtgcttgggcttcggcttcagagtaacgtcagtggcttagggttaaacggccattttattcaaatgcttgctatacaatctgaaaacacactggcaggtgctcctctccttggcaattcattgagtatccagagttctacgatgtttaactgaagaattggctaatgttttgatcctccagtgtgactgttgtttttgtttgggggtgggtttggggttttttgcttttttattcctgaagcttaccagatatgaatggctaatactccattgttctgcttgttgtaatggtgaatgctttaagaaaaaaaagtgtaatttgctaagaataattcatgatctgtttatgcgataactcctttttgttacaatttttttaaaaaaagctatttttgttaatgtaaagtaaatatttcagagcaaattttttaaacttattgcactaaatacaggctctgtacaaaaaaaaaaaaaaaaaaaaagcctcagcattttatcattccatggaaggagaatcttttgaaagaaagcattgcctcctaccagaactagacagtgaattagatcggtattatggaaatgcatacaagtaatgtcactagggcttaataagcagccgtttgctaatgtgcttcctttcaaagggttggacctttaaattgctgcaaaaggtaaattgtatttttttttaagtattggtgttctttactctagctaggctaaaatttgctaaatgccttggtttcttttaaaagttcatgtaatatttctgatttttcagaatatttgcaataagagtctggattttaaaaaacacatgcatacacacaattaagagctcatgtcttagcaagatctgggaaaccaacattgcgagagtagctattttgaaagaataattctccagaagttaacatctaatatctagtatcaccaaacagtatcgctgttctcttttattcatttgaaatgaatataattatataactaacaattgtccaaatagatgagagagcaaatcatgtgagaaaattcagaataccatctgtttcatagccgcacagattttggactttcacaaacattgggaactaaatttagaattggcaaaagtctagaagatgggtatcaaaacagaagacattccaggagctagcaattttaagaggtgtccctccaaagtgacctgatggaagtcctgaacttggaaattaggttctactcacttggacatccctgcatcatggactgttgctgctccctgttccatatgctcgcaatctcagctatttggaagctaccaggaatgctttctaattatcatttgcaactagaactgtaatcagaaagaaattttgtatttttgtataacttgattgtgtgccattttatataacaggtcctgttttacaaataaattttgttttactaacattgtgtttagaaattat

SEQ ID NO: 19520 - protein, 652 aa, Homo sapiens
MGCCSSASSAAQSSKREWKPLEDRSCTDIPWLLLFILFCIGMGFICGFSIATGAAARLVSGYDSYGNICGQKNTKLEAIPNSGMDHTQRKYVFFLDPCNLDLINRKIKSVALCVAACPRQELKTLSDVQKFAEINGSALCSYNLKPSEYTTSPKSSVLCPKLPVPASAPIPFFHRCAPVNISCYAKFAEALITFVSDNSVLHRLISGVMTSKEIILGLCLLSLVLSMILMVIIRYISRVLVWILTILVILGSLGGTGVLWWLYAKQRRSPKETVTPEQLQIAEDNLRALLIYAISATVFTVILFLIMLVMRKRVALTIALFHVAGKVFIHLPLLVFQPFWTFFALVLFWVYWIMTLLFLGTTGSPVQNEQGFVEFKISGPLQYMWWYHVVGLIWISEFILACQQMTVAGAVVTYYFTRDKRNLPFTPILASVNRLIRYHLGTVAKGSFIITLVKIPRMILMYIHSQLKGKENACARCVLKSCICCLWCLEKCLNYLNQNAYTATAINSTNFCTSAKDAFVILVENALRVATINTVGDFMLFLGKVLIVCSTGLAGIMLLNYQQDYTVWVLPLIIVCLFAFLVAHCFLSIYEMVVDVLFLCFAIDTKYNDGSPGREFYMDKVLMEFVENSRKAMKEAGKGGVADSRELKPMIK

SEQ ID NO: 19521 - DNA, 4522 bp, Homo sapiens
ccctttccgctggggagcagctgctgcagcaggagcagagcaggagacgcgtagccgccgtcgccgccgccgggggatgtggccggcgcctgcctctagccgcgccgcctcttgagtaccagccgccgctgcagccgccgccgccgcctagccgtgcggtgccaggccgcgccctccccgggcgcccgccggctcgcatgccgaggggctccggggcgtagctgcgcgcccggcgccgcctccgggctccttcggccccgccatgggctgctgcagctccgcctcctccgccgcgcagagctccaaacgagaatggaagccgctggaggaccgtagctgcacagacataccatggctgctgctcttcatcctcttctgcattgggatgggatttatttgtggcttttcaatagcaacaggtgcagcagcaagactagtgtcaggatacgacagctatggaaatatctgtgggcagaaaaatacaaagttggaagcaataccaaacagtggcatggaccacacccagcggaagtatgtattctttttggatccatgcaacctggacttgataaaccggaagattaagtctgtagcactgtgtgtagcagcgtgtccaaggcaagaactgaaaactctgagtgatgttcagaagtttgcagagataaatggttcagccctatgtagctacaacctaaagccttctgaatacactacatctccaaaatcttctgttctctgccccaaactaccagttccagcgagtgcacctattccattcttccatcgctgtgctcctgtgaacatttcctgctatgccaagtttgcagaggccctgatcacctttgtcagtgacaatagtgtcttacacaggctgattagtggagtaatgaccagcaaagaaattatattgggactttgcttgttatcactagttctatccatgattttgatggtgataatcaggtatatatcaagagtacttgtgtggatcttaacgattctggtcatactcggttcacttggaggcacaggtgtactatggtggctgtatgcaaagcaaagaaggtctcccaaagaaactgttactcctgagcagcttcagatagctgaagacaatcttcgggccctcctcatttatgccatttcagctacagtgttcacagtgatcttattcctgataatgttggttatgcgcaaacgtgttgctcttaccatcgccttgttccacgtagctggcaaggtcttcattcacttgccactgctagtcttccaacccttctggactttctttgctcttgtcttgttttgggtgtactggatcatgacacttctttttcttggcactaccggcagtcctgttcagaatgagcaaggctttgtggagttcaaaatttctgggcctctgcagtacatgtggtggtaccatgtggtgggcctgatttggatcagtgaatttattctagcatgtcagcagatgacagtggcaggagctgtggtaacatactattttactagggataaaaggaatttgccatttacacctattttggcatcagtaaatcgccttattcgttaccacctaggtacggtggcaaaaggatctttcattatcacattagtcaaaattccgcgaatgatccttatgtatattcacagtcagctcaaaggaaaggaaaatgcttgtgcacgatgtgtgctgaaatcttgcatttgttgcctttggtgtcttgaaaagtgcctaaattatttaaatcagaatgcatacacagccacagctatcaacagcaccaacttctgcacctcagcaaaggatgcctttgtcattctggtggagaatgctttgcgagtggctaccatcaacacagtaggagattttatgttattccttggcaaggtgctgatagtctgcagcacaggtttagctgggattatgctgctcaactaccagcaggactacacagtatgggtgctgcctctgatcatcgtctgcctctttgctttcctagtcgctcattgcttcctgtctatttatgaaatggtagtggatgtattattcttgtgttttgccattgatacaaaatacaatgatgggagccctggcagagaattctatatggataaagtgctgatggagtttgtggaaaacagtaggaaagcaatgaaagaagctggtaagggaggcgtcgctgattccagagagctaaagccgatggcttcgggagcaagttctgcttgaacctagccgacggttatggaaacccattgacattccaaaacaatatacacacacacacataaatcagccaaaatcagagaaaaggaacagggatttaataccttttttatgcttatttttgtcaaacatgtactcctttcatacgggtggcttttacaaggcaacttccgtcatttaatgttttcaactgtaattgtcttaatggaaatgttaaaattcatatctgattaacatttttaataacttagaggagattttaactttatttaaaaataggtaaaattattgtacctaattatgtctaaagtttattcaggggtaatttccctgatgtctgtataaaatcaagatcttattttactgatgcataagtcctagtgggtcaagactaggcatatgctttcagataaataaggaattactccaatcagttttccccaatcaaagaagccatgtcattttacttttagaaacatacaattgggcccaatatgggaattttcataatagttcatacatttgtcagccaacattaaaaggtaaccaactcctcaggtatttgtagtttaccctaacgcttctttaaaagaaagtaggtaaaaaaagaaaagggtagataatctttcgtatgcaaacttttcccttatattttgtctttctttcctttttgactttagtagcatcctccacacatttgtgtgcctgatttgaaaggaagctggggcacccagcgagtttagcctttaagtttctgtgtattgatttgcagattaagtaatgctgggaggaataaagaagggacagaaacatggaacataaagcattgaaaattccggtgcttgggcttcggcttcagagtaacgtcagtggcttagggttaaacggccattttattcaaatgcttgctatacaatctgaaaacacactggcaggtgctcctctccttggcaattcattgagtatccagagttctacgatgtttaactgaagaattggctaatgttttgatcctccagtgtgactgttgtttttgtttgggggtgggtttggggttttttgcttttttattcctgaagcttaccagatatgaatggctaatactccattgttctgcttgttgtaatggtgaatgctttaagaaaaaaaagtgtaatttgctaagaataattcatgatctgtttatgcgataactcctttttgttacaatttttttaaaaaaagctatttttgttaatgtaaagtaaatatttcagagcaaattttttaaacttattgcactaaatacaggctctgtacaaaaaaaaaaaaaaaaaaaaagcctcagcattttatcattccatggaaggagaatcttttgaaagaaagcattgcctcctaccagaactagacagtgaattagatcggtattatggaaatgcatacaagtaatgtcactagggcttaataagcagccgtttgctaatgtgcttcctttcaaagggttggacctttaaattgctgcaaaaggtaaattgtatttttttttaagtattggtgttctttactctagctaggctaaaatttgctaaatgccttggtttcttttaaaagttcatgtaatatttctgatttttcagaatatttgcaataagagtctggattttaaaaaacacatgcatacacacaattaagagctcatgtcttagcaagatctgggaaaccaacattgcgagagtagctattttgaaagaataattctccagaagttaacatctaatatctagtatcaccaaacagtatcgctgttctcttttattcatttgaaatgaatataattatataactaacaattgtccaaatagatgagagagcaaatcatgtgagaaaattcagaataccatctgtttcatagccgcacagattttggactttcacaaacattgggaactaaatttagaattggcaaaagtctagaagatgggtatcaaaacagaagacattccaggagctagcaattttaagaggtgtccctccaaagtgacctgatggaagtcctgaacttggaaattaggttctactcacttggacatccctgcatcatggactgttgctgctccctgttccatatgctcgcaatctcagctatttggaagctaccaggaatgctttctaattatcatttgcaactagaactgtaatcagaaagaaattttgtatttttgtataacttgattgtgtgccattttatataacaggtcctgttttacaaataaattttgttttactaacattgtgtttagaaattat

SEQ ID NO: 19522 - protein, 657 aa, Homo sapiens; identical to SEQ ID NO: 2429

SEQ ID NO: 19523 - DNA, 4600 bp, Homo sapiens
ccctttccgctggggagcagctgctgcagcaggagcagagcaggagacgcgtagccgccgtcgccgccgccgggggatgtggccggcgcctgcctctagccgcgccgcctcttgagtaccagccgccgctgcagccgccgccgccgcctagccgtgcggtgccaggccgcgccctccccgggcgcccgccggctcgcatgccgaggggctccggggcgtagctgcgcgcccggcgccgcctccgggctccttcggccccgccatgggctgctgcagctccgcctcctccgccgcgcagagctccaaacgagaatggaagccgctggaggaccgtagctgcacagacataccatggctgctgctcttcatcctcttctgcattgggatgggatttatttgtggcttttcaatagcaacaggtgcagcagcaagactagtgtcaggatacgacagctatggaaatatctgtgggcagaaaaatacaaagttggaagcaataccaaacagtggcatggaccacacccagcggaagtatgtattctttttggatccatgcaacctggacttgataaaccggaagattaagtctgtagcactgtgtgtagcagcgtgtccaaggcaagaactgaaaactctgagtgatgttcagaagtttgcagagataaatggttcagccctatgtagctacaacctaaagccttctgaatacactacatctccaaaatcttctgttctctgccccaaactaccagttccagcgagtgcacctattccattcttccatcgctgtgctcctgtgaacatttcctgctatgccaagtttgcagaggccctgatcacctttgtcagtgacaatagtgtcttacacaggctgattagtggagtaatgaccagcaaagaaattatattgggactttgcttgttatcactagttctatccatgattttgatggtgataatcaggtatatatcaagagtacttgtgtggatcttaacgattctggtcatactcggttcacttggaggcacaggtgtactatggtggctgtatgcaaagcaaagaaggtctcccaaagaaactgttactcctgagcagcttcagatagctgaagacaatcttcgggccctcctcatttatgccatttcagctacagtgttcacagtgatcttattcctgataatgttggttatgcgcaaacgtgttgctcttaccatcgccttgttccacgtagctggcaaggtcttcattcacttgccactgctagtcttccaacccttctggactttctttgctcttgtcttgttttgggtgtactggatcatgacacttctttttcttggcactaccggcagtcctgttcagaatgagcaaggctttgtggagttcaaaatttctgggcctctgcagtacatgtggtggtaccatgtggtgggcctgatttggatcagtgaatttattctagcatgtcagcagatgacagtggcaggagctgtggtaacatactattttactagggataaaaggaatttgccatttacacctattttggcatcagtaaatcgccttattcgttaccacctaggtacggtggcaaaaggatctttcattatcacattagtcaaaattccgcgaatgatccttatgtatattcacagtcagctcaaaggaaaggaaaatgcttgtgcacgatgtgtgctgaaatcttgcatttgttgcctttggtgtcttgaaaagtgcctaaattatttaaatcagaatgcatacacagccacagctatcaacagcaccaacttctgcacctcagcaaaggatgcctttgtcattctggtggagaatgctttgcgagtggctaccatcaacacagtaggagattttatgttattccttggcaaggtgctgatagtctgcagcacaggtttagctgggattatgctgctcaactaccagcaggactacacagtatgggtgctgcctctgatcatcgtctgcctctttgctttcctagtcgctcattgcttcctgtctatttatgaaatggtagtggatgtattattcttgtgttttgccattgatacaaaatacaatgatgggagccctggcagagaattctatatggataaagtgctgatggagtttgtggaaaacagtaggaaagcaatgaaagaagctggtaagggaggcgtcgctgattccagagagctaaagccgatggcttcgggagcaagttctgcttgaacctagccgacggttatggaaacccattgacattccaaaacaatatatacacataactatgtatttgtgtgtgtgggtgtgtgtatatatgtatatgtatgtgtgtatatatgtatatgtatatacacacacacacataaatcagccaaaatcagagaaaaggaacagggatttaataccttttttatgcttatttttgtcaaacatgtactcctttcatacgggtggcttttacaaggcaacttccgtcatttaatgttttcaactgtaattgtcttaatggaaatgttaaaattcatatctgattaacatttttaataacttagaggagattttaactttatttaaaaataggtaaaattattgtacctaattatgtctaaagtttattcaggggtaatttccctgatgtctgtataaaatcaagatcttattttactgatgcataagtcctagtgggtcaagactaggcatatgctttcagataaataaggaattactccaatcagttttccccaatcaaagaagccatgtcattttacttttagaaacatacaattgggcccaatatgggaattttcataatagttcatacatttgtcagccaacattaaaaggtaaccaactcctcaggtatttgtagtttaccctaacgcttctttaaaagaaagtaggtaaaaaaagaaaagggtagataatctttcgtatgcaaacttttcccttatattttgtctttctttcctttttgactttagtagcatcctccacacatttgtgtgcctgatttgaaaggaagctggggcacccagcgagtttagcctttaagtttctgtgtattgatttgcagattaagtaatgctgggaggaataaagaagggacagaaacatggaacataaagcattgaaaattccggtgcttgggcttcggcttcagagtaacgtcagtggcttagggttaaacggccattttattcaaatgcttgctatacaatctgaaaacacactggcaggtgctcctctccttggcaattcattgagtatccagagttctacgatgtttaactgaagaattggctaatgttttgatcctccagtgtgactgttgtttttgtttgggggtgggtttggggttttttgcttttttattcctgaagcttaccagatatgaatggctaatactccattgttctgcttgttgtaatggtgaatgctttaagaaaaaaaagtgtaatttgctaagaataattcatgatctgtttatgcgataactcctttttgttacaatttttttaaaaaaagctatttttgttaatgtaaagtaaatatttcagagcaaattttttaaacttattgcactaaatacaggctctgtacaaaaaaaaaaaaaaaaaaaaagcctcagcattttatcattccatggaaggagaatcttttgaaagaaagcattgcctcctaccagaactagacagtgaattagatcggtattatggaaatgcatacaagtaatgtcactagggcttaataagcagccgtttgctaatgtgcttcctttcaaagggttggacctttaaattgctgcaaaaggtaaattgtatttttttttaagtattggtgttctttactctagctaggctaaaatttgctaaatgccttggtttcttttaaaagttcatgtaatatttctgatttttcagaatatttgcaataagagtctggattttaaaaaacacatgcatacacacaattaagagctcatgtcttagcaagatctgggaaaccaacattgcgagagtagctattttgaaagaataattctccagaagttaacatctaatatctagtatcaccaaacagtatcgctgttctcttttattcatttgaaatgaatataattatataactaacaattgtccaaatagatgagagagcaaatcatgtgagaaaattcagaataccatctgtttcatagccgcacagattttggactttcacaaacattgggaactaaatttagaattggcaaaagtctagaagatgggtatcaaaacagaagacattccaggagctagcaattttaagaggtgtccctccaaagtgacctgatggaagtcctgaacttggaaattaggttctactcacttggacatccctgcatcatggactgttgctgctccctgttccatatgctcgcaatctcagctatttggaagctaccaggaatgctttctaattatcatttgcaactagaactgtaatcagaaagaaattttgtatttttgtataacttgattgtgtgccattttatataacaggtcctgttttacaaataaattttgttttactaacattgtgtttagaaattat

SEQ ID NO: 19524 - protein, 657 aa, Homo sapiens; identical to SEQ ID NO: 2429

SEQ ID NO: 19525 - DNA, 5389 bp, Homo sapiens
ccctttccgctggggagcagctgctgcagcaggagcagagcaggagacgcgtagccgccgtcgccgccgccgggggatgtggccggcgcctgcctctagccgcgccgcctcttgagtaccagccgccgctgcagccgccgccgccgcctagccgtgcggtgccaggccgcgccctccccgggcgcccgccggctcgcatgccgaggggctccggggcgtagctgcgcgcccggcgccgcctccgggctccttcggccccgccatgggctgctgcagctccgcctcctccgccgcgcagagctccaaacgagaatggaagccgctggaggaccgtagctgcacagacataccatggctgctgctcttcatcctcttctgcattgggatgggatttatttgtggcttttcaatagcaacaggtgcagcagcaagactagtgtcaggatacgacagctatggaaatatctgtgggcagaaaaatacaaagttggaagcaataccaaacagtggcatggaccacacccagcggaagtatgtattctttttggatccatgcaacctggacttgataaaccggaagattaagtctgtagcactgtgtgtagcagcgtgtccaaggcaagaactgaaaactctgagtgatgttcagaagtttgcagagataaatggttcagccctatgtagctacaacctaaagccttctgaatacactacatctccaaaatcttctgttctctgccccaaactaccagttccagcgagtgcacctattccattcttccatcgctgtgctcctgtgaacatttcctgctatgccaagtttgcagaggccctgatcacctttgtcagtgacaatagtgtcttacacaggctgattagtggagtaatgaccagcaaagaaattatattgggactttgcttgttatcactagttctatccatgattttgatggtgataatcaggtatatatcaagagtacttgtgtggatcttaacgattctggtcatactcggttcacttggaggcacaggtgtactatggtggctgtatgcaaagcaaagaaggtctcccaaagaaactgttactcctgagcagcttcagatagctgaagacaatcttcgggccctcctcatttatgccatttcagctacagtgttcacagtgatcttattcctgataatgttggttatgcgcaaacgtgttgctcttaccatcgccttgttccacgtagctggcaaggtcttcattcacttgccactgctagtcttccaacccttctggactttctttgctcttgtcttgttttgggtgtactggatcatgacacttctttttcttggcactaccggcagtcctgttcagaatgagcaaggctttgtggagttcaaaatttctgggcctctgcagtacatgtggtggtaccatgtggtgggcctgatttggatcagtgaatttattctagcatgtcagcagatgacagtggcaggagctgtggtaacatactattttactagggataaaaggaatttgccatttacacctattttggcatcagtaaatcgccttattcgttaccacctaggtacggtggcaaaaggatctttcattatcacattagtcaaaattccgcgaatgatccttatgtatattcacagtcagctcaaaggaaaggaaaatgcttgtgcacgatgtgtgctgaaatcttgcatttgttgcctttggtgtcttgaaaagtgcctaaattatttaaatcagaatgcatacacagccacagctatcaacagcaccaacttctgcacctcagcaaaggatgcctttgtcattctggtggagaatgctttgcgagtggctaccatcaacacagtaggagattttatgttattccttggcaaggtgctgatagtctgcagcacaggtttagctgggattatgctgctcaactaccagcaggactacacagtatgggtgctgcctctgatcatcgtctgcctctttgctttcctagtcgctcattgcttcctgtctatttatgaaatggtagtggatgtattattcttgtgttttgccattgatacaaaatacaatgatgggagccctggcagagaattctatatggataaagtgctgatggagtttgtggaaaacagtaggaaagcaatgaaagaagctggtaagggaggcgtcgctgattccagagagctaaagccgatgattaagtaatgctgggaggaataaagaagggacagaaacatggaacataaagcattgaaaattccggtgcttgggcttcggcttcagagtaacgtcagtggcttagggttaaacggccattttattcaaatgcttgctatacaatctgaaaacacactggcaggtgctcctctccttggcaattcattgagtatccagagttctacgatgtttaactgaagaattggctaatgttttgatcctccagtgtgactgttgtttttgtttgggggtgggtttggggttttttgcttttttattcctgaagcttaccagatatgaatggctaatactccattgttctgcttgttgtaatggtgaatgctttaagaaaaaaaagtgtaatttgctaagaataattcatgatctgtttatgcgataactcctttttgttacaatttttttaaaaaaagctatttttgttaatgtaaagtaaatatttcagagcaaattttttaaacttattgcactaaatacaggctctgtacaaaaaaaaaaaaaaaaaaaaagcctcagcattttatcattccatggaaggagaatcttttgaaagaaagcattgcctcctaccagaactagacagtgaattagatcggtattatggaaatgcatacaagtaatgtcactagggcttaataagcagccgtttgctaatgtgcttcctttcaaagggttggacctttaaattgctgcaaaaggtaaattgtatttttttttaagtattggtgttctttactctagctaggctaaaatttgctaaatgccttggtttcttttaaaagttcatgtaatatttctgatttttcagaatatttgcaataagagtctggattttaaaaaacacatgcatacacacaattaagagctcatgtcttagcaagatctgggaaaccaacattgcgagagtagctattttgaaagaataattctccagaagttaacatctaatatctagtatcaccaaacagtatcgctgttctcttttattcatttgaaatgaatataattatataactaacaattgtccaaatagatgagagagcaaatcatgtgagaaaattcagaataccatctgtttcatagccgcacagattttggactttcacaaacattgggaactaaatttagaattggcaaaagtctagaagatgggtatcaaaacagaagacattccaggagctagcaattttaagaggtgtccctccaaagtgacctgatggaagtcctgaacttggaaattaggttctactcacttggacatccctgcatcatggactgttgctgctccctgttccatatgctcgcaatctcagctatttggaagctaccaggaatgctttctaattatcatttgcaactagaactgtaatcagaaagaaattttgtatttttgtataacttgattgtgtgccattttatataacaggtcctgttttacaaataaattttgttttactaacattgtgtttagaaattataatctatgtgtaaccatgtcatttgagttgcaaattaattgccaggctgttttccttaagtaaattcatgtgccgtgtagaaatatgcagatatgcattacacaggcacacacagagagatatttaatatgtggaatatcactctttcatgagctttattccttgattaatttgataaagcctcacagaggattttaagcaatatttaaatgtgttgaggttatgtttggatattcctgctgcctcttttcattcatttcaagtcattcttcagctagctatgggctgccttattgctattcgctcactgcttccatcttctgcccaagtgagaagaatagatgaagaacagaaatttctctgtgaaatgtggatacccgaataatttcataaatcattgattctatgtggtggtttttgtcttcttctgtggtgaatcttcaaaactgtattcaggactcatatttctagagttttaattggggtcctctattgtcaattgtagtagtgaccagagtatcgtggtttttgccatcagataattaaggctctggtgcataatttagactttctaagctcctgcctgaagaataaggtcttccataatatggaagagaaaagttatatttcagtgtaaatccaagagacccatcttctatgagaggcttaccagtgcattagtaataaaacattagcaatttagctagagcactgagattgtataatccttgcatggatgagcagagctcaaagccagttgttcctttaaagcatttaatgcaatggctaatgtttaggattaaagtttttattttatcctataagataattaagtcctaagtcactacaacttaagtagcttaactgtatgttggtacccaaactttttctataatggttaaggaggaggcacttactgagtttattttaaagttatgctagaaatgtttttcttttgtagagatgctctctctctctctctctttttttttttttttttttttttttttccgtgagggcattaggctgctgattgtaagttatttccaataccactgatcttggtatctgccaagggcttccttgccttccctgggcagttttaggatttcaccctagtagggggtatgaggcactgacccctttattctggacccaaactgctttagagcagagttaatacctctccctccctcttcaaaacagctacaggaactgcaggcaccacatatgtgtgaggccacatcactgcccctgaggcttcaactatttccaccatgcactattactagctactaacagccattttaagagatctcctagcctgcaaggtagaattctgggatcagttccaaaaccagaactgccagtaatggtgacttgaatattttatttgatttttggtcagtaaccttgtcatttaaattggactttccaatagccttaacatggcctctgagaagtttcctccagaaaggtctttaagctttcgcttttcaataagtaagttctttactgcttttctactgctactttaaaaaaaaaacaacaacaacaaataaaactctcagagtctggaggcttatcagtgcacctgccacagttaatttctgtattcttttcatacattccatctgacacatacgagtgcactataatg

SEQ ID NO: 19526 - protein, 652 aa, Homo sapiens; identical to SEQ ID NO: 19520

SEQ ID NO: 19527 - DNA, 6182 bp, Homo sapiens
ccctttccgctggggagcagctgctgcagcaggagcagagcaggagacgcgtagccgccgtcgccgccgccgggggatgtggccggcgcctgcctctagccgcgccgcctcttgagtaccagccgccgctgcagccgccgccgccgcctagccgtgcggtgccaggccgcgccctccccgggcgcccgccggctcgcatgccgaggggctccggggcgtagctgcgcgcccggcgccgcctccgggctccttcggccccgccatgggctgctgcagctccgcctcctccgccgcgcagagctccaaacgagaatggaagccgctggaggaccgtagctgcacagacataccatggctgctgctcttcatcctcttctgcattgggatgggatttatttgtggcttttcaatagcaacaggtgcagcagcaagactagtgtcaggatacgacagctatggaaatatctgtgggcagaaaaatacaaagttggaagcaataccaaacagtggcatggaccacacccagcggaagtatgtattctttttggatccatgcaacctggacttgataaaccggaagattaagtctgtagcactgtgtgtagcagcgtgtccaaggcaagaactgaaaactctgagtgatgttcagaagtttgcagagataaatggttcagccctatgtagctacaacctaaagccttctgaatacactacatctccaaaatcttctgttctctgccccaaactaccagttccagcgagtgcacctattccattcttccatcgctgtgctcctgtgaacatttcctgctatgccaagtttgcagaggccctgatcacctttgtcagtgacaatagtgtcttacacaggctgattagtggagtaatgaccagcaaagaaattatattgggactttgcttgttatcactagttctatccatgattttgatggtgataatcaggtatatatcaagagtacttgtgtggatcttaacgattctggtcatactcggttcacttggaggcacaggtgtactatggtggctgtatgcaaagcaaagaaggtctcccaaagaaactgttactcctgagcagcttcagatagctgaagacaatcttcgggccctcctcatttatgccatttcagctacagtgttcacagtgatcttattcctgataatgttggttatgcgcaaacgtgttgctcttaccatcgccttgttccacgtagctggcaaggtcttcattcacttgccactgctagtcttccaacccttctggactttctttgctcttgtcttgttttgggtgtactggatcatgacacttctttttcttggcactaccggcagtcctgttcagaatgagcaaggctttgtggagttcaaaatttctgggcctctgcagtacatgtggtggtaccatgtggtgggcctgatttggatcagtgaatttattctagcatgtcagcagatgacagtggcaggagctgtggtaacatactattttactagggataaaaggaatttgccatttacacctattttggcatcagtaaatcgccttattcgttaccacctaggtacggtggcaaaaggatctttcattatcacattagtcaaaattccgcgaatgatccttatgtatattcacagtcagctcaaaggaaaggaaaatgcttgtgcacgatgtgtgctgaaatcttgcatttgttgcctttggtgtcttgaaaagtgcctaaattatttaaatcagaatgcatacacagccacagctatcaacagcaccaacttctgcacctcagcaaaggatgcctttgtcattctggtggagaatgctttgcgagtggctaccatcaacacagtaggagattttatgttattccttggcaaggtgctgatagtctgcagcacaggtttagctgggattatgctgctcaactaccagcaggactacacagtatgggtgctgcctctgatcatcgtctgcctctttgctttcctagtcgctcattgcttcctgtctatttatgaaatggtagtggatgtattattcttgtgttttgccattgatacaaaatacaatgatgggagccctggcagagaattctatatggataaagtgctgatggagtttgtggaaaacagtaggaaagcaatgaaagaagctggtaagggaggcgtcgctgattccagagagctaaagccgatggcttcgggagcaagttctgcttgaacctagccgacggttatggaaacccattgacattccaaaacaatatacacacacacacataaatcagccaaaatcagagaaaaggaacagggatttaataccttttttatgcttatttttgtcaaacatgtactcctttcatacgggtggcttttacaaggcaacttccgtcatttaatgttttcaactgtaattgtcttaatggaaatgttaaaattcatatctgattaacatttttaataacttagaggagattttaactttatttaaaaataggtaaaattattgtacctaattatgtctaaagtttattcaggggtaatttccctgatgtctgtataaaatcaagatcttattttactgatgcataagtcctagtgggtcaagactaggcatatgctttcagataaataaggaattactccaatcagttttccccaatcaaagaagccatgtcattttacttttagaaacatacaattgggcccaatatgggaattttcataatagttcatacatttgtcagccaacattaaaaggtaaccaactcctcaggtatttgtagtttaccctaacgcttctttaaaagaaagtaggtaaaaaaagaaaagggtagataatctttcgtatgcaaacttttcccttatattttgtctttctttcctttttgactttagtagcatcctccacacatttgtgtgcctgatttgaaaggaagctggggcacccagcgagtttagcctttaagtttctgtgtattgatttgcagattaagtaatgctgggaggaataaagaagggacagaaacatggaacataaagcattgaaaattccggtgcttgggcttcggcttcagagtaacgtcagtggcttagggttaaacggccattttattcaaatgcttgctatacaatctgaaaacacactggcaggtgctcctctccttggcaattcattgagtatccagagttctacgatgtttaactgaagaattggctaatgttttgatcctccagtgtgactgttgtttttgtttgggggtgggtttggggttttttgcttttttattcctgaagcttaccagatatgaatggctaatactccattgttctgcttgttgtaatggtgaatgctttaagaaaaaaaagtgtaatttgctaagaataattcatgatctgtttatgcgataactcctttttgttacaatttttttaaaaaaagctatttttgttaatgtaaagtaaatatttcagagcaaattttttaaacttattgcactaaatacaggctctgtacaaaaaaaaaaaaaaaaaaaaagcctcagcattttatcattccatggaaggagaatcttttgaaagaaagcattgcctcctaccagaactagacagtgaattagatcggtattatggaaatgcatacaagtaatgtcactagggcttaataagcagccgtttgctaatgtgcttcctttcaaagggttggacctttaaattgctgcaaaaggtaaattgtatttttttttaagtattggtgttctttactctagctaggctaaaatttgctaaatgccttggtttcttttaaaagttcatgtaatatttctgatttttcagaatatttgcaataagagtctggattttaaaaaacacatgcatacacacaattaagagctcatgtcttagcaagatctgggaaaccaacattgcgagagtagctattttgaaagaataattctccagaagttaacatctaatatctagtatcaccaaacagtatcgctgttctcttttattcatttgaaatgaatataattatataactaacaattgtccaaatagatgagagagcaaatcatgtgagaaaattcagaataccatctgtttcatagccgcacagattttggactttcacaaacattgggaactaaatttagaattggcaaaagtctagaagatgggtatcaaaacagaagacattccaggagctagcaattttaagaggtgtccctccaaagtgacctgatggaagtcctgaacttggaaattaggttctactcacttggacatccctgcatcatggactgttgctgctccctgttccatatgctcgcaatctcagctatttggaagctaccaggaatgctttctaattatcatttgcaactagaactgtaatcagaaagaaattttgtatttttgtataacttgattgtgtgccattttatataacaggtcctgttttacaaataaattttgttttactaacattgtgtttagaaattataatctatgtgtaaccatgtcatttgagttgcaaattaattgccaggctgttttccttaagtaaattcatgtgccgtgtagaaatatgcagatatgcattacacaggcacacacagagagatatttaatatgtggaatatcactctttcatgagctttattccttgattaatttgataaagcctcacagaggattttaagcaatatttaaatgtgttgaggttatgtttggatattcctgctgcctcttttcattcatttcaagtcattcttcagctagctatgggctgccttattgctattcgctcactgcttccatcttctgcccaagtgagaagaatagatgaagaacagaaatttctctgtgaaatgtggatacccgaataatttcataaatcattgattctatgtggtggtttttgtcttcttctgtggtgaatcttcaaaactgtattcaggactcatatttctagagttttaattggggtcctctattgtcaattgtagtagtgaccagagtatcgtggtttttgccatcagataattaaggctctggtgcataatttagactttctaagctcctgcctgaagaataaggtcttccataatatggaagagaaaagttatatttcagtgtaaatccaagagacccatcttctatgagaggcttaccagtgcattagtaataaaacattagcaatttagctagagcactgagattgtataatccttgcatggatgagcagagctcaaagccagttgttcctttaaagcatttaatgcaatggctaatgtttaggattaaagtttttattttatcctataagataattaagtcctaagtcactacaacttaagtagcttaactgtatgttggtacccaaactttttctataatggttaaggaggaggcacttactgagtttattttaaagttatgctagaaatgtttttcttttgtagagatgctctctctctctctctctttttttttttttttttttttttttttccgtgagggcattaggctgctgattgtaagttatttccaataccactgatcttggtatctgccaagggcttccttgccttccctgggcagttttaggatttcaccctagtagggggtatgaggcactgacccctttattctggacccaaactgctttagagcagagttaatacctctccctccctcttcaaaacagctacaggaactgcaggcaccacatatgtgtgaggccacatcactgcccctgaggcttcaactatttccaccatgcactattactagctactaacagccattttaagagatctcctagcctgcaaggtagaattctgggatcagttccaaaaccagaactgccagtaatggtgacttgaatattttatttgatttttggtcagtaaccttgtcatttaaattggactttccaatagccttaacatggcctctgagaagtttcctccagaaaggtctttaagctttcgcttttcaataagtaagttctttactgcttttctactgctactttaaaaaaaaaacaacaacaacaaataaaactctcagagtctggaggcttatcagtgcacctgccacagttaatttctgtattcttttcatacattccatctgacacatacgagtgcactataatg

SEQ ID NO: 19528 - protein, 657 aa, Homo sapiens; identical to SEQ ID NO: 2429

SEQ ID NO: 19529 - DNA, 6260 bp, Homo sapiens
ccctttccgctggggagcagctgctgcagcaggagcagagcaggagacgcgtagccgccgtcgccgccgccgggggatgtggccggcgcctgcctctagccgcgccgcctcttgagtaccagccgccgctgcagccgccgccgccgcctagccgtgcggtgccaggccgcgccctccccgggcgcccgccggctcgcatgccgaggggctccggggcgtagctgcgcgcccggcgccgcctccgggctccttcggccccgccatgggctgctgcagctccgcctcctccgccgcgcagagctccaaacgagaatggaagccgctggaggaccgtagctgcacagacataccatggctgctgctcttcatcctcttctgcattgggatgggatttatttgtggcttttcaatagcaacaggtgcagcagcaagactagtgtcaggatacgacagctatggaaatatctgtgggcagaaaaatacaaagttggaagcaataccaaacagtggcatggaccacacccagcggaagtatgtattctttttggatccatgcaacctggacttgataaaccggaagattaagtctgtagcactgtgtgtagcagcgtgtccaaggcaagaactgaaaactctgagtgatgttcagaagtttgcagagataaatggttcagccctatgtagctacaacctaaagccttctgaatacactacatctccaaaatcttctgttctctgccccaaactaccagttccagcgagtgcacctattccattcttccatcgctgtgctcctgtgaacatttcctgctatgccaagtttgcagaggccctgatcacctttgtcagtgacaatagtgtcttacacaggctgattagtggagtaatgaccagcaaagaaattatattgggactttgcttgttatcactagttctatccatgattttgatggtgataatcaggtatatatcaagagtacttgtgtggatcttaacgattctggtcatactcggttcacttggaggcacaggtgtactatggtggctgtatgcaaagcaaagaaggtctcccaaagaaactgttactcctgagcagcttcagatagctgaagacaatcttcgggccctcctcatttatgccatttcagctacagtgttcacagtgatcttattcctgataatgttggttatgcgcaaacgtgttgctcttaccatcgccttgttccacgtagctggcaaggtcttcattcacttgccactgctagtcttccaacccttctggactttctttgctcttgtcttgttttgggtgtactggatcatgacacttctttttcttggcactaccggcagtcctgttcagaatgagcaaggctttgtggagttcaaaatttctgggcctctgcagtacatgtggtggtaccatgtggtgggcctgatttggatcagtgaatttattctagcatgtcagcagatgacagtggcaggagctgtggtaacatactattttactagggataaaaggaatttgccatttacacctattttggcatcagtaaatcgccttattcgttaccacctaggtacggtggcaaaaggatctttcattatcacattagtcaaaattccgcgaatgatccttatgtatattcacagtcagctcaaaggaaaggaaaatgcttgtgcacgatgtgtgctgaaatcttgcatttgttgcctttggtgtcttgaaaagtgcctaaattatttaaatcagaatgcatacacagccacagctatcaacagcaccaacttctgcacctcagcaaaggatgcctttgtcattctggtggagaatgctttgcgagtggctaccatcaacacagtaggagattttatgttattccttggcaaggtgctgatagtctgcagcacaggtttagctgggattatgctgctcaactaccagcaggactacacagtatgggtgctgcctctgatcatcgtctgcctctttgctttcctagtcgctcattgcttcctgtctatttatgaaatggtagtggatgtattattcttgtgttttgccattgatacaaaatacaatgatgggagccctggcagagaattctatatggataaagtgctgatggagtttgtggaaaacagtaggaaagcaatgaaagaagctggtaagggaggcgtcgctgattccagagagctaaagccgatggcttcgggagcaagttctgcttgaacctagccgacggttatggaaacccattgacattccaaaacaatatatacacataactatgtatttgtgtgtgtgggtgtgtgtatatatgtatatgtatgtgtgtatatatgtatatgtatatacacacacacacataaatcagccaaaatcagagaaaaggaacagggatttaataccttttttatgcttatttttgtcaaacatgtactcctttcatacgggtggcttttacaaggcaacttccgtcatttaatgttttcaactgtaattgtcttaatggaaatgttaaaattcatatctgattaacatttttaataacttagaggagattttaactttatttaaaaataggtaaaattattgtacctaattatgtctaaagtttattcaggggtaatttccctgatgtctgtataaaatcaagatcttattttactgatgcataagtcctagtgggtcaagactaggcatatgctttcagataaataaggaattactccaatcagttttccccaatcaaagaagccatgtcattttacttttagaaacatacaattgggcccaatatgggaattttcataatagttcatacatttgtcagccaacattaaaaggtaaccaactcctcaggtatttgtagtttaccctaacgcttctttaaaagaaagtaggtaaaaaaagaaaagggtagataatctttcgtatgcaaacttttcccttatattttgtctttctttcctttttgactttagtagcatcctccacacatttgtgtgcctgatttgaaaggaagctggggcacccagcgagtttagcctttaagtttctgtgtattgatttgcagattaagtaatgctgggaggaataaagaagggacagaaacatggaacataaagcattgaaaattccggtgcttgggcttcggcttcagagtaacgtcagtggcttagggttaaacggccattttattcaaatgcttgctatacaatctgaaaacacactggcaggtgctcctctccttggcaattcattgagtatccagagttctacgatgtttaactgaagaattggctaatgttttgatcctccagtgtgactgttgtttttgtttgggggtgggtttggggttttttgcttttttattcctgaagcttaccagatatgaatggctaatactccattgttctgcttgttgtaatggtgaatgctttaagaaaaaaaagtgtaatttgctaagaataattcatgatctgtttatgcgataactcctttttgttacaatttttttaaaaaaagctatttttgttaatgtaaagtaaatatttcagagcaaattttttaaacttattgcactaaatacaggctctgtacaaaaaaaaaaaaaaaaaaaaagcctcagcattttatcattccatggaaggagaatcttttgaaagaaagcattgcctcctaccagaactagacagtgaattagatcggtattatggaaatgcatacaagtaatgtcactagggcttaataagcagccgtttgctaatgtgcttcctttcaaagggttggacctttaaattgctgcaaaaggtaaattgtatttttttttaagtattggtgttctttactctagctaggctaaaatttgctaaatgccttggtttcttttaaaagttcatgtaatatttctgatttttcagaatatttgcaataagagtctggattttaaaaaacacatgcatacacacaattaagagctcatgtcttagcaagatctgggaaaccaacattgcgagagtagctattttgaaagaataattctccagaagttaacatctaatatctagtatcaccaaacagtatcgctgttctcttttattcatttgaaatgaatataattatataactaacaattgtccaaatagatgagagagcaaatcatgtgagaaaattcagaataccatctgtttcatagccgcacagattttggactttcacaaacattgggaactaaatttagaattggcaaaagtctagaagatgggtatcaaaacagaagacattccaggagctagcaattttaagaggtgtccctccaaagtgacctgatggaagtcctgaacttggaaattaggttctactcacttggacatccctgcatcatggactgttgctgctccctgttccatatgctcgcaatctcagctatttggaagctaccaggaatgctttctaattatcatttgcaactagaactgtaatcagaaagaaattttgtatttttgtataacttgattgtgtgccattttatataacaggtcctgttttacaaataaattttgttttactaacattgtgtttagaaattataatctatgtgtaaccatgtcatttgagttgcaaattaattgccaggctgttttccttaagtaaattcatgtgccgtgtagaaatatgcagatatgcattacacaggcacacacagagagatatttaatatgtggaatatcactctttcatgagctttattccttgattaatttgataaagcctcacagaggattttaagcaatatttaaatgtgttgaggttatgtttggatattcctgctgcctcttttcattcatttcaagtcattcttcagctagctatgggctgccttattgctattcgctcactgcttccatcttctgcccaagtgagaagaatagatgaagaacagaaatttctctgtgaaatgtggatacccgaataatttcataaatcattgattctatgtggtggtttttgtcttcttctgtggtgaatcttcaaaactgtattcaggactcatatttctagagttttaattggggtcctctattgtcaattgtagtagtgaccagagtatcgtggtttttgccatcagataattaaggctctggtgcataatttagactttctaagctcctgcctgaagaataaggtcttccataatatggaagagaaaagttatatttcagtgtaaatccaagagacccatcttctatgagaggcttaccagtgcattagtaataaaacattagcaatttagctagagcactgagattgtataatccttgcatggatgagcagagctcaaagccagttgttcctttaaagcatttaatgcaatggctaatgtttaggattaaagtttttattttatcctataagataattaagtcctaagtcactacaacttaagtagcttaactgtatgttggtacccaaactttttctataatggttaaggaggaggcacttactgagtttattttaaagttatgctagaaatgtttttcttttgtagagatgctctctctctctctctctttttttttttttttttttttttttttccgtgagggcattaggctgctgattgtaagttatttccaataccactgatcttggtatctgccaagggcttccttgccttccctgggcagttttaggatttcaccctagtagggggtatgaggcactgacccctttattctggacccaaactgctttagagcagagttaatacctctccctccctcttcaaaacagctacaggaactgcaggcaccacatatgtgtgaggccacatcactgcccctgaggcttcaactatttccaccatgcactattactagctactaacagccattttaagagatctcctagcctgcaaggtagaattctgggatcagttccaaaaccagaactgccagtaatggtgacttgaatattttatttgatttttggtcagtaaccttgtcatttaaattggactttccaatagccttaacatggcctctgagaagtttcctccagaaaggtctttaagctttcgcttttcaataagtaagttctttactgcttttctactgctactttaaaaaaaaaacaacaacaacaaataaaactctcagagtctggaggcttatcagtgcacctgccacagttaatttctgtattcttttcatacattccatctgacacatacgagtgcactataatg

SEQ ID NO: 19530 - protein, 657 aa, Homo sapiens; identical to SEQ ID NO: 2429

SEQ ID NO: 19531 - DNA, 2446 bp, Homo sapiens
ccctttccgctggggagcagctgctgcagcaggagcagagcaggagacgcgtagccgccgtcgccgccgccgggggatgtggccggcgcctgcctctagccgcgccgcctcttgagtaccagccgccgctgcagccgccgccgccgcctagccgtgcggtgccaggccgcgccctccccgggcgcccgccggctcgcatgccgaggggctccggggcgtagctgcgcgcccggcgccgcctccgggctccttcggccccgccatgggctgctgcagctccgcctcctccgccgcgcagagctccaaacgagaatggaagccgctggaggaccgtagctgcacagacataccatggctgctgctcttcatcctcttctgcattgggatgggatttatttgtggcttttcaatagcaacaggtgcagcagcaagactagtgtcaggatacgacagctatggaaatatctgtgggcagaaaaatacaaagttggaagcaataccaaacagtggcatggaccacacccagcggaagtatgtattctttttggatccatgcaacctggacttgataaaccggaagattaagtctgtagcactgtgtgtagcagcgtgtccaaggcaagaactgaaaactctgagtgatgttcagaagtttgcagagataaatggttcagccctatgtagctacaacctaaagccttctgaatacactacatctccaaaatcttctgttctctgccccaaactaccagttccagcgagtgcacctattccattcttccatcgctgtgctcctgtgaacatttcctgctatgccaagtttgcagaggccctgatcacctttgtcagtgacaatagtgtcttacacaggctgattagtggagtaatgaccagcaaagaaattatattgggactttgcttgttatcactagttctatccatgattttgatggtgataatcaggtatatatcaagagtacttgtgtggatcttaacgattctggtcatactcggttcacttggaggcacaggtgtactatggtggctgtatgcaaagcaaagaaggtctcccaaagaaactgttactcctgagcagcttcagatagctgaagacaatcttcgggccctcctcatttatgccatttcagctacagtgttcacagtgatcttattcctgataatgttggttatgcgcaaacgtgttgctcttaccatcgccttgttccacgtagctggcaaggtcttcattcacttgccactgctagtcttccaacccttctggactttctttgctcttgtcttgttttgggtgtactggatcatgacacttctttttcttggcactaccggcagtcctgttcagaatgagcaaggctttgtggagttcaaaatttctgggcctctgcagtacatgtggtggtaccatgtggtgggcctgatttggatcagtgaatttattctagcatgtcagcagatgacagtggcaggagctgtggtaacatactattttactagggataaaaggaatttgccatttacacctattttggcatcagtaaatcgccttattcgttaccacctaggtacggtggcaaaaggatctttcattatcacattagtcaaaattccgcgaatgatccttatgtatattcacagtcagctcaaaggaaaggaaaatgcttgtgcacgatgtgtgctgaaatcttgcatttgttgcctttggtgtcttgaaaagtgcctaaattatttaaatcagaatgcatacacagccacagctatcaacagcaccaacttctgcacctcagcaaaggatgcctttgtcattctggtggagaatgctttgcgagtggctaccatcaacacagtaggagattttatgttattccttggcaaggtgctgatagtctgcagcacaggtttagctgggattatgctgctcaactaccagcaggactacacagtatgggtgctgcctctgatcatcgtctgcctctttgctttcctagtcgctcattgcttcctgtctatttatgaaatggtagtggatgtattattcttgtgttttgccattgatacaaaatacaatgatgggagccctggcagagaattctatatggataaagtgctgatggagtttgtggaaaacagtaggaaagcaatgaaagaagctggtaagggaggcgtcgctgattccagagagctaaagccgatgctgaagaaaaggtgactggtctcatgagccctgaagaatgaactcagaggaggttgtttacatgaggttctcccactcaccagctgttgagagtctgcgattatgaagagcaggatcttattacttcaatgaaagcatgtaacaagtttctcaaaccaccaacagccaagtggatttggtacagtgcggctgtctaataaataatcaaaagcatttgatagaaatctgtcttgc

SEQ ID NO: 19532 - protein, 654 aa, Homo sapiens; identical to SEQ ID NO: 2427

SEQ ID NO: 19533 - DNA, 2416 bp, Homo sapiens
cacttgttaattattttctgttctcatgattatgtgtaatcttttatgcagagatatcacattagatatacttttccccttatattattacattataagcatttccatatattagtactcatggttactgttttaaatagctgcctattatgctgtttgttgatgtctcagcatgactttgtttatatgagaggtattaagcttatgctgtaaacacctttattaatctgagattttgtatgctgttttgttagaggaaacattctattaatggtggcatatttcaagtaaaagcatgtgctttttatttttaaatcgcttatggcaaaaattcattttcagttcaataaagtatgtgtttgtaagctttgtcatctgccccttgactggtagatgtgcaggctaaggagttttaagtgtttggttttgcttttggtagttgtgtgtgtgtatgtgtgtgtgtgtgtgtgcgtttcttttcagaaggggcgggtaatgtcttctgttggaacatgcactccaccctctttgataaggcttgtggtaagatttgcatcactacccatgacagtcatcctcatagcattaagcacacagctcttagctcccataatgatgtgtggagggtggagtgtattgcagccatattcacctttcatttgtgtgtttgatgtggcatttatattaagtaggagtaattttttttctgatttttttttcttgtgtcaccagtgcacctattccattcttccatcgctgtgctcctgtgaacatttcctgctatgccaagtttgcagaggccctgatcacctttgtcagtgacaatagtgtcttacacaggctgattagtggagtaatgaccagcaaagaaattatattgggactttgcttgttatcactagttctatccatgattttgatggtgataatcaggtatatatcaagagtacttgtgtggatcttaacgattctggtcatactcggttcacttggaggcacaggtgtactatggtggctgtatgcaaagcaaagaaggtctcccaaagaaactgttactcctgagcagcttcagatagctgaagacaatcttcgggccctcctcatttatgccatttcagctacagtgttcacagtgatcttattcctgataatgttggttatgcgcaaacgtgttgctcttaccatcgccttgttccacgtagctggcaaggtcttcattcacttgccactgctagtcttccaacccttctggactttctttgctcttgtcttgttttgggtgtactggatcatgacacttctttttcttggcactaccggcagtcctgttcagaatgagcaaggctttgtggagttcaaaatttctgggcctctgcagtacatgtggtggtaccatgtggtgggcctgatttggatcagtgaatttattctagcatgtcagcagatgacagtggcaggagctgtggtaacatactattttactagggataaaaggaatttgccatttacacctattttggcatcagtaaatcgccttattcgttaccacctaggtacggtggcaaaaggatctttcattatcacattagtcaaaattccgcgaatgatccttatgtatattcacagtcagctcaaaggaaaggaaaatgcttgtgcacgatgtgtgctgaaatcttgcatttgttgcctttggtgtcttgaaaagtgcctaaattatttaaatcagaatgcatacacagccacagctatcaacagcaccaacttctgcacctcagcaaaggatgcctttgtcattctggtggagaatgctttgcgagtggctaccatcaacacagtaggagattttatgttattccttggcaaggtgctgatagtctgcagcacaggtttagctgggattatgctgctcaactaccagcaggactacacagtatgggtgctgcctctgatcatcgtctgcctctttgctttcctagtcgctcattgcttcctgtctatttatgaaatggtagtggatgtattattcttgtgttttgccattgatacaaaatacaatgatgggagccctggcagagaattctatatggataaagtgctgatggagtttgtggaaaacagtaggaaagcaatgaaagaagctggtaagggaggcgtcgctgattccagagagctaaagccgatgctgaagaaaaggtgactggtctcatgagccctgaagaatgaactcagaggaggttgtttacatgaggttctcccactcaccagctgttgagagtctgcgattatgaagagcaggatcttattacttcaatgaaagcatgtaacaagtttctcaaaccaccaacagccaagtggatttggtacagtgcggctgtctaataaataatcaaaagcatttgatagaaatctgtcttgc

SEQ ID NO: 19534 - protein, 446 aa, Homo sapiens
MTSKEIILGLCLLSLVLSMILMVIIRYISRVLVWILTILVILGSLGGTGVLWWLYAKQRRSPKETVTPEQLQIAEDNLRALLIYAISATVFTVILFLIMLVMRKRVALTIALFHVAGKVFIHLPLLVFQPFWTFFALVLFWVYWIMTLLFLGTTGSPVQNEQGFVEFKISGPLQYMWWYHVVGLIWISEFILACQQMTVAGAVVTYYFTRDKRNLPFTPILASVNRLIRYHLGTVAKGSFIITLVKIPRMILMYIHSQLKGKENACARCVLKSCICCLWCLEKCLNYLNQNAYTATAINSTNFCTSAKDAFVILVENALRVATINTVGDFMLFLGKVLIVCSTGLAGIMLLNYQQDYTVWVLPLIIVCLFAFLVAHCFLSIYEMVVDVLFLCFAIDTKYNDGSPGREFYMDKVLMEFVENSRKAMKEAGKGGVADSRELKPMLKKR

SEQ ID NO: 19535 - DNA, 573 bp, Homo sapiens
cagaatgcatacacagccacagctatcaacagcaccaacttctgcacctcagcaaaggatgcctttgtcattctggtggagaatgctttgcgagtgctgcctctgatcatcgtctgcctctttgctttcctagtcgctcattgcttcctgtctatttatgaaatggtagtggatgtattattcttgtgttttgccattgatacaaaatacaatgatgggagccctggcagagaattctatatggataaagtgctgatggagtttgtggaaaacagtaggaaagcaatgaaagaagctggtaagggaggcgtcgctgattccagagagctaaagccgatgctgaagaaaaggtgactggtctcatgagccctgaagaatgaactcagaggaggttgtttacatgaggttctcccactcaccagctgttgagagtctgcgattatgaagagcaggatcttattacttcaatgaaagcatgtaacaagtttctcaaaccaccaacagccaagtggatttggtacagtgcggctgtctaataaataatcaaaagcatttgatagaaatctgtcttgc

SEQ ID NO: 19536 - protein, 63 aa, Homo sapiens
MVVDVLFLCFAIDTKYNDGSPGREFYMDKVLMEFVENSRKAMKEAGKGGVADSRELKPMLKKR

SEQ ID NO: 19537 - DNA, 2684 bp, Homo sapiens
gtttagctgggattatgctgctcaactaccagcaggactacacagtatgggtgctgcctctgatcatcgtctgcctctttgctttcctagtcgctcattgcttcctgtctatttatgaaatggtagtggatgtattattcttgtgttttgccattgatacaaaatacaatgatgggagccctggcagagaattctatatggataaagtgctgatggagtttgtggaaaacagtaggaaagcaatgaaagaagctggtaagggaggcgtcgctgattccagagagctaaagccgatggcttcgggagcaagttctgcttgaacctagccgacggttatggaaacccattgacattccaaaacaatatatacacataactatgtatttgtgtgtgtgggtgtgtgtatatatgtatatgtatgtgtgtatatatgtatatgtatatacacacacacacataaatcagccaaaatcagagaaaaggaacagggatttaataccttttttatgcttatttttgtcaaacatgtactcctttcatacgggtggcttttacaaggcaacttccgtcatttaatgttttcaactgtaattgtcttaatggaaatgttaaaattcatatctgattaacatttttaataacttagaggagattttaactttatttaaaaataggtaaaattattgtacctaattatgtctaaagtttattcaggggtaatttccctgatgtctgtataaaatcaagatcttattttactgatgcataagtcctagtgggtcaagactaggcatatgctttcagataaataaggaattactccaatcagttttccccaatcaaagaagccatgtcattttacttttagaaacatacaattgggcccaatatgggaattttcataatagttcatacatttgtcagccaacattaaaaggtaaccaactcctcaggtatttgtagtttaccctaacgcttctttaaaagaaagtaggtaaaaaaagaaaagggtagataatctttcgtatgcaaacttttcccttatattttgtctttctttcctttttgactttagtagcatcctccacacatttgtgtgcctgatttgaaaggaagctggggcacccagcgagtttagcctttaagtttctgtgtattgatttgcagattaagtaatgctgggaggaataaagaagggacagaaacatggaacataaagcattgaaaattccggtgcttgggcttcggcttcagagtaacgtcagtggcttagggttaaacggccattttattcaaatgcttgctatacaatctgaaaacacactggcaggtgctcctctccttggcaattcattgagtatccagagttctacgatgtttaactgaagaattggctaatgttttgatcctccagtgtgactgttgtttttgtttgggggtgggtttggggttttttgcttttttattcctgaagcttaccagatatgaatggctaatactccattgttctgcttgttgtaatggtgaatgctttaagaaaaaaaagtgtaatttgctaagaataattcatgatctgtttatgcgataactcctttttgttacaatttttttaaaaaaagctatttttgttaatgtaaagtaaatatttcagagcaaattttttaaacttattgcactaaatacaggctctgtacaaaaaaaaaaaaaaaaaaaaagcctcagcattttatcattccatggaaggagaatcttttgaaagaaagcattgcctcctaccagaactagacagtgaattagatcggtattatggaaatgcatacaagtaatgtcactagggcttaataagcagccgtttgctaatgtgcttcctttcaaagggttggacctttaaattgctgcaaaaggtaaattgtatttttttttaagtattggtgttctttactctagctaggctaaaatttgctaaatgccttggtttcttttaaaagttcatgtaatatttctgatttttcagaatatttgcaataagagtctggattttaaaaaacacatgcatacacacaattaagagctcatgtcttagcaagatctgggaaaccaacattgcgagagtagctattttgaaagaataattctccagaagttaacatctaatatctagtatcaccaaacagtatcgctgttctcttttattcatttgaaatgaatataattatataactaacaattgtccaaatagatgagagagcaaatcatgtgagaaaattcagaataccatctgtttcatagccgcacagattttggactttcacaaacattgggaactaaatttagaattggcaaaagtctagaagatgggtatcaaaacagaagacattccaggagctagcaattttaagaggtgtccctccaaagtgacctgatggaagtcctgaacttggaaattaggttctactcacttggacatccctgcatcatggactgttgctgctccctgttccatatgctcgcaatctcagctatttggaagctaccaggaatgctttctaattatcatttgcaactagaactgtaatcagaaagaaattttgtatttttgtataacttgattgtgtgccattttatataacaggtcctgttttacaaataaattttgttttactaacattgtgtttagaaattat

SEQ ID NO: 19538 - protein, 101 aa, Homo sapiens [sequence omitted]

SEQ ID NO: 19539 - DNA, 4344 bp, Homo sapiens
gtttagctgggattatgctgctcaactaccagcaggactacacagtatgggtgctgcctctgatcatcgtctgcctctttgctttcctagtcgctcattgcttcctgtctatttatgaaatggtagtggatgtattattcttgtgttttgccattgatacaaaatacaatgatgggagccctggcagagaattctatatggataaagtgctgatggagtttgtggaaaacagtaggaaagcaatgaaagaagctggtaagggaggcgtcgctgattccagagagctaaagccgatggcttcgggagcaagttctgcttgaacctagccgacggttatggaaacccattgacattccaaaacaatatatacacataactatgtatttgtgtgtgtgggtgtgtgtatatatgtatatgtatgtgtgtatatatgtatatgtatatacacacacacacataaatcagccaaaatcagagaaaaggaacagggatttaataccttttttatgcttatttttgtcaaacatgtactcctttcatacgggtggcttttacaaggcaacttccgtcatttaatgttttcaactgtaattgtcttaatggaaatgttaaaattcatatctgattaacatttttaataacttagaggagattttaactttatttaaaaataggtaaaattattgtacctaattatgtctaaagtttattcaggggtaatttccctgatgtctgtataaaatcaagatcttattttactgatgcataagtcctagtgggtcaagactaggcatatgctttcagataaataaggaattactccaatcagttttccccaatcaaagaagccatgtcattttacttttagaaacatacaattgggcccaatatgggaattttcataatagttcatacatttgtcagccaacattaaaaggtaaccaactcctcaggtatttgtagtttaccctaacgcttctttaaaagaaagtaggtaaaaaaagaaaagggtagataatctttcgtatgcaaacttttcccttatattttgtctttctttcctttttgactttagtagcatcctccacacatttgtgtgcctgatttgaaaggaagctggggcacccagcgagtttagcctttaagtttctgtgtattgatttgcagattaagtaatgctgggaggaataaagaagggacagaaacatggaacataaagcattgaaaattccggtgcttgggcttcggcttcagagtaacgtcagtggcttagggttaaacggccattttattcaaatgcttgctatacaatctgaaaacacactggcaggtgctcctctccttggcaattcattgagtatccagagttctacgatgtttaactgaagaattggctaatgttttgatcctccagtgtgactgttgtttttgtttgggggtgggtttggggttttttgcttttttattcctgaagcttaccagatatgaatggctaatactccattgttctgcttgttgtaatggtgaatgctttaagaaaaaaaagtgtaatttgctaagaataattcatgatctgtttatgcgataactcctttttgttacaatttttttaaaaaaagctatttttgttaatgtaaagtaaatatttcagagcaaattttttaaacttattgcactaaatacaggctctgtacaaaaaaaaaaaaaaaaaaaaagcctcagcattttatcattccatggaaggagaatcttttgaaagaaagcattgcctcctaccagaactagacagtgaattagatcggtattatggaaatgcatacaagtaatgtcactagggcttaataagcagccgtttgctaatgtgcttcctttcaaagggttggacctttaaattgctgcaaaaggtaaattgtatttttttttaagtattggtgttctttactctagctaggctaaaatttgctaaatgccttggtttcttttaaaagttcatgtaatatttctgatttttcagaatatttgcaataagagtctggattttaaaaaacacatgcatacacacaattaagagctcatgtcttagcaagatctgggaaaccaacattgcgagagtagctattttgaaagaataattctccagaagttaacatctaatatctagtatcaccaaacagtatcgctgttctcttttattcatttgaaatgaatataattatataactaacaattgtccaaatagatgagagagcaaatcatgtgagaaaattcagaataccatctgtttcatagccgcacagattttggactttcacaaacattgggaactaaatttagaattggcaaaagtctagaagatgggtatcaaaacagaagacattccaggagctagcaattttaagaggtgtccctccaaagtgacctgatggaagtcctgaacttggaaattaggttctactcacttggacatccctgcatcatggactgttgctgctccctgttccatatgctcgcaatctcagctatttggaagctaccaggaatgctttctaattatcatttgcaactagaactgtaatcagaaagaaattttgtatttttgtataacttgattgtgtgccattttatataacaggtcctgttttacaaataaattttgttttactaacattgtgtttagaaattataatctatgtgtaaccatgtcatttgagttgcaaattaattgccaggctgttttccttaagtaaattcatgtgccgtgtagaaatatgcagatatgcattacacaggcacacacagagagatatttaatatgtggaatatcactctttcatgagctttattccttgattaatttgataaagcctcacagaggattttaagcaatatttaaatgtgttgaggttatgtttggatattcctgctgcctcttttcattcatttcaagtcattcttcagctagctatgggctgccttattgctattcgctcactgcttccatcttctgcccaagtgagaagaatagatgaagaacagaaatttctctgtgaaatgtggatacccgaataatttcataaatcattgattctatgtggtggtttttgtcttcttctgtggtgaatcttcaaaactgtattcaggactcatatttctagagttttaattggggtcctctattgtcaattgtagtagtgaccagagtatcgtggtttttgccatcagataattaaggctctggtgcataatttagactttctaagctcctgcctgaagaataaggtcttccataatatggaagagaaaagttatatttcagtgtaaatccaagagacccatcttctatgagaggcttaccagtgcattagtaataaaacattagcaatttagctagagcactgagattgtataatccttgcatggatgagcagagctcaaagccagttgttcctttaaagcatttaatgcaatggctaatgtttaggattaaagtttttattttatcctataagataattaagtcctaagtcactacaacttaagtagcttaactgtatgttggtacccaaactttttctataatggttaaggaggaggcacttactgagtttattttaaagttatgctagaaatgtttttcttttgtagagatgctctctctctctctctctttttttttttttttttttttttttttccgtgagggcattaggctgctgattgtaagttatttccaataccactgatcttggtatctgccaagggcttccttgccttccctgggcagttttaggatttcaccctagtagggggtatgaggcactgacccctttattctggacccaaactgctttagagcagagttaatacctctccctccctcttcaaaacagctacaggaactgcaggcaccacatatgtgtgaggccacatcactgcccctgaggcttcaactatttccaccatgcactattactagctactaacagccattttaagagatctcctagcctgcaaggtagaattctgggatcagttccaaaaccagaactgccagtaatggtgacttgaatattttatttgatttttggtcagtaaccttgtcatttaaattggactttccaatagccttaacatggcctctgagaagtttcctccagaaaggtctttaagctttcgcttttcaataagtaagttctttactgcttttctactgctactttaaaaaaaaaacaacaacaacaaataaaactctcagagtctggaggcttatcagtgcacctgccacagttaatttctgtattcttttcatacattccatctgacacatacgagtgcactataatg

SEQ ID NO: 19540 - protein, 101 aa, Homo sapiens [sequence omitted]

SEQ ID NO: 19541 - DNA, 3260 bp, Homo sapiens
cccatttcgactactactaaccataggttctggttgatacaccctgtcttcctgcttcatgaagtaatgtcatggtcagattgacactttttttaaaaagagtagtttgtttatggtttggttaagaaaaaaagcattatgtgcttagcagtatcaatgtgttcttttaccttctatggttatttaaaagtggaggcttatggagtaacgtgttcttgttgtttcatttaaccttgatatagaaaaaaacaacaacaacaaataaaatgatattctgagtatgagaaaatagcctcttaaaaatgttaggtattttctcttccaggtagaactaacattatctcttggagccttagtaagattgtcacaatgaatggatggaaagaagatttttttaatcagcgaattgcagagtccatttctacaaatttagcaactctcatgtgtgatactaaacattatttattgctatgtttttaagccatccatttaccaagattgagtcaaaaatgtagatgttctttagaattcatctactaacaaatctgaaaggacccaagaatttattcaatatggtccatattttgcaggagtttgtggaaaacagtaggaaagcaatgaaagaagctggtaagggaggcgtcgctgattccagagagctaaagccgatggtaggtggagatgaggaggtggccgccctccaagaatttcactttcacttcctctctctctctgtcttcactgactgcacttcttcaggagaagcttttgttatctgtatcacgcaggacatgctgctctttctgtttgtgtgcttacccatcacttggatggcagaattcttgtcacaactgagaccaccttctataaaagcttcgggagcaagttctgcttgaacctagccgacggttatggaaacccattgacattccaaaacaatatatacacataactatgtatttgtgtgtgtgggtgtgtgtatatatgtatatgtatgtgtgtatatatgtatatgtatatacacacacacacataaatcagccaaaatcagagaaaaggaacagggatttaataccttttttatgcttatttttgtcaaacatgtactcctttcatacgggtggcttttacaaggcaacttccgtcatttaatgttttcaactgtaattgtcttaatggaaatgttaaaattcatatctgattaacatttttaataacttagaggagattttaactttatttaaaaataggtaaaattattgtacctaattatgtctaaagtttattcaggggtaatttccctgatgtctgtataaaatcaagatcttattttactgatgcataagtcctagtgggtcaagactaggcatatgctttcagataaataaggaattactccaatcagttttccccaatcaaagaagccatgtcattttacttttagaaacatacaattgggcccaatatgggaattttcataatagttcatacatttgtcagccaacattaaaaggtaaccaactcctcaggtatttgtagtttaccctaacgcttctttaaaagaaagtaggtaaaaaaagaaaagggtagataatctttcgtatgcaaacttttcccttatattttgtctttctttcctttttgactttagtagcatcctccacacatttgtgtgcctgatttgaaaggaagctggggcacccagcgagtttagcctttaagtttctgtgtattgatttgcagattaagtaatgctgggaggaataaagaagggacagaaacatggaacataaagcattgaaaattccggtgcttgggcttcggcttcagagtaacgtcagtggcttagggttaaacggccattttattcaaatgcttgctatacaatctgaaaacacactggcaggtgctcctctccttggcaattcattgagtatccagagttctacgatgtttaactgaagaattggctaatgttttgatcctccagtgtgactgttgtttttgtttgggggtgggtttggggttttttgcttttttattcctgaagcttaccagatatgaatggctaatactccattgttctgcttgttgtaatggtgaatgctttaagaaaaaaaagtgtaatttgctaagaataattcatgatctgtttatgcgataactcctttttgttacaatttttttaaaaaaagctatttttgttaatgtaaagtaaatatttcagagcaaattttttaaacttattgcactaaatacaggctctgtacaaaaaaaaaaaaaaaaaaaaagcctcagcattttatcattccatggaaggagaatcttttgaaagaaagcattgcctcctaccagaactagacagtgaattagatcggtattatggaaatgcatacaagtaatgtcactagggcttaataagcagccgtttgctaatgtgcttcctttcaaagggttggacctttaaattgctgcaaaaggtaaattgtatttttttttaagtattggtgttctttactctagctaggctaaaatttgctaaatgccttggtttcttttaaaagttcatgtaatatttctgatttttcagaatatttgcaataagagtctggattttaaaaaacacatgcatacacacaattaagagctcatgtcttagcaagatctgggaaaccaacattgcgagagtagctattttgaaagaataattctccagaagttaacatctaatatctagtatcaccaaacagtatcgctgttctcttttattcatttgaaatgaatataattatataactaacaattgtccaaatagatgagagagcaaatcatgtgagaaaattcagaataccatctgtttcatagccgcacagattttggactttcacaaacattgggaactaaatttagaattggcaaaagtctagaagatgggtatcaaaacagaagacattccaggagctagcaattttaagaggtgtccctccaaagtgacctgatggaagtcctgaacttggaaattaggttctactcacttggacatccctgcatcatggactgttgctgctccctgttccatatgctcgcaatctcagctatttggaagctaccaggaatgctttctaattatcatttgcaactagaactgtaatcagaaagaaattttgtatttttgtataacttgattgtgtgccattttatataacaggtcctgttttacaaataaattttgttttactaacattgtgtttagaaattat

SEQ ID NO: 19542 - protein, 126 aa, Homo sapiens
MFFRIHLLTNLKGPKNLFNMVHILQEFVENSRKAMKEAGKGGVADSRELKPMVGGDEEVAALQEFHFHFLSLSVFTDCTSSGEAFVICITQDMLLFLFVCLPITWMAEFLSQLRPPSIKASGASSA

SEQ ID NO: 19543 - DNA, 4920 bp, Homo sapiens
cccatttcgactactactaaccataggttctggttgatacaccctgtcttcctgcttcatgaagtaatgtcatggtcagattgacactttttttaaaaagagtagtttgtttatggtttggttaagaaaaaaagcattatgtgcttagcagtatcaatgtgttcttttaccttctatggttatttaaaagtggaggcttatggagtaacgtgttcttgttgtttcatttaaccttgatatagaaaaaaacaacaacaacaaataaaatgatattctgagtatgagaaaatagcctcttaaaaatgttaggtattttctcttccaggtagaactaacattatctcttggagccttagtaagattgtcacaatgaatggatggaaagaagatttttttaatcagcgaattgcagagtccatttctacaaatttagcaactctcatgtgtgatactaaacattatttattgctatgtttttaagccatccatttaccaagattgagtcaaaaatgtagatgttctttagaattcatctactaacaaatctgaaaggacccaagaatttattcaatatggtccatattttgcaggagtttgtggaaaacagtaggaaagcaatgaaagaagctggtaagggaggcgtcgctgattccagagagctaaagccgatggtaggtggagatgaggaggtggccgccctccaagaatttcactttcacttcctctctctctctgtcttcactgactgcacttcttcaggagaagcttttgttatctgtatcacgcaggacatgctgctctttctgtttgtgtgcttacccatcacttggatggcagaattcttgtcacaactgagaccaccttctataaaagcttcgggagcaagttctgcttgaacctagccgacggttatggaaacccattgacattccaaaacaatatatacacataactatgtatttgtgtgtgtgggtgtgtgtatatatgtatatgtatgtgtgtatatatgtatatgtatatacacacacacacataaatcagccaaaatcagagaaaaggaacagggatttaataccttttttatgcttatttttgtcaaacatgtactcctttcatacgggtggcttttacaaggcaacttccgtcatttaatgttttcaactgtaattgtcttaatggaaatgttaaaattcatatctgattaacatttttaataacttagaggagattttaactttatttaaaaataggtaaaattattgtacctaattatgtctaaagtttattcaggggtaatttccctgatgtctgtataaaatcaagatcttattttactgatgcataagtcctagtgggtcaagactaggcatatgctttcagataaataaggaattactccaatcagttttccccaatcaaagaagccatgtcattttacttttagaaacatacaattgggcccaatatgggaattttcataatagttcatacatttgtcagccaacattaaaaggtaaccaactcctcaggtatttgtagtttaccctaacgcttctttaaaagaaagtaggtaaaaaaagaaaagggtagataatctttcgtatgcaaacttttcccttatattttgtctttctttcctttttgactttagtagcatcctccacacatttgtgtgcctgatttgaaaggaagctggggcacccagcgagtttagcctttaagtttctgtgtattgatttgcagattaagtaatgctgggaggaataaagaagggacagaaacatggaacataaagcattgaaaattccggtgcttgggcttcggcttcagagtaacgtcagtggcttagggttaaacggccattttattcaaatgcttgctatacaatctgaaaacacactggcaggtgctcctctccttggcaattcattgagtatccagagttctacgatgtttaactgaagaattggctaatgttttgatcctccagtgtgactgttgtttttgtttgggggtgggtttggggttttttgcttttttattcctgaagcttaccagatatgaatggctaatactccattgttctgcttgttgtaatggtgaatgctttaagaaaaaaaagtgtaatttgctaagaataattcatgatctgtttatgcgataactcctttttgttacaatttttttaaaaaaagctatttttgttaatgtaaagtaaatatttcagagcaaattttttaaacttattgcactaaatacaggctctgtacaaaaaaaaaaaaaaaaaaaaagcctcagcattttatcattccatggaaggagaatcttttgaaagaaagcattgcctcctaccagaactagacagtgaattagatcggtattatggaaatgcatacaagtaatgtcactagggcttaataagcagccgtttgctaatgtgcttcctttcaaagggttggacctttaaattgctgcaaaaggtaaattgtatttttttttaagtattggtgttctttactctagctaggctaaaatttgctaaatgccttggtttcttttaaaagttcatgtaatatttctgatttttcagaatatttgcaataagagtctggattttaaaaaacacatgcatacacacaattaagagctcatgtcttagcaagatctgggaaaccaacattgcgagagtagctattttgaaagaataattctccagaagttaacatctaatatctagtatcaccaaacagtatcgctgttctcttttattcatttgaaatgaatataattatataactaacaattgtccaaatagatgagagagcaaatcatgtgagaaaattcagaataccatctgtttcatagccgcacagattttggactttcacaaacattgggaactaaatttagaattggcaaaagtctagaagatgggtatcaaaacagaagacattccaggagctagcaattttaagaggtgtccctccaaagtgacctgatggaagtcctgaacttggaaattaggttctactcacttggacatccctgcatcatggactgttgctgctccctgttccatatgctcgcaatctcagctatttggaagctaccaggaatgctttctaattatcatttgcaactagaactgtaatcagaaagaaattttgtatttttgtataacttgattgtgtgccattttatataacaggtcctgttttacaaataaattttgttttactaacattgtgtttagaaattataatctatgtgtaaccatgtcatttgagttgcaaattaattgccaggctgttttccttaagtaaattcatgtgccgtgtagaaatatgcagatatgcattacacaggcacacacagagagatatttaatatgtggaatatcactctttcatgagctttattccttgattaatttgataaagcctcacagaggattttaagcaatatttaaatgtgttgaggttatgtttggatattcctgctgcctcttttcattcatttcaagtcattcttcagctagctatgggctgccttattgctattcgctcactgcttccatcttctgcccaagtgagaagaatagatgaagaacagaaatttctctgtgaaatgtggatacccgaataatttcataaatcattgattctatgtggtggtttttgtcttcttctgtggtgaatcttcaaaactgtattcaggactcatatttctagagttttaattggggtcctctattgtcaattgtagtagtgaccagagtatcgtggtttttgccatcagataattaaggctctggtgcataatttagactttctaagctcctgcctgaagaataaggtcttccataatatggaagagaaaagttatatttcagtgtaaatccaagagacccatcttctatgagaggcttaccagtgcattagtaataaaacattagcaatttagctagagcactgagattgtataatccttgcatggatgagcagagctcaaagccagttgttcctttaaagcatttaatgcaatggctaatgtttaggattaaagtttttattttatcctataagataattaagtcctaagtcactacaacttaagtagcttaactgtatgttggtacccaaactttttctataatggttaaggaggaggcacttactgagtttattttaaagttatgctagaaatgtttttcttttgtagagatgctctctctctctctctctttttttttttttttttttttttttttccgtgagggcattaggctgctgattgtaagttatttccaataccactgatcttggtatctgccaagggcttccttgccttccctgggcagttttaggatttcaccctagtagggggtatgaggcactgacccctttattctggacccaaactgctttagagcagagttaatacctctccctccctcttcaaaacagctacaggaactgcaggcaccacatatgtgtgaggccacatcactgcccctgaggcttcaactatttccaccatgcactattactagctactaacagccattttaagagatctcctagcctgcaaggtagaattctgggatcagttccaaaaccagaactgccagtaatggtgacttgaatattttatttgatttttggtcagtaaccttgtcatttaaattggactttccaatagccttaacatggcctctgagaagtttcctccagaaaggtctttaagctttcgcttttcaataagtaagttctttactgcttttctactgctactttaaaaaaaaaacaacaacaacaaataaaactctcagagtctggaggcttatcagtgcacctgccacagttaatttctgtattcttttcatacattccatctgacacatacgagtgcactataatg

SEQ ID NO: 19544 - protein, 126 aa, Homo sapiens; identical to SEQ ID NO: 19542

SEQ ID NO: 19545 - DNA, 1905 bp, Homo sapiens
tttgtaggttttcaactttaaaatatatgctataaaataagttcatttaagtaggcatgagccaccgcgcccggcctagaagagttttaatgaaccttccacagtagtaaatgcagagaccactggtggaaattcccatgttggatagaaaagggcgtaagtccagtctaagtatctaaatgtgatatgcccttttgtcacagaagtgtaagacttaaagggaatattctgaccttcgtgtatgaatctgatccacccatcctgtcagctaggattataatttgaactgtcgtttcaggagcatgtgttaaatcatatgagtaaaaaaaaagtagacattgaaaagaagacttgggaataattgggcagatagaatgggttccatggatcattctagttgccactagaaaatgtgagctccttcttcatttaccatgttgataatccggtggtgactttttttttttttttgtaaattgtattagataccccacaggaatgtgacaataataggatagctttgggggctggtgatttgaaacagggactattaagtagattttcccccatcctctaggttcctgtagtctgtgctcagaacttggtttttggcccctattgtttttgcctattttgattttcagagatgatcacatggggacagttaacttttcttctgctgtgttgccttaatgctactagattgtgttgtgttgttggagttttctgacttcttccctataaaaagatactgagagctccataatgaaagaagttgttatactttctcagaatattctggaccactgaatgcacttctaatagagctttaatctaaagaagttagttcagtggttattaactgattttattacaggagaaaaaaactttaacaaaaaggcagggagaaaagtgtgaagggcatcaagcaaaatgacaggggcttcaaaaaacaaccaaagacaaaaccctatcttctgaagaccaaaggtccaactttacttactggctggcacagcctttctgaactccttgagtttagaatagagctcctagaataataaggcggccaaatttaaagatcagtcaatacagtagggacctgctattgatctctcaggcactgagtcttcacatccagtgtcaagcccagcccagcatatggggtgatatgagcagaaaacacacatcggtgtgtcttgatttctcgcagctgtgtaatgtggcatgagaagtatgttttggtgccacatatttctcaatctgatgcctttttgtctttttttttttttgccatttgcatcctatttcatagtgccaaaatgaatttttgtatcttgtcttgtctttgtccattataaactggaggatcacagttaagccttccatgaattcatagtttggaatcatttaccttaccattattttggatttttttcttattacagtgtcactacactgtattcatgtgggggaacaaacatgtaggtgcttgaacatgccccacagacacagttgtagccctagtatttgtgacggtcattattgacacagtgcagactttgcagatggagcattatgctctcagaggactttaaaaatatgtatattaagcaattaactttctggagttggagttatcaaatcttgctgggaaattaacttccaagagctctgaattggatggaattccatctggcttcagagaacaatcagcctatatgaaacggagctttgaaatgtttttcttgtgcagaaatacgaactagaaagaaaagtgctgatctaatgctaagttttctctgtgtactgactcagttgccagaattataatgaaaactgtattttagtctaacaaatgtatagaattttttatgtaataaataaaattttataggaaagaat

SEQ ID NO: 19546 - protein, 46 aa, Homo sapiens
MWHEKYVLVPHISQSDAFLSFFFFAICILFHSAKMNFCILSCLCPL

SEQ ID NO: 19547 - DNA, 1421 bp, Homo sapiens
gctccttcttcatttaccatgttgataatccggtggtgactttttttttttttttgtaaattgtattagataccccacaggaatgtgacaataataggatagctttgggggctggtgatttgaaacagggactattaagtagattttcccccatcctctaggttcctgtagtctgtgctcagaacttggtttttggcccctattgtttttgcctattttgattttcagagatgatcacatggggacagttaacttttcttctgctgtgttgccttaatgctactagattgtgttgtgttgttggagttttctgacttcttccctataaaaagatactgagagctccataatgaaagaagttgttatactttctcagaatattctggaccactgaatgcacttctaatagagctttaatctaaagaagttagttcagtggttattaactgattttattacaggagaaaaaaactttaacaaaaaggcagggagaaaagtgtgaagggcatcaagcaaaatgacaggggcttcaaaaaacaaccaaagacaaaaccctatcttctgaagaccaaaggtccaactttacttactggctggcacagcctttctgaactccttgagtttagaatagagctcctagaataataaggcggccaaatttaaagatcagtcaatacagtagggacctgctattgatctctcaggcactgagtcttcacatccagtgtcaagcccagcccagcatatggggtgatatgagcagaaaacacacatcggtgtgtcttgatttctcgcagctgtgtaatgtgccatttgcatcctatttcatagtgccaaaatgaatttttgtatcttgtcttgtctttgtccattataaactggaggatcacagttaagccttccatgaattcatagtttggaatcatttaccttaccattattttggatttttttcttattacagtgtcactacactgtattcatgtgggggaacaaacatgtaggtgcttgaacatgccccacagacacagttgtagccctagtatttgtgacggtcattattgacacagtgcagactttgcagatggagcattatgctctcagaggactttaaaaatatgtatattaagcaattaactttctggagttggagttatcaaatcttgctgggaaattaacttccaagagctctgaattggatggaattccatctggcttcagagaacaatcagcctatatgaaacggagctttgaaatgtttttcttgtgcagaaatacgaactagaaagaaaagtgctgatctaatgctaagttttctctgtgtactgactcagttgccagaattataatgaaaactgtattttagtctaacaaatgtatagaattttttatgtaataaataaaattttataggaaagaat

SEQ ID NO: 19548 - protein, 55 aa, Homo sapiens
QKGREKSVKGIKQNDRGFKKQPKTKPYLLKTKGPTLLTGWHSLSELLEFRIELLE

SEQ ID NO: 19549 - DNA, 656 bp, Homo sapiens
gcaaccgcggcgtgactacggcgcgcgcggtctgggcgcggacgggtggggccgggcggtgccggtgcgggctggggcagtgcagtgagtagcggtcttggggtgtgcgatctcgctgagcctcctcacacggttcgtcgtctcgggttcgagcccagtgggcttagccactcgccatggactcccagaaagaagctctacagaggatcatttcaactctggcaaataaaaatgatgaaattcagaactttattgatacactacatcatacactaaaaggagttcaggaaaattcgtccaacatactctcagagttagatgaagaatttgatagtttatactctatactggatgaagtaaaagaaagtatgattaactgtatcaagcaggaacaagctcgtaaatcccaagagttacagagtcagattagtcaatgtaataatgccctggagaactctgaagaactattagaatttgcaacaaggtcattagatataaaggaacctgaagaattttcaaaggtacacaaaaactgcattaatacacttaacaagggaagttgtatttttaaaaaggcgtttttgtttttctttagttttggatttctttactgatttctaatactaataaagccttggggtttcttgataagtaaa

SEQ ID NO: 19550 - protein, 145 aa, Homo sapiens; identical to SEQ ID NO: 2431

SEQ ID NO: 19551 - DNA, 3733 bp, Homo sapiens
gaacctggtaagctcctggaggtaaaactcacaaatgtgtggggacactcctatgactgggtctccttggagctggactctcagacattctgctgtattccttaatccccaaagctccagagatagatccagtagagtgtttggtggcagataactctgtaacagtggcttggagaatgccagaagaagataataagattgaccattttatactggaacataggaagactaattttgatggacttccacgtgtaaaggatgagcgatgctgggagataattgataatattaagggtactgaatatacactatcaggcttaaaatttgattcaaagtatatgaatttcagagtgcgagcttgtaacaaggctgtggctggagagtattctgatccagtgactctagagaccaaagcacttaacttcaatttggataactcctcatcccatttgaacctgaaagttgaagatacatgtgtagagtgggatcctactggaggaaaaggtcaagaaagtaaaattaaaggaaaagagaacaagggcagaagtggtacaccatccccaaaacgaacatctgtaggctccaggccaccagcagtaagaggcagtagagatcgttttactggagaatcatacacagtgctgggagacactgctattgaaagtggacaacattattgggaggtcaaggcccagaaggattgtaaatcctacagtgtgggagtagcatacaaaacgttggggaaatttgaccaattgggaaagacaaacactagttggtgtatccatgtcaacaactggctacaaaacacatttgcagcaaagcataataataaagtcaaagctttggatgttactgttcctgaaaaaataggtgtattttgtgattttgatgggggtcaactttcattctatgatgcaaattctaaacagttgctatattcctttaagacaaaatttactcagccagtactacctggtttcatggtatggtgtggtggactttctttgagtactgggatgcaggttccaagtgctgtgagaacacttcagaaaagtgaaaatggaatgactggttcagctagcagcctgaacaatgttgttactcaatagtgtctactcagaatacgtttaccctccgtcttgattaggtggccttttctgtgcagttactaatcacaggaatttggtagtagtgaaaatcaggtttgctgtgttctgctttgaggcctggaatcttttatcattaaacacctagtacgaagcatttgcaggaacctactgtgcagtatcatagaagcaagcagataccaagcaaaaaactgatgattgaagagtaaatgggggaaaaggcagtgtttaattaacataaaaactcatttttgtatttcttggattactttgactattctaatgtttaattacatatggtaaccctaaggcctggggagaaaagcttttaaatcttgccttctttcttctgtactttgtctttttaaaatctcattactatctattatttagttctaacacagaagctttaaaaatacatagtcatccaaggttttctaaaaattgaaatcatatgttgggaatggtaaaaaggttttcaaatggtttatttttcctcttttataaataagttttacaaaattttcctcttttgtttattgactagattgtatataattttcttttttccaaaatattgtgataagaaatttctagacacaacagcttaaaatcacccaaatttcagttctttacctactgcactaacaatggcaaggggggtattctttatatgttgccttgtttaactacagttcttttcattccatcactttaggtgatgggtaagatttttgaaagccttatattttttgattttgttgtctagtttaatcctacctttaatagttgtgtttggtaaaattcccacttgaatgtgacactgataataattatgctgatttttagcatctcttataggaatcaaagtttattaaagttacatagaggattgaaaaatgtatatcactcaatttttatctaagaaggataggttataaagggaggtacctaaatactcaaataatgtatatattctttttcataacatatggaatgctttaagcaattgttttgaaaaaaatctgcgtatctttgacttaattggcacatgactttttcaagcagccattcattcagaggtttgttttctctcagtccttttgctacattcactttcttttcaaagaaatgttaattattacaaaaattgacatagatatctttcccaaacttggggtaaaacccatggttatgtggaacataactgttcttaaaaagtcaattataatttgtaactcacatcctttgagctaaactaaattaaaattacagtatttaataattctttgggcatttttaagaggtctgaatttgtatttttcttcatttttgaaactttacatttgttgactttttttcattctcatttaaaatatattgtgctatgataaccaaccttcttccaaggagtgaccattactgcctacatttgcgttgctttctacatagagacttgtataatagtattaatagtagctcattctctctaaaaatttactgcccactgataggatgttttgtttccttgataaaacaaatgtaaatgaggaattttatttgaattggaatattgtttttctagaggacattcatatctgcactattatctgatgacatgttggtaattttaaagactgcaaggcagtttagagaatgaagtaaaccaatagatactcttttgattctccaaagaaatataattttggtttttgttcctcagagagagtttgaaagaaattttcagatgttctgttccctatagagggcctattccaggatctaaatgaatgggaatttataattcctttcatagactcaaacctgaaagcagaaatttttagtagttgagttgctttaagtgaattttaacaaatatgacacagaaaaggtcagatgctgttgtataaaattttttactagtgtgtcttatataattctttcttctcattaattcagtgcctttttcctctaagcatactcttggtccatgccccatgcagtgtcaactgatgtttaagctacagagcattgttgtagtggtgagggccctctgttgcaggggcatggggaaatgcatatattaatcaggggctggaggagtatacatgattcttgtgttcatgttgtcatttgaaactcttcacataaaattttctaatattcatttggaaaacctctccactggagaggtttcatctctgagaggttttgtaataatagtgtaagttcagtaaatccagtccaaattctcatcacatgtattatttgatactaaattttcaattattacttcaaaataagagtctgaggatttcttcttactggcgttcttaaaggtctctaaaattaaagaacaagatgtggttttttgtttaagacgtttttagtttatttgttgttaagttaaactggagaaagtttgtcatcctcattttcaaactgaaaactaatcaaatatagtgcctatttagtctcaaaataaggtaactattaacttgattatactatataatattctcaattacatttgaatttaaaaatattgagctcttgattacaatttaatacattgtaaaaagtattaaatcctttgaaacatc

SEQ ID NO: 19552 - protein, 311 aa, Homo sapiens
MPEEDNKIDHFILEHRKTNFDGLPRVKDERCWEIIDNIKGTEYTLSGLKFDSKYMNFRVRACNKAVAGEYSDPVTLETKALNFNLDNSSSHLNLKVEDTCVEWDPTGGKGQESKIKGKENKGRSGTPSPKRTSVGSRPPAVRGSRDRFTGESYTVLGDTAIESGQHYWEVKAQKDCKSYSVGVAYKTLGKFDQLGKTNTSWCIHVNNWLQNTFAAKHNNKVKALDVTVPEKIGVFCDFDGGQLSFYDANSKQLLYSFKTKFTQPVLPGFMVWCGGLSLSTGMQVPSAVRTLQKSENGMTGSASSLNNVVTQ

SEQ ID NO: 19553 - DNA, 520 bp, Homo sapiens
cctttctgtttaagactagcttcgatagtcacaaaattttcaaagaacacatagtatatatgtaaaaaatgttgtcgaaaaactgtttaagatcaatagattctgcatttcgatgacgatgcgcaggtgcttgaggcgagtcagtgcgtccttcttggtgtctagcaccttctgggtggacttcttcacgtccccgtgcggcttcttggagaacatcctgccgctgccactgccactgccactgccactgccacagccggctcccagcggcagaaagtggagggagtggacggggaggagactagccagagaggctcattagctccccagccttgcgggccagggcagagccgactcctccccgatccaggccagggccgccacctccacccgcctcgcgccgcggctccaaggcaccttcggccccagctccaatatggcggatccctctcccggccctgcacggagcgaggtagacccgggctggccgcctgccgccgccgctcgtctccagcggccg

SEQ ID NO: 19554 - protein, 69 aa, Homo sapiens
MTMRRCLRRVSASFLVSSTFWVDFFTSPCGFLENILPLPLPLPLPLPQPAPSGRKWREWTGRRLAREAH

SEQ ID NO: 19555 - DNA, 5819 bp, Homo sapiens
gtattgatgaagaacatctcacagacattgaaatagttcgcagagttttttcttctaaaaggagtaatgtaaactttgtgacagagatatttcgtcaggcatttttattaccaatttgtgaagcagcagctatgagaaaagtggtaaaagtatatcaagaatggatccaacaagaggaaaaacctttgttcatgcaagagcctgaagaaattgtgatcacttcttcagacctcccttgcattgaaaatgtcacagaccatgatatttcaatggaagaaggagaaaaaagagaagaggaaaatgggaccaatactgctgatcatgttcgaaattccagttgggcaaaaaacggctcctaccaaggtgctcttcataacacctctgaagaagccacagaacaaaacatacgagctggtacccaggcagttttgcaggtgtttattataaactcatcaaatatatttcttcttgaacctgcaaatgaaataaaaaatcttctggatgaacacaaagcttttctacagttccaagggaaaaaaaatatgaccttggcaggtcgacttgcaggaccacttttccagacccttatagttgcctggatcaaagcaaacctaaatgtgtacatctcccgagaactttgggatgacttactgtcagtattgtcatcgttgacctattgggaagagttggccactgagtggtcactgactatggagacattaactaaagttttagctaggaatttatatagtttggatctcagtgatttaccattggataagctgagtgaacagaaacaaaaaaagcacaaagggaaaggagttggacatgaatttcagaaagtttcagttgacaagtcattttctagaggatggagtcgtgatcagcctggccaagccccaatgagacagaggagtgcaacaaccactggttctccaggaaccgaaaaggcgaggagtatagtacggcaaaaaactgtcgatattgatgatgctcaaatacttccccgctcaactagagtcagacatttttcacaaagtgaagaaactggaaatgaagtttttggtgctttgaatgaggagcagccattgccttgaagtagcagcacttctgacatcttggaaccattcactgttgaacgagccaaagtcaataaagaggacatgagccaaaaactgcctcctcttaatagtgatattggcagcagcagtgctaatgttcctgatctgatggatgagtttatagcagaatgacttcgaagtggtaatgcctcgactatgacaagaagaggaagtagtccaggcagcctggaaattcccaaagacctccctgatattctaaacaagcagaaccagatgcgccctattgatgacccaggtgtgccctcagaatggacttctcctgccagtgcagggagcagtgatcttatcagctcagatagtcattcggattctttcagcgctttccaatatgatggccaaaaatttgacaattttggctttggagccgacactggggttacgtcctctgctgatgtggattcaggttctggccatcatcagagtgctgaagagcaggaagtggctagtctaactactcttcatatagattctgaaacaagcagtcttaatcagcaagctttctctgctgaagttgcaactattactggttcagaaagtgcttccccagtccactcacctctgtgctccaggtcacagactccttccccttctacattgaatatagatcacatggaacagaaggatctgcagctcgatgagaagctccaccacgctgttcttcagacaccagatgatctagaaattagtgaatttccatcagaatgttgtagtgtgatggcaggaggtactctgactggatggcatgctgatgttgctactgtaatgtggcgaagaatgctaggcattttgggagatgtaaattcaatcatggatcctgaaatacatgctcaagtttttgattacctctgtgaactttggcagaatctagctaagattagagataacctcggcatttcagctgataacctgacctccccttctccaccagttttaattcctccactgagaattcttacaccttggctttttaaggcaaccatgttgactgataaatataaacaaggtaaattacatgcatataaacttattggtaatacaatgaaaagaagacaagatgtttctccaaatagagattttctaacacatttctacaatataatgcattgtggattacttcatattgaccaggatattgtcaatacaatcatcaaacactgctcacctcaatttttttcacttggtttgcctggtgccacaatgcttattatggattttattgtagcagctggtagagtggcttcttcagcttttctcaatgcaccaagagtagaagcacaagttcttctgggatctttggtttgctttcccaacttatattgtgaactgccttctcttcatcccaacattcctgatgttgctgtgtctcagtttacagatgttaaggaacttataatcaaaactgtattaagctcggcaagagatgagccctctggtcctgcacgatgtgtagcactttgtagtttaggtatttggatttgtgaagaactagtccatgagtctcatcatcctcaaattaaggaagctctgaatgtgatttgtgtttccttaaagtttactaataaaacagtagcccacgtagcttgtaacatgcttcacatgctggttcattatgtacctagacttcagatttaccagcctgattctcccttgaaaattattcagatcctaatagctaccatcacccatcttttaccaagtacagaggcttcatcttatgaaatggacaagaggttggtagtatctttacttctctgccttctggactggatcatggccttacctctaaagacactgctccaaccatttcatgctacgggagcagaaagcgataaaacagaaaaatctgttctcaattgcatttataaggttttacatgggtgtgtttatggagctcagtgttttagcaatccaaggtattttcccatgagcctctctgatttggcatctgtagattatgatccttttatgcatttggaaagtctgaaagagcctgagcctctgcgctctcctgactcagaacgatcttctaaactccagccagtaacagaagtgaaaactcaaatgcagcatggattaatctctatagcagcccgcactgttattacacatctggtaaatcacctgggccattatccaatgagcggtggtcctgctatgctaacaagtcaggtgtgtgaaaatcacgacaatcattacagtgaaagtactgaactttctcctgaactctttgagagtccaaatatccagttctttgtgttaataatacaaccttagtgtcctgtatccagatcagatcagaagagaatatgcctggaggaggtttatctgctggccttgcatcagccaattcaaatgtcagaatcatagtacgtgatctctctggaaaatattcatgggattctgctatactgtatggcccacctcctgtaagtggcttgtcagaacctacatctttcatgctttcattgtctcaccaagagaagccagaagagcctccgacatctaatgaatgcttagaagatataaccgtaaaagatggactttccagtttaaaagatttagagaaactgtaccaacttgggatacaataagagatgaagaagatgctcttgatgaactcttgcagtatttgggtgttactagtcctgaatgcttacagagaactggaatctcacttaatattcctgctccacaacctgtgtgcatttctgaaaaacaagaaagtgatgttattaatgctatccttaagcaacatacagaagaaaaagaatttgttgagaagcactttaatgacttaaacatgaaagctgtggaacaagatgaaccaatacctcaaaaacctcagtcagcattttattattgcagattgcttcttagtatattgggaatgaattcctgggacaaacggaggagctttcatctcctgaagaaaaatgaaaagctacttagagaacttaggaacttggattcaaggcagtgccgagagacacacaagattgcagtattttatgttgctgaaggacaagaagacaaacactccattctcaccaatacaggaggaagtcaagcatatgaagattttgtagctggtcttggtttggaggtaaatcttacaaaccattgtggttttatgggaggactacaaaaaaacaaaagcactggattgaccactccatattttgctacctctacagtagaagtaatatttcacatgtcaacaagaatgccttctgattctgatgattctttgaccaaaaaattgagacatttgggaaatgatgaagtgcacattgtttggtcagagcatactagagactacaggagaggaattattcccacagaatttggtgatgtccttattgtaatatatccaatgaaaaatcacatgttcagtattcagataatgagaaaaccagaggttcccttctttggtcccctttttgatggtgctattgtgaatggaaaggttctacccattatggttagagcaacagctataaatgcaagccgtgctctgaaatctctgattccattgtatcaaaacttctatgaggagagagcacgatacctgcaaacaattgtccagcaccacttagaaccaacaacatttgaagattttgcagcacaggttttttctccagctccctaccaccatttaccatctgatgccgatcattaaatatcagttctgtttatctgaaggctcctacccagagattctacccagtgaaactcccacagcagcgcaggtagatggggctgacctggcctctccaatgtctcctcgaactagcaaaagccgcatgtccatgaagctgcgtcgttcctctggctcagccaataaatcctaaggagacaagcagcccagcagtgatcagcagtagccaccttagcatgaacatagggttaaccctttcaggccttcatgtctgccataacatgcatgtttcttcctgtacatttatttgagaaaacactggatttaaataattttaaataatttgtagcttaatattaaagatttaagttatttattgtttcatttttttcccacaatccaagctgccatattttgagggcagggggagttttattctacaccctttaccttcctagataattatgtctaagtagttttatctttaatttcatggttaactgtgagccaaaatacaattggacaattagtctcattatttattgtgctccattgcaactttatggttcaataaatatataattttttacaaatgtaaaattttacatttaagcatttgtaaagttacagcaaaagatgtacctgttaatacacagaatgtgtacagattatttgttatgacaataaaacactcaaaataaatggtctttagcatctcaaattccaactgaaatcattttagtattaactcttcttcccaaagcaatgtctcatttcttggctgtgcaggtgatgccatgttatatccaataactagaaaaatcactgtgctgaacttttatgtttagcttccaagtatttttctaatgttttgcatttcaagtggtatcactgttaaatgccatttgttttcagattgtggccttttattattggctgctagatcctggtgtttctatgttcttttttaagcaccaaaaagaagatggggaagaaaagaaggaaaattttctgatata

SEQ ID NO: 19556 - protein, 321 aa, Homo sapiens
MRKVVKVYQEWIQQEEKPLFMQEPEEIVITSSDLPCIENVTDHDISMEEGEKREEENGTNTADHVRNSSWAKNGSYQGALHNTSEEATEQNIRAGTQAVLQVFIINSSNIFLLEPANEIKNLLDEHKAFLQFQGKKNMTLAGRLAGPLFQTLIVAWIKANLNVYISRELWDDLLSVLSSLTYWEELATEWSLTMETLTKVLARNLYSLDLSDLPLDKLSEQKQKKHKGKGVGHEFQKVSVDKSFSRGWSRDQPGQAPMRQRSATTTGSPGTEKARSIVRQKTVDIDDAQILPRSTRVRHFSQSEETGNEVFGALNEEQPLP

SEQ ID NO: 19557 - DNA, 3144 bp, Homo sapiens
tcaactttcattctatgatgcaaattctaaacagttgctatattcctttaagacaaaatttactcagccagtactacctggtttcatggtatggtgtggtggactttctttgagtactgggatgcaggttccaagtgctgtgagaacacttcagaaaagtgaaaatggaatgactggttcagctagcagcctgaacaatgttgttactcaatagtgtctactcagaatacgtttaccctccgtcttgattaggtggccttttctgtgcagttactaatcacaggaatttggtagtagtgaaaatcaggtttgctgtgttctgctttgaggcctggaatcttttatcattaaacacctagtacgaagcatttgcaggaacctactgtgcagtatcatagaagcaagcagataccaagcaaaaaactgatgattgaagagtaaatgggggaaaaggcagtgtttaattaacataaaaactcatttttgtatttcttggattactttgactattctaatgtttaattacatatggtaaccctaaggcctggggagaaaagcttttaaatcttgccttctttcttctgtactttgtctttttaaaatctcattactatctattatttagttctaacacagaagctttaaaaatacatagtcatccaaggttttctaaaaattgaaatcatatgttgggaatggtaaaaaggttttcaaatggtttatttttcctcttttataaataagttttacaaaattttcctcttttgtttattgactagattgtatataattttcttttttccaaaatattgtgataagaaatttctagacacaacagcttaaaatcacccaaatttcagttctttacctactgcactaacaatggcaaggggggtattctttatatgttgccttgtttaactacagttcttttcattccatcactttaggtgatgggtaagatttttgaaagccttatattttttgattttgttgtctagtttaatcctacctttaatagttgtgtttggtaaaattcccacttgaatgtgacactgataataattatgctgatttttagcatctcttataggaatcaaagtttattaaagttacatagaggattgaaaaatgtatatcactcaatttttatctaagaaggataggttataaagggaggtacctaaatactcaaataatgtatatattctttttcataacatatggaatgctttaagcaattgttttgaaaaaaatctgcgtatctttgacttaattggcacatgactttttcaagcagccattcattcagaggtttgttttctctcagtccttttgctacattcactttcttttcaaagaaatgttaattattacaaaaattgacatagatatctttcccaaacttggggtaaaacccatggttatgtggaacataactgttcttaaaaagtcaattataatttgtaactcacatcctttgagctaaactaaattaaaattacagtatttaataattctttgggcatttttaagaggtctgaatttgtatttttcttcatttttgaaactttacatttgttgactttttttcattctcatttaaaatatattgtgctatgataaccaaccttcttccaaggagtgaccattactgcctacatttgcgttgctttctacatagagacttgtataatagtattaatagtagctcattctctctaaaaatttactgcccactgataggatgttttgtttccttgataaaacaaatgtaaatgaggaattttatttgaattggaatattgtttttctagaggacattcatatctgcactattatctgatgacatgttggtaattttaaagactgcaaggcagtttagagaatgaagtaaaccaatagatactcttttgattctccaaagaaatataattttggtttttgttcctcagagagagtttgaaagaaattttcagatgttctgttccctatagagggcctattccaggatctaaatgaatgggaatttataattcctttcatagactcaaacctgaaagcagaaatttttagtagttgagttgctttaagtgaattttaacaaatatgacacagaaaaggtcagatgctgttgtataaaattttttactagtgtgtcttatataattctttcttctcattaattcagtgcctttttcctctaagcatactcttggtccatgccccatgcagtgtcaactgatgtttaagctacagagcattgttgtagtggtgagggccctctgttgcaggggcatggggaaatgcatatattaatcaggggctggaggagtatacatgattcttgtgttcatgttgtcatttgaaactcttcacataaaattttctaatattcatttggaaaacctctccactggagaggtttcatctctgagaggttttgtaataatagtgtaagttcagtaaatccagtccaaattctcatcacatgtattatttgatactaaattttcaattattacttcaaaataagagtctgaggatttcttcttactggcgttcttaaaggtctctaaaattaaagaacaagatgtggttttttgtttaagacgtttttagtttatttgttgttaagttaaactggagaaagtttgtcatcctcattttcaaactgaaaactaatcaaatatagtgcctatttagtctcaaaataaggtaactattaacttgattatactatataatattctcaattacatttgaatttaaaaatattgagctcttgattacaatttaatacattgtaaaaagtattaaatcctttgaaacatcttttgttgcttatttagtttttgtttctacaggtcaaacatgattgctttctataaaagaaatgcttgagaggttgactataatggatatgtcacaggtataaaacagttgttttctaaaaacatgcatttagtatggcattctcttttagcaactgaattcccaacgagttttattaagctggatatcgaaatgaaggagctgccttaagcactttagaaaaagaatttttttacaattcattttgactctcatggctgaccatgtcattatgtctttaaattttggtaaatatgtagataccaagca

SEQ ID NO: 19558 - protein, 42 aa, Homo sapiens
MVWCGGLSLSTGMQVPSAVRTLQKSENGMTGSASSLNNVVTQ

SEQ ID NO: 19559 - DNA, 632 bp, Homo sapiens
cggctttcctgtgactcttgtcgcatcctcaccgccagaagttcactgagccctggcgattcctcgcttttataatctagccacttagccaaagcccttttttatctcttgcctaattgacaactacagcagcgcactgaggcaatctgagagtttaagttctgaaacgctttcgacagcggaagatgaactggaggcagcagctgagccgttttccaagcccgttaaatgtgaacttctgataaacgagtggtttttttaaaatttcctatgcacatacaagcttactgttgaagtcctctcatccaatgcactcagaacgggactgtaagtccagctgctgtgtatcatcacctcagcccgattggtcctcggccacacttcacttcagcttctgataggtcctgggccaagctaagcagcatctatgaatcatttcacctcctgactggtcccgggccaagccgagtcacgcattcgccaagacagcccccagactaagcacattccttccccttccgtccataaaaacctggaccccagcctcatgatgggcactcccgttcgggaccccctctctgctggcagagagctttcttctttcaccttattaaactttcactctaacctca

SEQ ID NO: 19560 - protein, 68 aa, Homo sapiens
SPLIQCTQNGTVSPAAVYHHLSPIGPRPHFTSASDRSWAKLSSIYESFHLLTGPGPSRVTHSPRQPPD

SEQ ID NO: 19561 - DNA, 404 bp, Homo sapiens
acgttcccacggtccagccccagcctcggctttcctgtgactcttgtcgcatcctcaccgccagaagttcactgagccctggcgattcctcgcttttataatctagccacttagccaaagcccttttttatctcttgcctaattgacaactacagcagcgcactgaggcaatctgagagtttaagttctgaaacgctttcgacagcggaagatgaactggaggcagcagctgagccgttttccaagcccgttaaatgtgaacttctgataaacgagtggtttttttaaaatttcctatgcacatacaagcttactgttgaagtcctctcatccaatgcactcagaacggcttaagcctgccacaggggcctatcatgcatgcatgtggacaactcagtctgcac

SEQ ID NO: 19562 - protein, 57 aa, Homo sapiens
PKPFFISCLIDNYSSALRQSESLSSETLSTAEDELEAAAEPFSKPVKCELLINEWFF

SEQ ID NO: 19563 - DNA, 7364 bp, Homo sapiens
gtaaagcggagcggctgcagcctgctgttgagtgagaaaacaaaattatcttcctttccaaatccaaaaagatgaaaacgactgagatactttcaaaagacaaccaagtgagcagcacagactaatgagtagaatcaataagaacgtggttttggcccttttaacgctgacaagttctgcatttctgctgtttcagttgtactactacaagcactatttatcaacaaagaatggagctggtttgtcaaaatccaaaggaagccgaattggatttgatagcacacagtggcgtgcagttaaaaaatttattatgttaacatccaaccaaaatgtaccagtgtttcttattgatcctttgatactggaattgattaataagaactttgaacaagtcaaaaatacttctcatggctctacttcacaatgcaagtttttctgtgttccaagagactttactgcatttgcactgcagtatcacctatggaagaatgaggaaggctggtttcggatagctgagaatatgggatttcagtgcctaaagattgagagtaaagatccccggctagacgggatagactcactctctggaactgaaatccccctgcactatatctgcaaactggccactcatgcgatccacttggtagtctttcatgagaggagtggcaactacctctggcacggccacttgagacttaaagaacacattgacaggaaatttgttcccttccgaaagttacagtttggtcgttatccaggagcttttgacaggccagagttacagcaagttactgttgatggactggaagttctcattccaaaggatccaatgcactttgtagaagaagtaccacactctaggtttattgagtgtaggtataaagaagctcgagcattctttcagcagtaccttgatgataacactgtggaagctgtggcctttcggaagagtgcaaaggaattactgcaactagcagcgaaaacattaaacaaattgggagtaccattctggctgagcagtggaacttgtctaggatggtatcgacaatgcaacattattccttatagcaaagatgttgacctaggaatttttatacaagattacaaatctgatattattttagcatttcaggatgcaggacttccgctcaaacacaaatttgggaaggtagaagacagcttggaactatccttccagggaaaagatgatgtaaaacttgatgtttttttcttctatgaagaaactgatcacatgtggaatggaggcactcaggccaaaacaggaaaaaaattcaaatacctgtttccgaagtttacactgtgctggactgagtttgtagacatgaaggtccatgtaccctgtgaaaccctcgaatacattgaagccaactatggtaagacctggaagattcctgtaaagacgtgggactggaagcgctctcctcccaatgtgcaacccaatggaatctggcctatttctgagtgggatgaggttatccagttatattgagatagtaggttgaaatgggagaatttctcttttggaaaaaaaggtagataactgtttaaaaaatacatgtctatttgtcaaacataagtgggaaccaaagaaaaaatgtgacaagtttgaagacacagaaagagtcatctgatgtaattctctcacttagtactgaggaattttcatgtgccacatacaatgctaggttacagtggagaagcctagatgaatgagacaaatacctacttcttttattcctccttttggtaaacaactcaattttcctttgagggaaccctcccccaccctttgaagagttcaagttctgtacaggtttttaaaacgtgaagtaatgtttgaactggaagatgagctcaccaggcaaagctaaggaaggatatactagttgaaaagaataacccactcctcttctgggcatttaagctggtatgttagtgctacttttaagattgtggagtctgagttaatattcaagtgatcagactttgagtgacatcaagaaaagatgatatcaggttcatttttcaactaatcttatgtggaattgaattagagaacaaggcattattcttttagggaaggtgagagcttatttgtatcagagcttattacttgtcaggataagtaaatttctgtacatgtactgttttcatatgtgaagtgagaagaaactttatgcttgtttaatgcttaaatttccatccattgtgagaatattttcactgacctctgatggcacttgttgacaaatcattcaagtgagaccatgttactagacatgatcttgaaagaggccatgatttcacaaaactcatttttattttattctcagacagtctgttaggtaaaaatatgagaaattcatgtacattttatattttctgaatttataatctgtgcactcccaattttaatgacactaaaatattaatagaattttttaaatatactctaatttttaaaacatactctttattatcttcatttatcaattacagcttcgtatctctaatttatggtctatataccaatttaaatggcatgtaaacctgcctgtttcttctcctcttctaatatatcagatctccaaaatggaagctaaatggtggacttgacaactattcaccctacctcagatcatagagtttgtaaagtttgtgtccctccccagtttttcagtctgttgaatgtcgatggggcaagaactcagacttctactttaccaagtaccacacactctggaatgctttagtttccttttcccctcaagatgtctgagtcagctaggatgctgtttaccccatctctctcttatatcacttgaatgatatattgtaagtgagaggtaaaggaaaatgtaggcacaataagcactgctatttttctctttgtctaggaaaggaagctgaatcttatatcttatctatgctatttaggactactttctggagcttggcagattttcctctgacaccagagaacaatagtagtctcaagaatggaaacctgaatgtctgagggaatgggctggtagactttttcgaaaacaaattagagaaagtaacttacaaccacccattccggatttgtaaagcaacatgaaaacctttgataaatgataaccaacagtcttctgtcctaatttgcattctcaatgcagaattattgggtctttcataaataacatgagtggtttctggagacatttaagattgtcagcaaacttgtcccaaaatggcacatcatcataatccattttctctttgctagaaaatcagcccatagagtgcattcccaaattctaaatagctgaccctaaattcatttttcatgcttaaaaataatagaacaaataataatactatttttgggcaaaatccaccctacttgatgaggaccatttgcttgtgctcagtatttagaaatgcatacactccacatttctccccatttccaattgggactcccattctttgccaggagatcttacccatcccttttcagattaatcttttatcctttcctgaagtacaaagtcttaagagtgtctgaaatccaagacatcttggcccaattgacacaggttctatattcttccctacatagaccactggctgctgaaatacttttcttgtcttctggtttcacaggcttcagctcatgggttccaccctaacttggggaaacaaaagccttctctagaatctgaaggccaggcttacctctgattctgattcatccatacttcatcttatgtattttaacagttgggttctgtggagtgtccagagaccttgggttaggtatatccatcttcagtacctcattggatcacttttctttcatcacttgagtattctagcagtcattctcctaatctgaccactttcaggtttagtttacctggcttacctggggaagttgacaacttgttggtagttaggcacccatgaatgtctccagagacatcctgagaggcaagattcctcttaattgataaccaggacaaccaggtagtcacccagtcctctctaagcagggagcacttgtccttctctcctctgctgcagctactgatatctggcccctggaataaaaccatagttcctaaaattgagcatccctaagagtagctgcttggtgggacagctgatttctttgattccctagctgcaaaacctgaaattgaccactaggtgacagaatgtttgccagtatccccacaaaacaagttaaaacttaagtgaaaatcattctgcttttgaatcttaaaagctagaaaaaccataatgtaatattctttttaaaccctcttattttataactaaataaataatcacagaaaagaatgatctgaacaagaacagctgaggctaaaacccaagactgccgtgactcctagtccaatgtctgtttcgcatcacaacacagtatctttaacagtgcttgagatgcttaacagagaaggcatccagtgcttcattgaggctaagtctcagggtgtttctgccgcttagtatctttttgttcagattgagaacctaaggcgacagagaggtcaaggggaagtattttctagttcagaattcagaattcttaggcaaccttcatacctttatctggaaaatgccttctctccagacaataagacagttcacatctggagacatcagcctttggtacctaattctctaagctcaagatgcatcccattgccactttaccattctatttcccaagggaaccatcagcaccaacctgctaaatgcctgtatttgaagtctctccccttcctgaagtgaccttttatgaggctctttccttcctaagggacctttccctggtagtagtggtctcattcacaaaaaagaataatagatgtaactggagtcactttgcagttttcaagattttttttttatctgcttggctggaaaggagactagagtatctagtttttagtatttaaactacttttaattatttatattgatactctctgataaatgcaggtagttaagaatagattgtactcattcctttttgagtttgtgacctcaaaccattgtttttattcttacacgactacagtacttcaaatggcacatagataggcaggatattacataggtaagcaggaatttatacattgggtaccagagctaaatctggaaaacacatttggaatgagcttccacacttcagtctaaaatctcacccaaacttatggctacatatttttctaagtttcccccctagtttcactttctggaaagtgaacagttttttaaatcctaaatgttataaatccttaggagaaatattccctcaaaacctagtcaagaaagtgccacattcccaccttctaacaggtaattattagttgtaatagctttaatgcatggaaaaacttcagttactgaccagtcaagagaatttctcaagaaaaatcccagcaacgttccctctttcctccttgtcttccactatcattaagacctgggctagatcacctctaacatctcactcagggaaggcaatgtgttgccataaaaagaccacaagcttttgagttaggcctgaatttgaatttcagcttaatcatgtgggatttatggtgggggccctttcagtctcaatttccacattagtgaactggggaaatgatacatacttctaagggtttttagggggattaaatgaagtatacagttcttagcctcaggcctaggattaagtaagtactcaagaaatgtgcaattttctagttccatgtttcttttctaatcttcaaatggaattatagaaaccatgggtcagaacatattcctttactcaaaagattgcatgactgaatttgcttaagaaaaaaaaaattgtatcaagtcattaatacaattatacattaattatattacattaatacaatatatggtttgtgaattcagagacattaccagtttgcctccttctctcaatagaacttgtattttcattttcttggttaagcagttgtctcctaatattatcccatatgctacctagtttgctggtcccaagcagtttactgtacttcactagatttggtacctgctctcccctggacttctttttcaatattctagcctttcctagatgtaaatctttacctccttgttagtgaaattagatataagccatgatttggagagggaagaaatctggaatacttaatttcatttaattatctatgctgatgaatgcctgtatcattgttaataaaggagaattgaaaatactcatttctactttctgccctcaaatttctgtttctatctcaactaggcaagaatcagcagggtgcatgatgccattttaagctgcttcacatcagactgaaatcctaattacagttcataagtgaaacagactaattcaatggcaataccttttgtataggtcctgtgcttaaaggaggcaagtataaattttctaataagaaatccctgcttcttttgggtgcagtggctcacacctgtaataccagcagtttgagaagctaaggcaggtggatcacttgaggccaggagttcgagaccagcctggccaacatagtgaaaccccgtctcttctaaaaatacaaaaaaattagctgggcatggtggtgcacgcctatagtcccagctacacaggaggctgaggcaggagaatcacttgaacccgggaagcagagtctgcagtgagccaagatcgcggcattgcacttcagcctgggcgatagagcaagactctgtctcagaaaaaaaaaaaaaggaaagaaagaaatctctgcttccgtactatcaaaacttctaccctagaataccccctggcaccttctaacccaacctaatacagagattttgtagggacccattaacaagctcctatataattataagcagctctcacagtagggttgaaagagaatataaggaaaattagaagtactgtatttttgctattggaaatgaaatattgtttcatgcacctttgaaaaaaataacaggattttacagccttctgatgattcattcaaagcatggggaatagttcatatgtttgttaaatgaaaatcttatgtagctatttgtgtgtccctcccacttcataactacaaaaacatatatatgaatttctaaacaaagtgatattttaaagatgaattgattcaatgtgtacttaccagtttactgtgtggttttatcttcaggtacagatagtttgtggtactacttgaaaatacctttaatattattttcatcagaatttgtaatatataatccagtttgggatgatgaataaaatttttctaatctcttga

SEQ ID NO: 19564 - protein, 461 aa, Homo sapiens
MSRINKNVVLALLTLTSSAFLLFQLYYYKHYLSTKNGAGLSKSKGSRIGFDSTQWRAVKKFIMLTSNQNVPVFLIDPLILELINKNFEQVKNTSHGSTSQCKFFCVPRDFTAFALQYHLWKNEEGWFRIAENMGFQCLKIESKDPRLDGIDSLSGTEIPLHYICKLATHAIHLVVFHERSGNYLWHGHLRLKEHIDRKFVPFRKLQFGRYPGAFDRPELQQVTVDGLEVLIPKDPMHFVEEVPHSRFIECRYKEARAFFQQYLDDNTVEAVAFRKSAKELLQLAAKTLNKLGVPFWLSSGTCLGWYRQCNIIPYSKDVDLGIFIQDYKSDIILAFQDAGLPLKHKFGKVEDSLELSFQGKDDVKLDVFFFYEETDHMWNGGTQAKTGKKFKYLFPKFTLCWTEFVDMKVHVPCETLEYIEANYGKTWKIPVKTWDWKRSPPNVQPNGIWPISEWDEVIQLY

SEQ ID NO: 19565 - DNA, 7454 bp, Homo sapiens
aaagcggagcggctgcagcctgctgttgagtgagattgaaaggaaacacactgaatgaggaaaaactaacatacggtcatcaacatccttgtataacctagtttttaaaaaaattggatttcaaagaaaacaaaattatcttcctttccaaatccaaaaagatgaaaacgactgagatactttcaaaagacaaccaagtgagcagcacagactaatgagtagaatcaataagaacgtggttttggcccttttaacgctgacaagttctgcatttctgctgtttcagttgtactactacaagcactatttatcaacaaagaatggagctggtttgtcaaaatccaaaggaagccgaattggatttgatagcacacagtggcgtgcagttaaaaaatttattatgttaacatccaaccaaaatgtaccagtgtttcttattgatcctttgatactggaattgattaataagaactttgaacaagtcaaaaatacttctcatggctctacttcacaatgcaagtttttctgtgttccaagagactttactgcatttgcactgcagtatcacctatggaagaatgaggaaggctggtttcggatagctgagaatatgggatttcagtgcctaaagattgagagtaaagatccccggctagacgggatagactcactctctggaactgaaatccccctgcactatatctgcaaactggccactcatgcgatccacttggtagtctttcatgagaggagtggcaactacctctggcacggccacttgagacttaaagaacacattgacaggaaatttgttcccttccgaaagttacagtttggtcgttatccaggagcttttgacaggccagagttacagcaagttactgttgatggactggaagttctcattccaaaggatccaatgcactttgtagaagaagtaccacactctaggtttattgagtgtaggtataaagaagctcgagcattctttcagcagtaccttgatgataacactgtggaagctgtggcctttcggaagagtgcaaaggaattactgcaactagcagcgaaaacattaaacaaattgggagtaccattctggctgagcagtggaacttgtctaggatggtatcgacaatgcaacattattccttatagcaaagatgttgacctaggaatttttatacaagattacaaatctgatattattttagcatttcaggatgcaggacttccgctcaaacacaaatttgggaaggtagaagacagcttggaactatccttccagggaaaagatgatgtaaaacttgatgtttttttcttctatgaagaaactgatcacatgtggaatggaggcactcaggccaaaacaggaaaaaaattcaaatacctgtttccgaagtttacactgtgctggactgagtttgtagacatgaaggtccatgtaccctgtgaaaccctcgaatacattgaagccaactatggtaagacctggaagattcctgtaaagacgtgggactggaagcgctctcctcccaatgtgcaacccaatggaatctggcctatttctgagtgggatgaggttatccagttatattgagatagtaggttgaaatgggagaatttctcttttggaaaaaaaggtagataactgtttaaaaaatacatgtctatttgtcaaacataagtgggaaccaaagaaaaaatgtgacaagtttgaagacacagaaagagtcatctgatgtaattctctcacttagtactgaggaattttcatgtgccacatacaatgctaggttacagtggagaagcctagatgaatgagacaaatacctacttcttttattcctccttttggtaaacaactcaattttcctttgagggaaccctcccccaccctttgaagagttcaagttctgtacaggtttttaaaacgtgaagtaatgtttgaactggaagatgagctcaccaggcaaagctaaggaaggatatactagttgaaaagaataacccactcctcttctgggcatttaagctggtatgttagtgctacttttaagattgtggagtctgagttaatattcaagtgatcagactttgagtgacatcaagaaaagatgatatcaggttcatttttcaactaatcttatgtggaattgaattagagaacaaggcattattcttttagggaaggtgagagcttatttgtatcagagcttattacttgtcaggataagtaaatttctgtacatgtactgttttcatatgtgaagtgagaagaaactttatgcttgtttaatgcttaaatttccatccattgtgagaatattttcactgacctctgatggcacttgttgacaaatcattcaagtgagaccatgttactagacatgatcttgaaagaggccatgatttcacaaaactcatttttattttattctcagacagtctgttaggtaaaaatatgagaaattcatgtacattttatattttctgaatttataatctgtgcactcccaattttaatgacactaaaatattaatagaattttttaaatatactctaatttttaaaacatactctttattatcttcatttatcaattacagcttcgtatctctaatttatggtctatataccaatttaaatggcatgtaaacctgcctgtttcttctcctcttctaatatatcagatctccaaaatggaagctaaatggtggacttgacaactattcaccctacctcagatcatagagtttgtaaagtttgtgtccctccccagtttttcagtctgttgaatgtcgatggggcaagaactcagacttctactttaccaagtaccacacactctggaatgctttagtttccttttcccctcaagatgtctgagtcagctaggatgctgtttaccccatctctctcttatatcacttgaatgatatattgtaagtgagaggtaaaggaaaatgtaggcacaataagcactgctatttttctctttgtctaggaaaggaagctgaatcttatatcttatctatgctatttaggactactttctggagcttggcagattttcctctgacaccagagaacaatagtagtctcaagaatggaaacctgaatgtctgagggaatgggctggtagactttttcgaaaacaaattagagaaagtaacttacaaccacccattccggatttgtaaagcaacatgaaaacctttgataaatgataaccaacagtcttctgtcctaatttgcattctcaatgcagaattattgggtctttcataaataacatgagtggtttctggagacatttaagattgtcagcaaacttgtcccaaaatggcacatcatcataatccattttctctttgctagaaaatcagcccatagagtgcattcccaaattctaaatagctgaccctaaattcatttttcatgcttaaaaataatagaacaaataataatactatttttgggcaaaatccaccctacttgatgaggaccatttgcttgtgctcagtatttagaaatgcatacactccacatttctccccatttccaattgggactcccattctttgccaggagatcttacccatcccttttcagattaatcttttatcctttcctgaagtacaaagtcttaagagtgtctgaaatccaagacatcttggcccaattgacacaggttctatattcttccctacatagaccactggctgctgaaatacttttcttgtcttctggtttcacaggcttcagctcatgggttccaccctaacttggggaaacaaaagccttctctagaatctgaaggccaggcttacctctgattctgattcatccatacttcatcttatgtattttaacagttgggttctgtggagtgtccagagaccttgggttaggtatatccatcttcagtacctcattggatcacttttctttcatcacttgagtattctagcagtcattctcctaatctgaccactttcaggtttagtttacctggcttacctggggaagttgacaacttgttggtagttaggcacccatgaatgtctccagagacatcctgagaggcaagattcctcttaattgataaccaggacaaccaggtagtcacccagtcctctctaagcagggagcacttgtccttctctcctctgctgcagctactgatatctggcccctggaataaaaccatagttcctaaaattgagcatccctaagagtagctgcttggtgggacagctgatttctttgattccctagctgcaaaacctgaaattgaccactaggtgacagaatgtttgccagtatccccacaaaacaagttaaaacttaagtgaaaatcattctgcttttgaatcttaaaagctagaaaaaccataatgtaatattctttttaaaccctcttattttataactaaataaataatcacagaaaagaatgatctgaacaagaacagctgaggctaaaacccaagactgccgtgactcctagtccaatgtctgtttcgcatcacaacacagtatctttaacagtgcttgagatgcttaacagagaaggcatccagtgcttcattgaggctaagtctcagggtgtttctgccgcttagtatctttttgttcagattgagaacctaaggcgacagagaggtcaaggggaagtattttctagttcagaattcagaattcttaggcaaccttcatacctttatctggaaaatgccttctctccagacaataagacagttcacatctggagacatcagcctttggtacctaattctctaagctcaagatgcatcccattgccactttaccattctatttcccaagggaaccatcagcaccaacctgctaaatgcctgtatttgaagtctctccccttcctgaagtgaccttttatgaggctctttccttcctaagggacctttccctggtagtagtggtctcattcacaaaaaagaataatagatgtaactggagtcactttgcagttttcaagattttttttttatctgcttggctggaaaggagactagagtatctagtttttagtatttaaactacttttaattatttatattgatactctctgataaatgcaggtagttaagaatagattgtactcattcctttttgagtttgtgacctcaaaccattgtttttattcttacacgactacagtacttcaaatggcacatagataggcaggatattacataggtaagcaggaatttatacattgggtaccagagctaaatctggaaaacacatttggaatgagcttccacacttcagtctaaaatctcacccaaacttatggctacatatttttctaagtttcccccctagtttcactttctggaaagtgaacagttttttaaatcctaaatgttataaatccttaggagaaatattccctcaaaacctagtcaagaaagtgccacattcccaccttctaacaggtaattattagttgtaatagctttaatgcatggaaaaacttcagttactgaccagtcaagagaatttctcaagaaaaatcccagcaacgttccctctttcctccttgtcttccactatcattaagacctgggctagatcacctctaacatctcactcagggaaggcaatgtgttgccataaaaagaccacaagcttttgagttaggcctgaatttgaatttcagcttaatcatgtgggatttatggtgggggccctttcagtctcaatttccacattagtgaactggggaaatgatacatacttctaagggtttttagggggattaaatgaagtatacagttcttagcctcaggcctaggattaagtaagtactcaagaaatgtgcaattttctagttccatgtttcttttctaatcttcaaatggaattatagaaaccatgggtcagaacatattcctttactcaaaagattgcatgactgaatttgcttaagaaaaaaaaaattgtatcaagtcattaatacaattatacattaattatattacattaatacaatatatggtttgtgaattcagagacattaccagtttgcctccttctctcaatagaacttgtattttcattttcttggttaagcagttgtctcctaatattatcccatatgctacctagtttgctggtcccaagcagtttactgtacttcactagatttggtacctgctctcccctggacttctttttcaatattctagcctttcctagatgtaaatctttacctccttgttagtgaaattagatataagccatgatttggagagggaagaaatctggaatacttaatttcatttaattatctatgctgatgaatgcctgtatcattgttaataaaggagaattgaaaatactcatttctactttctgccctcaaatttctgtttctatctcaactaggcaagaatcagcagggtgcatgatgccattttaagctgcttcacatcagactgaaatcctaattacagttcataagtgaaacagactaattcaatggcaataccttttgtataggtcctgtgcttaaaggaggcaagtataaattttctaataagaaatccctgcttcttttgggtgcagtggctcacacctgtaataccagcagtttgagaagctaaggcaggtggatcacttgaggccaggagttcgagaccagcctggccaacatagtgaaaccccgtctcttctaaaaatacaaaaaaattagctgggcatggtggtgcacgcctatagtcccagctacacaggaggctgaggcaggagaatcacttgaacccgggaagcagagtctgcagtgagccaagatcgcggcattgcacttcagcctgggcgatagagcaagactctgtctcagaaaaaaaaaaaaaggaaagaaagaaatctctgcttccgtactatcaaaacttctaccctagaataccccctggcaccttctaacccaacctaatacagagattttgtagggacccattaacaagctcctatataattataagcagctctcacagtagggttgaaagagaatataaggaaaattagaagtactgtatttttgctattggaaatgaaatattgtttcatgcacctttgaaaaaaataacaggattttacagccttctgatgattcattcaaagcatggggaatagttcatatgtttgttaaatgaaaatcttatgtagctatttgtgtgtccctcccacttcataactacaaaaacatatatatgaatttctaaacaaagtgatattttaaagatgaattgattcaatgtgtacttaccagtttactgtgtggttttatcttcaggtacagatagtttgtggtactacttgaaaatacctttaatattattttcatcagaatttgtaatatataatccagtttgggatgatgaataaaatttttctaatctcttga

SEQ ID NO: 19566 - protein, 461 aa, Homo sapiens; identical to SEQ ID NO: 19564

SEQ ID NO: 19567 - DNA, 522 bp, Homo sapiens
agattgaaaggaaacacactgaatgaggaaaaactaacatacggtcatcaacatccttgtataacctagtttttaaaaaaattggatttcaaagctggagaacaaaagacatataaaccttagatatcaagcataagagaggtgtcagtatatttgaaggattgaaggaataaatgtaagcatttgaagaactaaatgtgtttaaccaaaatcaaacagtggagacaagaaaacaaaattatcttcctttccaaatccaaaaagatgaaaacgactgagatactttcaaaagacaaccaattgtactactacaagcactatttatcaacaaagaatggagctggtttgtcaaaatccaaaggaagccgaattggatttgatagcacacagtgggtatgtagaataaacaagaaatttctcaattataatgttcatttagttcattcatttactccgtaagtatttgttgaatgatggcaataataatagctaccttgtgtggtgggtggccggttggtagtg

SEQ ID NO: 19568 - protein, 87 aa, Homo sapiens
MCLTKIKQWRQENKIIFLSKSKKMKTTEILSKDNQLYYYKHYLSTKNGAGLSKSKGSRIGFDSTQWVCRINKKFLNYNVHLVHSFTP

SEQ ID NO: 19569 - DNA, 7557 bp, Homo sapiens
agattgaaaggaaacacactgaatgaggaaaaactaacatacggtcatcaacatccttgtataacctagtttttaaaaaaattggatttcaaagctggagaacaaaagacatataaaccttagatatcaagcataagagaggtgtcagtatatttgaaggattgaaggaataaatgtaagcatttgaagaactaaatgtgtttaaccaaaatcaaacagtggagacaagaaaacaaaattatcttcctttccaaatccaaaaagatgaaaacgactgagatactttcaaaagacaaccaagtgagcagcacagactaatgagtagaatcaataagaacgtggttttggcccttttaacgctgacaagttctgcatttctgctgtttcagttgtactactacaagcactatttatcaacaaagaatggagctggtttgtcaaaatccaaaggaagccgaattggatttgatagcacacagtggcgtgcagttaaaaaatttattatgttaacatccaaccaaaatgtaccagtgtttcttattgatcctttgatactggaattgattaataagaactttgaacaagtcaaaaatacttctcatggctctacttcacaatgcaagtttttctgtgttccaagagactttactgcatttgcactgcagtatcacctatggaagaatgaggaaggctggtttcggatagctgagaatatgggatttcagtgcctaaagattgagagtaaagatccccggctagacgggatagactcactctctggaactgaaatccccctgcactatatctgcaaactggccactcatgcgatccacttggtagtctttcatgagaggagtggcaactacctctggcacggccacttgagacttaaagaacacattgacaggaaatttgttcccttccgaaagttacagtttggtcgttatccaggagcttttgacaggccagagttacagcaagttactgttgatggactggaagttctcattccaaaggatccaatgcactttgtagaagaagtaccacactctaggtttattgagtgtaggtataaagaagctcgagcattctttcagcagtaccttgatgataacactgtggaagctgtggcctttcggaagagtgcaaaggaattactgcaactagcagcgaaaacattaaacaaattgggagtaccattctggctgagcagtggaacttgtctaggatggtatcgacaatgcaacattattccttatagcaaagatgttgacctaggaatttttatacaagattacaaatctgatattattttagcatttcaggatgcaggacttccgctcaaacacaaatttgggaaggtagaagacagcttggaactatccttccagggaaaagatgatgtaaaacttgatgtttttttcttctatgaagaaactgatcacatgtggaatggaggcactcaggccaaaacaggaaaaaaattcaaatacctgtttccgaagtttacactgtgctggactgagtttgtagacatgaaggtccatgtaccctgtgaaaccctcgaatacattgaagccaactatggtaagacctggaagattcctgtaaagacgtgggactggaagcgctctcctcccaatgtgcaacccaatggaatctggcctatttctgagtgggatgaggttatccagttatattgagatagtaggttgaaatgggagaatttctcttttggaaaaaaaggtagataactgtttaaaaaatacatgtctatttgtcaaacataagtgggaaccaaagaaaaaatgtgacaagtttgaagacacagaaagagtcatctgatgtaattctctcacttagtactgaggaattttcatgtgccacatacaatgctaggttacagtggagaagcctagatgaatgagacaaatacctacttcttttattcctccttttggtaaacaactcaattttcctttgagggaaccctcccccaccctttgaagagttcaagttctgtacaggtttttaaaacgtgaagtaatgtttgaactggaagatgagctcaccaggcaaagctaaggaaggatatactagttgaaaagaataacccactcctcttctgggcatttaagctggtatgttagtgctacttttaagattgtggagtctgagttaatattcaagtgatcagactttgagtgacatcaagaaaagatgatatcaggttcatttttcaactaatcttatgtggaattgaattagagaacaaggcattattcttttagggaaggtgagagcttatttgtatcagagcttattacttgtcaggataagtaaatttctgtacatgtactgttttcatatgtgaagtgagaagaaactttatgcttgtttaatgcttaaatttccatccattgtgagaatattttcactgacctctgatggcacttgttgacaaatcattcaagtgagaccatgttactagacatgatcttgaaagaggccatgatttcacaaaactcatttttattttattctcagacagtctgttaggtaaaaatatgagaaattcatgtacattttatattttctgaatttataatctgtgcactcccaattttaatgacactaaaatattaatagaattttttaaatatactctaatttttaaaacatactctttattatcttcatttatcaattacagcttcgtatctctaatttatggtctatataccaatttaaatggcatgtaaacctgcctgtttcttctcctcttctaatatatcagatctccaaaatggaagctaaatggtggacttgacaactattcaccctacctcagatcatagagtttgtaaagtttgtgtccctccccagtttttcagtctgttgaatgtcgatggggcaagaactcagacttctactttaccaagtaccacacactctggaatgctttagtttccttttcccctcaagatgtctgagtcagctaggatgctgtttaccccatctctctcttatatcacttgaatgatatattgtaagtgagaggtaaaggaaaatgtaggcacaataagcactgctatttttctctttgtctaggaaaggaagctgaatcttatatcttatctatgctatttaggactactttctggagcttggcagattttcctctgacaccagagaacaatagtagtctcaagaatggaaacctgaatgtctgagggaatgggctggtagactttttcgaaaacaaattagagaaagtaacttacaaccacccattccggatttgtaaagcaacatgaaaacctttgataaatgataaccaacagtcttctgtcctaatttgcattctcaatgcagaattattgggtctttcataaataacatgagtggtttctggagacatttaagattgtcagcaaacttgtcccaaaatggcacatcatcataatccattttctctttgctagaaaatcagcccatagagtgcattcccaaattctaaatagctgaccctaaattcatttttcatgcttaaaaataatagaacaaataataatactatttttgggcaaaatccaccctacttgatgaggaccatttgcttgtgctcagtatttagaaatgcatacactccacatttctccccatttccaattgggactcccattctttgccaggagatcttacccatcccttttcagattaatcttttatcctttcctgaagtacaaagtcttaagagtgtctgaaatccaagacatcttggcccaattgacacaggttctatattcttccctacatagaccactggctgctgaaatacttttcttgtcttctggtttcacaggcttcagctcatgggttccaccctaacttggggaaacaaaagccttctctagaatctgaaggccaggcttacctctgattctgattcatccatacttcatcttatgtattttaacagttgggttctgtggagtgtccagagaccttgggttaggtatatccatcttcagtacctcattggatcacttttctttcatcacttgagtattctagcagtcattctcctaatctgaccactttcaggtttagtttacctggcttacctggggaagttgacaacttgttggtagttaggcacccatgaatgtctccagagacatcctgagaggcaagattcctcttaattgataaccaggacaaccaggtagtcacccagtcctctctaagcagggagcacttgtccttctctcctctgctgcagctactgatatctggcccctggaataaaaccatagttcctaaaattgagcatccctaagagtagctgcttggtgggacagctgatttctttgattccctagctgcaaaacctgaaattgaccactaggtgacagaatgtttgccagtatccccacaaaacaagttaaaacttaagtgaaaatcattctgcttttgaatcttaaaagctagaaaaaccataatgtaatattctttttaaaccctcttattttataactaaataaataatcacagaaaagaatgatctgaacaagaacagctgaggctaaaacccaagactgccgtgactcctagtccaatgtctgtttcgcatcacaacacagtatctttaacagtgcttgagatgcttaacagagaaggcatccagtgcttcattgaggctaagtctcagggtgtttctgccgcttagtatctttttgttcagattgagaacctaaggcgacagagaggtcaaggggaagtattttctagttcagaattcagaattcttaggcaaccttcatacctttatctggaaaatgccttctctccagacaataagacagttcacatctggagacatcagcctttggtacctaattctctaagctcaagatgcatcccattgccactttaccattctatttcccaagggaaccatcagcaccaacctgctaaatgcctgtatttgaagtctctccccttcctgaagtgaccttttatgaggctctttccttcctaagggacctttccctggtagtagtggtctcattcacaaaaaagaataatagatgtaactggagtcactttgcagttttcaagattttttttttatctgcttggctggaaaggagactagagtatctagtttttagtatttaaactacttttaattatttatattgatactctctgataaatgcaggtagttaagaatagattgtactcattcctttttgagtttgtgacctcaaaccattgtttttattcttacacgactacagtacttcaaatggcacatagataggcaggatattacataggtaagcaggaatttatacattgggtaccagagctaaatctggaaaacacatttggaatgagcttccacacttcagtctaaaatctcacccaaacttatggctacatatttttctaagtttcccccctagtttcactttctggaaagtgaacagttttttaaatcctaaatgttataaatccttaggagaaatattccctcaaaacctagtcaagaaagtgccacattcccaccttctaacaggtaattattagttgtaatagctttaatgcatggaaaaacttcagttactgaccagtcaagagaatttctcaagaaaaatcccagcaacgttccctctttcctccttgtcttccactatcattaagacctgggctagatcacctctaacatctcactcagggaaggcaatgtgttgccataaaaagaccacaagcttttgagttaggcctgaatttgaatttcagcttaatcatgtgggatttatggtgggggccctttcagtctcaatttccacattagtgaactggggaaatgatacatacttctaagggtttttagggggattaaatgaagtatacagttcttagcctcaggcctaggattaagtaagtactcaagaaatgtgcaattttctagttccatgtttcttttctaatcttcaaatggaattatagaaaccatgggtcagaacatattcctttactcaaaagattgcatgactgaatttgcttaagaaaaaaaaaattgtatcaagtcattaatacaattatacattaattatattacattaatacaatatatggtttgtgaattcagagacattaccagtttgcctccttctctcaatagaacttgtattttcattttcttggttaagcagttgtctcctaatattatcccatatgctacctagtttgctggtcccaagcagtttactgtacttcactagatttggtacctgctctcccctggacttctttttcaatattctagcctttcctagatgtaaatctttacctccttgttagtgaaattagatataagccatgatttggagagggaagaaatctggaatacttaatttcatttaattatctatgctgatgaatgcctgtatcattgttaataaaggagaattgaaaatactcatttctactttctgccctcaaatttctgtttctatctcaactaggcaagaatcagcagggtgcatgatgccattttaagctgcttcacatcagactgaaatcctaattacagttcataagtgaaacagactaattcaatggcaataccttttgtataggtcctgtgcttaaaggaggcaagtataaattttctaataagaaatccctgcttcttttgggtgcagtggctcacacctgtaataccagcagtttgagaagctaaggcaggtggatcacttgaggccaggagttcgagaccagcctggccaacatagtgaaaccccgtctcttctaaaaatacaaaaaaattagctgggcatggtggtgcacgcctatagtcccagctacacaggaggctgaggcaggagaatcacttgaacccgggaagcagagtctgcagtgagccaagatcgcggcattgcacttcagcctgggcgatagagcaagactctgtctcagaaaaaaaaaaaaaggaaagaaagaaatctctgcttccgtactatcaaaacttctaccctagaataccccctggcaccttctaacccaacctaatacagagattttgtagggacccattaacaagctcctatataattataagcagctctcacagtagggttgaaagagaatataaggaaaattagaagtactgtatttttgctattggaaatgaaatattgtttcatgcacctttgaaaaaaataacaggattttacagccttctgatgattcattcaaagcatggggaatagttcatatgtttgttaaatgaaaatcttatgtagctatttgtgtgtccctcccacttcataactacaaaaacatatatatgaatttctaaacaaagtgatattttaaagatgaattgattcaatgtgtacttaccagtttactgtgtggttttatcttcaggtacagatagtttgtggtactacttgaaaatacctttaatattattttcatcagaatttgtaatatataatccagtttgggatgatgaataaaatttttctaatctcttga

SEQ ID NO: 19570 - protein, 461 aa, Homo sapiens; identical to SEQ ID NO: 19564

SEQ ID NO: 19571 - DNA, 606 bp, Homo sapiens
atgaccaggaagatcttcacaaataccagggagcggtggaggcagcagaatgtcaacagcgcctttgccaagctgaggaagctcatccccactcaccctccagacaaaaagctgagcaaaaatgaaacgcttcgcctggcaatgaggtatatcaacttcttggtcaaggtcttgggggagcaaagcctgcaacaaacgggagtggctgctcaggggaacattctggggctcttccctcaaggaccccacctgccaggcctggaggacagaactctgcttgagaactaccaggttccttcacctggtccaagccaccacattccttagtgtggctctggctgtcatctcccagggcagcacttgcccagaaatcactgcctgtggacagacttttgcatgttccagagttgacctgatgataactcgtgaagcatgaattctagcttcctgggaggtggctcagagacagctgcagggagctgaaagaagccatgaggaatgtcacttgtgggccgccaccccccagggatgtcaggtagagcggcctacctctgcctattttaaatccaggttctgcataagacttttggagaaaaaattctaaat

SEQ ID NO: 19572 - protein, 108 aa, Homo sapiens; identical to SEQ ID NO: 2437

SEQ ID NO: 19573 - DNA, 1030 bp, Homo sapiens
gccagggcgcacgcgcggagctggagccggcgcggaggagcgggcggccgcggctgtgccctctcctactcctcaccgcgcgagcgcggggaaccagtagccgcggctgcttcggttgccgcggtcggtggtcgttatggattctccatgggacgagttggctctggccttctcccgcacgtccatgtttcccttttttgacatcgcgcactatctagtgtcagtgatggcggtgaaacgtcagccgggagcagctgcattggcatggaagaatcctatttcaagctggtttactgctatgctccactgttttggtggaggaattttatcctgtctactgcttgcagagcctccattgaagtttcttgcaaaccacactaacatattactggcatcttcaatctggtatattacatttttttgcccgcatgacctagtttcccagggctattcatatctacctgttcaactactggcttcgggaatgaaggaagtgaccagaacttggaaaatagtaggtggagtcacacatgctaatagctattacaaaaatggctggatagtcatgatagctattggatgggcccgaggtgcaggtggtaccattataacgaattttgagaggttggtaaaaggagattggaaaccagaaggtgatgaatggctgaagatgtcataccctgccaaggtaaccctgctggggtcagttatcttcacattccagcacacccagcatctggcaatatcaaagcataatcttatgttcctttataccatctttattgtggccacaaagataaccatgatgactacacagacttctactatgacatttgctccttttgaggatacattgagttggatgctatttggctggcagcagccgttttcatcatgtgagaagaaaagtgaagcaaagtcaccttccaatggcgttgggtcattggcctcaaagccggtagatgttgcctcagataatgttaaaaagaaacatactaagaagaatgaataaatttacgtgatgagctct

SEQ ID NO: 19574 - protein, 291 aa, Homo sapiens; identical to SEQ ID NO: 2439

SEQ ID NO: 19575 - DNA, 2746 bp, Homo sapiens
gccagggcgcacgcgcggagctggagccggcgcggaggagcgggcggccgcggctgtgccctctcctactcctcaccgcgcgagcgcggggaaccagtagccgcggctgcttcggttgccgcggtcggtggtcgttatggattctccatgggacgagttggctctggccttctcccgcacgtccatgtttcccttttttgacatcgcgcactatctagtgtcagtgatggcggtgaaacgtcagccgggagcagctgcattggcatggaagaatcctatttcaagctggtttactgctatgctccactgttttggtggaggaattttatcctgtctactgcttgcagagcctccattgaagtttcttgcaaaccacactaacatattactggcatcttcaatctggtatattacatttttttgcccgcatgacctagtttcccagggctattcatatctacctgttcaactactggcttcgggaatgaaggaagtgaccagaacttggaaaatagtaggtggagtcacacatgctaatagctattacaaaaatggctggatagtcatgatagctattggatgggcccgaggtgcaggtggtaccattataacgaattttgagaggttggtaaaaggagattggaaaccagaaggtgatgaatggctgaagatgtcataccctgccaaggtaaccctgctggggtcagttatcttcacattccagcacacccagcatctggcaatatcaaagcataatcttatgttcctttataccatctttattgtggccacaaagataaccatgatgactacacagacttctactatgacatttgctccttttgaggatacattgagttggatgctatttggctggcagcagccgttttcatcatgtgagaagaaaagtgaagcaaagtcaccttccaatggcgttgggtcattggcctcaaagccggtagatgttgcctcagataatgttaaaaagaaacatactaagaagaatgaataaatttacgtgatgagctctacaaggccaaaaattttttttcttatctacctgttatattgtgctaatttttctatgtatgtgatgtgaaatgaagactatatatatggaatggaggtgacagaaagaaagaaattctttgtttgagggagacttcccctttctggattgtatttgtagagtgttacgagtgtatcatgtgattatgctttaccggtataagagattctgttgtgattatttgaatagttttatattaataaaagaagacaaaattttttaaatgttagaaaaagcagatctgtcattgcaaagtaacaaaaattttaagcttttaaaaatgtagatttttcatatttttaaaatttgaatctatttgagctttagttcagcagaattaaatttttacttgacattatcattaaaattgctaggtatggagaacaattcctattttattttgaacactgagaagagtaaacttttcctaaaacactttatattataaatgaaaataaattgctagtttatattttagatataaacatcatattttttattaatacctacatcaaatggaaaatatctgaaattttttttccatagcaggtattttctactagaagtagttttactacttttcatttagaacagagtatgagtcttaatctgaagtctttttcatgcccttgttttaaaaaaactactttttttggcctcaaaaaaatcaagggtgtaatttttaataaattgttaatcctatgttttgtaattttcattttaggagcttgacttatttttttctctctcataaaaacacatttgttttaattgtaggagaaattttctcagcattttgcatgttctttctaatctttgttggtctgaatatattggtagtaattactgtaattattcaacaaaaagcatatccgttcaaaaatttttccactatgtcttttttctagtggctactgttttagttttctagttgaatatctctgacaagctttcgtatggttttgttatattttcatctacatgtaatgtgttattaattttattaaatgaaaactaatcaccttcatgtggaaatgctctgagaattgtccttaggcatttggtagtaaccagctaaccaagaagaaacagagaaaccagaacttcatatggcagtccatttagatgaagaatgatgatataaaatctggttccttcttagcaaaataaaaaacaaacaagaaaagatactaaatgatgttaattttcttactttatgatttagaagtccagttataatattaaaactctgtgacatagtttcttttaccaaaaccatgaacctactccccgtatcaggtattttcgatggtttagaagtactcaagtcacatcacattcaagttagaagttttttttttgttgttgttattttaaatttttaacaaatataaacaccagcagatactattacttgcttaaaaaattgggagggggcacttttcatagtcttggaatgctaagaagttttatttttaatattgtgacagaaagctttaagtatttaagagctctgtattatatttgatactcttacagttaaaaacttttcaaaattaatacattgttaattattgaccagttttgaagtttgggtttaactgtagttgaaatggaaggactcttgttttacacttgtattaaagataaatttattaaaataagttatttagcacc

SEQ ID NO: 19576 - protein, 291 aa, Homo sapiens; identical to SEQ ID NO: 2439

SEQ ID NO: 19577 - DNA, 2628 bp, Homo sapiens
gccagggcgcacgcgcggagctggagccggcgcggaggagcgggcggccgcggctgtgccctctcctactcctcaccgcgcgagcgcggggaaccagtagccgcggctgcttcggttgccgcggtcggtggtcgttatggattctccatgggacgagttggctctggccttctcccgcacgtccatgtttcccttttttgacatcgcgcactatctagtgtcagtgatggcggtgaaacgtcagccgggagcagctgcattggcatggaagaatcctatttcaagctggtttactgctatgctccactgttttggtggaggaattttatcctgtctactgcttgcagagcctccattgaagtttcttgcaaaccacactaacatattactggcatcttcaatctggtatattacatttttttgcccgcatgacctagtttcccagggctattcatatctacctgttcaactactggcttcgggaatgaaggaagtgaccagaacttggaaaatagtaggtggagtcacacatgctaatagctattacaaaaatggctggatagtcatgatagctattggatgggcccgaggtgcaggtggtaccattataacgaattttgagaggttggtaaaaggagattggaaaccagaaggtgatgaatggctgaagatgtcataataaccatgatgactacacagacttctactatgacatttgctccttttgaggatacattgagttggatgctatttggctggcagcagccgttttcatcatgtgagaagaaaagtgaagcaaagtcaccttccaatggcgttgggtcattggcctcaaagccggtagatgttgcctcagataatgttaaaaagaaacatactaagaagaatgaataaatttacgtgatgagctctacaaggccaaaaattttttttcttatctacctgttatattgtgctaatttttctatgtatgtgatgtgaaatgaagactatatatatggaatggaggtgacagaaagaaagaaattctttgtttgagggagacttcccctttctggattgtatttgtagagtgttacgagtgtatcatgtgattatgctttaccggtataagagattctgttgtgattatttgaatagttttatattaataaaagaagacaaaattttttaaatgttagaaaaagcagatctgtcattgcaaagtaacaaaaattttaagcttttaaaaatgtagatttttcatatttttaaaatttgaatctatttgagctttagttcagcagaattaaatttttacttgacattatcattaaaattgctaggtatggagaacaattcctattttattttgaacactgagaagagtaaacttttcctaaaacactttatattataaatgaaaataaattgctagtttatattttagatataaacatcatattttttattaatacctacatcaaatggaaaatatctgaaattttttttccatagcaggtattttctactagaagtagttttactacttttcatttagaacagagtatgagtcttaatctgaagtctttttcatgcccttgttttaaaaaaactactttttttggcctcaaaaaaatcaagggtgtaatttttaataaattgttaatcctatgttttgtaattttcattttaggagcttgacttatttttttctctctcataaaaacacatttgttttaattgtaggagaaattttctcagcattttgcatgttctttctaatctttgttggtctgaatatattggtagtaattactgtaattattcaacaaaaagcatatccgttcaaaaatttttccactatgtcttttttctagtggctactgttttagttttctagttgaatatctctgacaagctttcgtatggttttgttatattttcatctacatgtaatgtgttattaattttattaaatgaaaactaatcaccttcatgtggaaatgctctgagaattgtccttaggcatttggtagtaaccagctaaccaagaagaaacagagaaaccagaacttcatatggcagtccatttagatgaagaatgatgatataaaatctggttccttcttagcaaaataaaaaacaaacaagaaaagatactaaatgatgttaattttcttactttatgatttagaagtccagttataatattaaaactctgtgacatagtttcttttaccaaaaccatgaacctactccccgtatcaggtattttcgatggtttagaagtactcaagtcacatcacattcaagttagaagttttttttttgttgttgttattttaaatttttaacaaatataaacaccagcagatactattacttgcttaaaaaattgggagggggcacttttcatagtcttggaatgctaagaagttttatttttaatattgtgacagaaagctttaagtatttaagagctctgtattatatttgatactcttacagttaaaaacttttcaaaattaatacattgttaattattgaccagttttgaagtttgggtttaactgtagttgaaatggaaggactcttgttttacacttgtattaaagataaatttattaaaataagttatttagcacc

SEQ ID NO: 19578 - protein, 180 aa, Homo sapiens
MDSPWDELALAFSRTSMFPFFDIAHYLVSVMAVKRQPGAAALAWKNPISSWFTAMLHCFGGGILSCLLLAEPPLKFLANHTNILLASSIWYITFFCPHDLVSQGYSYLPVQLLASGMKEVTRTWKIVGGVTHANSYYKNGWIVMIAIGWARGAGGTIITNFERLVKGDWKPEGDEWLKMS

SEQ ID NO: 19579 - DNA, 3560 bp, Homo sapiens
gccagggcgcacgcgcggagctggagccggcgcggaggagcgggcggccgcggctgtgccctctcctactcctcaccgcgcgagcgcggggaaccagtagccgcggctgcttcggttgccgcggtcggtggtcgttatggattctccatgggacgagttggctctggccttctcccgcacgtccatgtttcccttttttgacatcgcgcactatctagtgtcagtgatggcggtgaaacgtcagccgggagcagctgcattggcatggaagaatcctatttcaagctggtttactgctatgctccactgttttggtggaggaattttatcctgtctactgcttgcagagcctccattgaagtttcttgcaaaccacactaacatattactggcatcttcaatctggtatattacatttttttgcccgcatgacctagtttcccagggctattcatatctacctgttcaactactggcttcgggaatgaaggaagtgaccagaacttggaaaatagtaggtggagtcacacatgctaatagctattacaaaaatggctggatagtcatgatagctattggatgggcccgaggtgcaggtggtaccattataacgaattttgagaggttggtaaaaggagattggaaaccagaaggtgatgaatggctgaagatgtcataccctgccaaggtaaccctgctggggtcagttatcttcacattccagcacacccagcatctggcaatatcaaagcataatcttatgttcctttataccatctttattgtggccacaaagataaccatgatgactacacagacttctactatgacatttgctccttttgaggatacattgagttggatgctatttggctggcagcagccgttttcatcatgtgagaagaaaagtgaagcaaagtcaccttccaatggcgttgggtcattggcctcaaagccggtagatgttgcctcagataatgttaaaaagaaacatactaagaagaatgaataaatttacgtgatgagctctacaaggccaaaaattttttttcttatctacctgttatattgtgctaatttttctatgtatgtgatgtgaaatgaagactatatatatggaatggaggtgacagaaagaaagaaattctttgtttgagggagacttcccctttctggattgtatttgtagagtgttacgagtgtatcatgtgattatgctttaccggtataagagattctgttgtgattatttgaatagttttatattaataaaagaagacaaaattttttaaatgttagaaaaagcagatctgtcattgcaaagtaacaaaaattttaagcttttaaaaatgtagatttttcatatttttaaaatttgaatctatttgagctttagttcagcagaattaaatttttacttgacattatcattaaaattgctaggtatggagaacaattcctattttattttgaacactgagaagagtaaacttttcctaaaacactttatattataaatgaaaataaattgctagtttatattttagatataaacatcatattttttattaatacctacatcaaatggaaaatatctgaaattttttttccatagcaggtattttctactagaagtagttttactacttttcatttagaacagagtatgagtcttaatctgaagtctttttcatgcccttgttttaaaaaaactactttttttggcctcaaaaaaatcaagggtgtaatttttaataaattgttaatcctatgttttgtaattttcattttaggagcttgacttatttttttctctctcataaaaacacatttgttttaattgtaggagaaattttctcagcattttgcatgttctttctaatctttgttggtctgaatatattggtagtaattactgtaattattcaacaaaaagcatatccgttcaaaaatttttccactatgtcttttttctagtggctactgttttagttttctagttgaatatctctgacaagctttcgtatggttttgttatattttcatctacatgtaatgtgttattaattttattaaatgaaaactaatcaccttcatgtggaaatgctctgagaattgtccttaggcatttggtagtaaccagctaaccaagaagaaacagagaaaccagaacttcatatggcagtccatttagatgaagaatgatgatataaaatctggttccttcttagcaaaataaaaaacaaacaagaaaagatactaaatgatgttaattttcttactttatgatttagaagtccagttataatattaaaactctgtgacatagtttcttttaccaaaaccatgaacctactccccgtatcaggtattttcgatggtttagaagtactcaagtcacatcacattcaagttagaagttttttttttgttgttgttattttaaatttttaacaaatataaacaccagcagatactattacttgcttaaaaaattgggagggggcacttttcatagtcttggaatgctaagaagttttatttttaatattgtgacagaaagctttaagtatttaagagctctgtattatatttgatactcttacagttaaaaacttttcaaaattaatacattgttaattattgaccagttttgaagtttgggtttaactgtagttgaaatggaaggactcttgttttacacttgtattaaagataaatttattaaaataagttatttagcaccaatggagtattacattatttttatgttttatatttttcttgaggtagagtttcagaactcatctagtattttgactaatatagtatatattcagtgattactgttcaaatgggacattggtagaaactttattaatctatgcaagtatcctataaccctcaattcaaggctcttttgtaaaaaatgtactggagaacatggcttaggcctgaaacccatcctgaatctattcaggtcacctgtagagtcttgacttggatttgcaaagcagattgttagactccttacccaatgtgaagtgtgaataaggcctataggcctgcctcacacagctaatcagaggtggcactgagaaagtcaagtcctaataggtctccttaaaaaaaaaaaggagacaaaaagctggcaagaacatgagccagcttccctcagtgctgtcactctcaagtaaaacatggccaaatgaatatcaaactggtttatcagattagtcactcttccttactgagggagtatcaagtaagggctggagagagaccagatatgtggagttgttggctttcagtggaaatggtagcctccctgtgggtagagaccaaaaggtagagagatgacagaagggagactctgattagtgtattttttttttgtctattccttaaagcccagacacctttccattaaaatctacttcaaatcacaagttgattacaattgagtggaacatcccatgttgtaaatggaataatgtgttcagaatgctctttctttcccccaataaagccctttatagtgtttgccccaggtgtaattc

SEQ ID NO: 19580 - protein, 291 aa, Homo sapiens; identical to SEQ ID NO: 2439

SEQ ID NO: 19581 - DNA, 3442 bp, Homo sapiens
gccagggcgcacgcgcggagctggagccggcgcggaggagcgggcggccgcggctgtgccctctcctactcctcaccgcgcgagcgcggggaaccagtagccgcggctgcttcggttgccgcggtcggtggtcgttatggattctccatgggacgagttggctctggccttctcccgcacgtccatgtttcccttttttgacatcgcgcactatctagtgtcagtgatggcggtgaaacgtcagccgggagcagctgcattggcatggaagaatcctatttcaagctggtttactgctatgctccactgttttggtggaggaattttatcctgtctactgcttgcagagcctccattgaagtttcttgcaaaccacactaacatattactggcatcttcaatctggtatattacatttttttgcccgcatgacctagtttcccagggctattcatatctacctgttcaactactggcttcgggaatgaaggaagtgaccagaacttggaaaatagtaggtggagtcacacatgctaatagctattacaaaaatggctggatagtcatgatagctattggatgggcccgaggtgcaggtggtaccattataacgaattttgagaggttggtaaaaggagattggaaaccagaaggtgatgaatggctgaagatgtcataataaccatgatgactacacagacttctactatgacatttgctccttttgaggatacattgagttggatgctatttggctggcagcagccgttttcatcatgtgagaagaaaagtgaagcaaagtcaccttccaatggcgttgggtcattggcctcaaagccggtagatgttgcctcagataatgttaaaaagaaacatactaagaagaatgaataaatttacgtgatgagctctacaaggccaaaaattttttttcttatctacctgttatattgtgctaatttttctatgtatgtgatgtgaaatgaagactatatatatggaatggaggtgacagaaagaaagaaattctttgtttgagggagacttcccctttctggattgtatttgtagagtgttacgagtgtatcatgtgattatgctttaccggtataagagattctgttgtgattatttgaatagttttatattaataaaagaagacaaaattttttaaatgttagaaaaagcagatctgtcattgcaaagtaacaaaaattttaagcttttaaaaatgtagatttttcatatttttaaaatttgaatctatttgagctttagttcagcagaattaaatttttacttgacattatcattaaaattgctaggtatggagaacaattcctattttattttgaacactgagaagagtaaacttttcctaaaacactttatattataaatgaaaataaattgctagtttatattttagatataaacatcatattttttattaatacctacatcaaatggaaaatatctgaaattttttttccatagcaggtattttctactagaagtagttttactacttttcatttagaacagagtatgagtcttaatctgaagtctttttcatgcccttgttttaaaaaaactactttttttggcctcaaaaaaatcaagggtgtaatttttaataaattgttaatcctatgttttgtaattttcattttaggagcttgacttatttttttctctctcataaaaacacatttgttttaattgtaggagaaattttctcagcattttgcatgttctttctaatctttgttggtctgaatatattggtagtaattactgtaattattcaacaaaaagcatatccgttcaaaaatttttccactatgtcttttttctagtggctactgttttagttttctagttgaatatctctgacaagctttcgtatggttttgttatattttcatctacatgtaatgtgttattaattttattaaatgaaaactaatcaccttcatgtggaaatgctctgagaattgtccttaggcatttggtagtaaccagctaaccaagaagaaacagagaaaccagaacttcatatggcagtccatttagatgaagaatgatgatataaaatctggttccttcttagcaaaataaaaaacaaacaagaaaagatactaaatgatgttaattttcttactttatgatttagaagtccagttataatattaaaactctgtgacatagtttcttttaccaaaaccatgaacctactccccgtatcaggtattttcgatggtttagaagtactcaagtcacatcacattcaagttagaagttttttttttgttgttgttattttaaatttttaacaaatataaacaccagcagatactattacttgcttaaaaaattgggagggggcacttttcatagtcttggaatgctaagaagttttatttttaatattgtgacagaaagctttaagtatttaagagctctgtattatatttgatactcttacagttaaaaacttttcaaaattaatacattgttaattattgaccagttttgaagtttgggtttaactgtagttgaaatggaaggactcttgttttacacttgtattaaagataaatttattaaaataagttatttagcaccaatggagtattacattatttttatgttttatatttttcttgaggtagagtttcagaactcatctagtattttgactaatatagtatatattcagtgattactgttcaaatgggacattggtagaaactttattaatctatgcaagtatcctataaccctcaattcaaggctcttttgtaaaaaatgtactggagaacatggcttaggcctgaaacccatcctgaatctattcaggtcacctgtagagtcttgacttggatttgcaaagcagattgttagactccttacccaatgtgaagtgtgaataaggcctataggcctgcctcacacagctaatcagaggtggcactgagaaagtcaagtcctaataggtctccttaaaaaaaaaaaggagacaaaaagctggcaagaacatgagccagcttccctcagtgctgtcactctcaagtaaaacatggccaaatgaatatcaaactggtttatcagattagtcactcttccttactgagggagtatcaagtaagggctggagagagaccagatatgtggagttgttggctttcagtggaaatggtagcctccctgtgggtagagaccaaaaggtagagagatgacagaagggagactctgattagtgtattttttttttgtctattccttaaagcccagacacctttccattaaaatctacttcaaatcacaagttgattacaattgagtggaacatcccatgttgtaaatggaataatgtgttcagaatgctctttctttcccccaataaagccctttatagtgtttgccccaggtgtaattc

SEQ ID NO: 19582 - protein, 180 aa, Homo sapiens; identical to SEQ ID NO: 19578

SEQ ID NO: 19583 - DNA, 533 bp, Homo sapiens
ggagcgggcggccgcggctgtgccctctcctactcctcaccgcgcgagcgcggggaaccagtagccgcggctgcttcggttgccgcggtcggtggtcgttatggattctccatgggacgagttggctctggccttctcccgcacgtccatgtttcccttttttgacatcgcgcactatctagtgtcagtgatggcggtgaaacgtcagccgggagcagctgcattggcatggaagaatcctatttcaagctggtttactgctatgctccactgttttggtggaggaattttatcctgtctactgcttgcagagcctccattgaagtttcttgcaaaccacactaacatattactggcatcttcaatctggtaagctgccagtatggtgacctatgtgacatttaaacaattgtgttgtaaattgttagtaaaatgaatttttttttctttgaacaatattttacgtgcttgaaaagttaatgcatctgcaaggaaggaacccaaataatgctaaggggttttttttttttttt

SEQ ID NO: 19584 - protein, 90 aa, Homo sapiens
MDSPWDELALAFSRTSMFPFFDIAHYLVSVMAVKRQPGAAALAWKNPISSWFTAMLHCFGGGILSCLLLAEPPLKFLANHTNILLASSIW

SEQ ID NO: 19585 - DNA, 518 bp, Homo sapiens
ggagcgggcggccgcggctgtgccctctcctactcctcaccgcgcgagcgcggggaaccagtagccgcggctgcttcggttgccgcggtcggtggtcgttatggattctccatgggacgagttggctctggccttctcccgcacgtccatgtttcccttttttgacatcgcgcactatctagtgtcagtgatggcggtgaaacgtcagccgggagcagctgcattggcatggaagaatcctatttcaagctggtttactgctatgctccactgttttggtggaggaattttatcctgtctactgcttgcagagcctccattgaagtttcttgcaaaccacactaacatattactggcatcttcaatctggctcactgcaacctccacctcctgggttcaagcgattctcctgtctcagcctcccaagtggctgagattacaggcatgcgccaccacgtctggctaattttctgtatatttagtagagacggggtttcacaatgttggccaggctgttc

SEQ ID NO: 19586 - protein, 121 aa, Homo sapiens
MDSPWDELALAFSRTSMFPFFDIAHYLVSVMAVKRQPGAAALAWKNPISSWFTAMLHCFGGGILSCLLLAEPPLKFLANHTNILLASSIWLTATSTSWVQAILLSQPPKWLRLQACATTSG

SEQ ID NO: 19587 - DNA, 721 bp, Homo sapiens
ggagcgggcggccgcggctgtgccctctcctactcctcaccgcgcgagcgcggggaaccagtagccgcggctgcttcggttgccgcggtcggtggtcgttatggattctccatgggacgagttggctctggccttctcccgcacgtccatgtttcccttttttgacatcgcgcactatctagtgtcagtgatggcggtgaaacgtcagccgggagcagctgcattggcatggaagaatcctatttcaagctggtttactgctatgctccactgttttggtggaggaattttatcctgtctactgcttgcagagcctccattgaagtttcttgcaaaccacactaacatattactggcatcttcaatctgccctgccaaggtaaccctgctggggtcagttatcttcacattccagcacacccagcatctggcaatatcaaagcataatcttatgttcctttataccatctttattgtggccacaaagataaccatgatgactacacagacttctactatgacatttgctccttttgaggatacattgagttggatgctatttggctggcagcagccgttttcatcatgtgagaagaaaagtgaagcaaagtcaccttccaatggcgttgggtcattggcctcaaagccggtagatgttgcctcagataatgttaaaaagaaacatactaagaagaatgaataaatttacgtgatgagctct

SEQ ID NO: 19588 - protein, 200 aa, Homo sapiens
MDSPWDELALAFSRTSMFPFFDIAHYLVSVMAVKRQPGAAALAWKNPISSWFTAMLHCFGGGILSCLLLAEPPLKFLANHTNILLASSICPAKVTLLGSVIFTFQHTQHLAISKHNLMFLYTIFIVATKITMMTTQTSTMTFAPFEDTLSWMLFGWQQPFSSCEKKSEAKSPSNGVGSLASKPVDVASDNVKKKHTKKNE

SEQ ID NO: 19589 - DNA, 2437 bp, Homo sapiens
ggagcgggcggccgcggctgtgccctctcctactcctcaccgcgcgagcgcggggaaccagtagccgcggctgcttcggttgccgcggtcggtggtcgttatggattctccatgggacgagttggctctggccttctcccgcacgtccatgtttcccttttttgacatcgcgcactatctagtgtcagtgatggcggtgaaacgtcagccgggagcagctgcattggcatggaagaatcctatttcaagctggtttactgctatgctccactgttttggtggaggaattttatcctgtctactgcttgcagagcctccattgaagtttcttgcaaaccacactaacatattactggcatcttcaatctgccctgccaaggtaaccctgctggggtcagttatcttcacattccagcacacccagcatctggcaatatcaaagcataatcttatgttcctttataccatctttattgtggccacaaagataaccatgatgactacacagacttctactatgacatttgctccttttgaggatacattgagttggatgctatttggctggcagcagccgttttcatcatgtgagaagaaaagtgaagcaaagtcaccttccaatggcgttgggtcattggcctcaaagccggtagatgttgcctcagataatgttaaaaagaaacatactaagaagaatgaataaatttacgtgatgagctctacaaggccaaaaattttttttcttatctacctgttatattgtgctaatttttctatgtatgtgatgtgaaatgaagactatatatatggaatggaggtgacagaaagaaagaaattctttgtttgagggagacttcccctttctggattgtatttgtagagtgttacgagtgtatcatgtgattatgctttaccggtataagagattctgttgtgattatttgaatagttttatattaataaaagaagacaaaattttttaaatgttagaaaaagcagatctgtcattgcaaagtaacaaaaattttaagcttttaaaaatgtagatttttcatatttttaaaatttgaatctatttgagctttagttcagcagaattaaatttttacttgacattatcattaaaattgctaggtatggagaacaattcctattttattttgaacactgagaagagtaaacttttcctaaaacactttatattataaatgaaaataaattgctagtttatattttagatataaacatcatattttttattaatacctacatcaaatggaaaatatctgaaattttttttccatagcaggtattttctactagaagtagttttactacttttcatttagaacagagtatgagtcttaatctgaagtctttttcatgcccttgttttaaaaaaactactttttttggcctcaaaaaaatcaagggtgtaatttttaataaattgttaatcctatgttttgtaattttcattttaggagcttgacttatttttttctctctcataaaaacacatttgttttaattgtaggagaaattttctcagcattttgcatgttctttctaatctttgttggtctgaatatattggtagtaattactgtaattattcaacaaaaagcatatccgttcaaaaatttttccactatgtcttttttctagtggctactgttttagttttctagttgaatatctctgacaagctttcgtatggttttgttatattttcatctacatgtaatgtgttattaattttattaaatgaaaactaatcaccttcatgtggaaatgctctgagaattgtccttaggcatttggtagtaaccagctaaccaagaagaaacagagaaaccagaacttcatatggcagtccatttagatgaagaatgatgatataaaatctggttccttcttagcaaaataaaaaacaaacaagaaaagatactaaatgatgttaattttcttactttatgatttagaagtccagttataatattaaaactctgtgacatagtttcttttaccaaaaccatgaacctactccccgtatcaggtattttcgatggtttagaagtactcaagtcacatcacattcaagttagaagttttttttttgttgttgttattttaaatttttaacaaatataaacaccagcagatactattacttgcttaaaaaattgggagggggcacttttcatagtcttggaatgctaagaagttttatttttaatattgtgacagaaagctttaagtatttaagagctctgtattatatttgatactcttacagttaaaaacttttcaaaattaatacattgttaattattgaccagttttgaagtttgggtttaactgtagttgaaatggaaggactcttgttttacacttgtattaaagataaatttattaaaataagttatttagcacc

SEQ ID NO: 19590 - protein, 200 aa, Homo sapiens; identical to SEQ ID NO: 19588

SEQ ID NO: 19591 - DNA, 3251 bp, Homo sapiens
ggagcgggcggccgcggctgtgccctctcctactcctcaccgcgcgagcgcggggaaccagtagccgcggctgcttcggttgccgcggtcggtggtcgttatggattctccatgggacgagttggctctggccttctcccgcacgtccatgtttcccttttttgacatcgcgcactatctagtgtcagtgatggcggtgaaacgtcagccgggagcagctgcattggcatggaagaatcctatttcaagctggtttactgctatgctccactgttttggtggaggaattttatcctgtctactgcttgcagagcctccattgaagtttcttgcaaaccacactaacatattactggcatcttcaatctgccctgccaaggtaaccctgctggggtcagttatcttcacattccagcacacccagcatctggcaatatcaaagcataatcttatgttcctttataccatctttattgtggccacaaagataaccatgatgactacacagacttctactatgacatttgctccttttgaggatacattgagttggatgctatttggctggcagcagccgttttcatcatgtgagaagaaaagtgaagcaaagtcaccttccaatggcgttgggtcattggcctcaaagccggtagatgttgcctcagataatgttaaaaagaaacatactaagaagaatgaataaatttacgtgatgagctctacaaggccaaaaattttttttcttatctacctgttatattgtgctaatttttctatgtatgtgatgtgaaatgaagactatatatatggaatggaggtgacagaaagaaagaaattctttgtttgagggagacttcccctttctggattgtatttgtagagtgttacgagtgtatcatgtgattatgctttaccggtataagagattctgttgtgattatttgaatagttttatattaataaaagaagacaaaattttttaaatgttagaaaaagcagatctgtcattgcaaagtaacaaaaattttaagcttttaaaaatgtagatttttcatatttttaaaatttgaatctatttgagctttagttcagcagaattaaatttttacttgacattatcattaaaattgctaggtatggagaacaattcctattttattttgaacactgagaagagtaaacttttcctaaaacactttatattataaatgaaaataaattgctagtttatattttagatataaacatcatattttttattaatacctacatcaaatggaaaatatctgaaattttttttccatagcaggtattttctactagaagtagttttactacttttcatttagaacagagtatgagtcttaatctgaagtctttttcatgcccttgttttaaaaaaactactttttttggcctcaaaaaaatcaagggtgtaatttttaataaattgttaatcctatgttttgtaattttcattttaggagcttgacttatttttttctctctcataaaaacacatttgttttaattgtaggagaaattttctcagcattttgcatgttctttctaatctttgttggtctgaatatattggtagtaattactgtaattattcaacaaaaagcatatccgttcaaaaatttttccactatgtcttttttctagtggctactgttttagttttctagttgaatatctctgacaagctttcgtatggttttgttatattttcatctacatgtaatgtgttattaattttattaaatgaaaactaatcaccttcatgtggaaatgctctgagaattgtccttaggcatttggtagtaaccagctaaccaagaagaaacagagaaaccagaacttcatatggcagtccatttagatgaagaatgatgatataaaatctggttccttcttagcaaaataaaaaacaaacaagaaaagatactaaatgatgttaattttcttactttatgatttagaagtccagttataatattaaaactctgtgacatagtttcttttaccaaaaccatgaacctactccccgtatcaggtattttcgatggtttagaagtactcaagtcacatcacattcaagttagaagttttttttttgttgttgttattttaaatttttaacaaatataaacaccagcagatactattacttgcttaaaaaattgggagggggcacttttcatagtcttggaatgctaagaagttttatttttaatattgtgacagaaagctttaagtatttaagagctctgtattatatttgatactcttacagttaaaaacttttcaaaattaatacattgttaattattgaccagttttgaagtttgggtttaactgtagttgaaatggaaggactcttgttttacacttgtattaaagataaatttattaaaataagttatttagcaccaatggagtattacattatttttatgttttatatttttcttgaggtagagtttcagaactcatctagtattttgactaatatagtatatattcagtgattactgttcaaatgggacattggtagaaactttattaatctatgcaagtatcctataaccctcaattcaaggctcttttgtaaaaaatgtactggagaacatggcttaggcctgaaacccatcctgaatctattcaggtcacctgtagagtcttgacttggatttgcaaagcagattgttagactccttacccaatgtgaagtgtgaataaggcctataggcctgcctcacacagctaatcagaggtggcactgagaaagtcaagtcctaataggtctccttaaaaaaaaaaaggagacaaaaagctggcaagaacatgagccagcttccctcagtgctgtcactctcaagtaaaacatggccaaatgaatatcaaactggtttatcagattagtcactcttccttactgagggagtatcaagtaagggctggagagagaccagatatgtggagttgttggctttcagtggaaatggtagcctccctgtgggtagagaccaaaaggtagagagatgacagaagggagactctgattagtgtattttttttttgtctattccttaaagcccagacacctttccattaaaatctacttcaaatcacaagttgattacaattgagtggaacatcccatgttgtaaatggaataatgtgttcagaatgctctttctttcccccaataaagccctttatagtgtttgccccaggtgtaattc

SEQ ID NO: 19592 - protein, 200 aa, Homo sapiens; identical to SEQ ID NO: 19588

SEQ ID NO: 19593 - DNA, 1444 bp, Homo sapiens
gagcagtgtttcctccacaggggtctcagtctgggctctaaagagctcctccaccaagtttctaaattttaataatttcagcctattgttcccccagagtagtaactgctttctggaactgaactctgtgataatgtagtatttactttttgccttttcaataacctagttaacaattttatacctactgagttctatttaaataatggtattttctatctcctgactggacagatacccaggagtagggtttgaacttcctactttctggtttgcatatatcttattaagataactaaagtacttgctacttgccagtcttcagacccggtcagtgtaatgtcatcagtgcagcagatcagtgtgatgtgtgatttctcaatgtgatcaaaatctctggactattttagagagcaagagtgttaacatagacctgaagcaagactgtaatggttgaacaaagcacaaagtgcttctgagattttttgcaaattaataggaagaaaaaagcatttgcttccaagttataagaattgtgttgatttgaccccgtaaaaatactacatcttgaatactagctgcaattacagtcacgacctttctgtgtttataattcatagctattctccaagatccatctgtcttatatttagatcaaacaggagcagctgcattggcatggaagaatcctatttcaagctggtttactgctatgctccactgttttggtggaggaattttatcctgtctactgcttgcagagcctccattgaagtttcttgcaaaccacactaacatattactggcatcttcaatctggtatattacatttttttgcccgcatgacctagtttcccagggctattcatatctacctgttcaactactggcttcgggaatgaaggaagtgaccagaacttggaaaatagtaggtggagtcacacatgctaatagctattacaaaaatggctggatagtcatgatagctattggatgggcccgaggtgcaggtggtaccattataacgaattttgagaggttggtaaaaggagattggaaaccagaaggtgatgaatggctgaagatgtcataccctgccaaggtaaccctgctggggtcagttatcttcacattccagcacacccagcatctggcaatatcaaagcataatcttatgttcctttataccatctttattgtggccacaaagataaccatgatgactacacagacttctactatgacatttgctccttttgaggatacattgagttggatgctatttggctggcagcagccgttttcatcatgtgagaagaaaagtgaagcaaagtcaccttccaatggcgttgggtcattggcctcaaagccggtagatgttgcctcagataatgttaaaaagaaacatactaagaagaatgaataaatttacgtgatgagctct

SEQ ID NO: 19594 - protein, 237 aa, Homo sapiens
MLHCFGGGILSCLLLAEPPLKFLANHTNILLASSIWYITFFCPHDLVSQGYSYLPVQLLASGMKEVTRTWKIVGGVTHANSYYKNGWIVMIAIGWARGAGGTIITNFERLVKGDWKPEGDEWLKMSYPAKVTLLGSVIFTFQHTQHLAISKHNLMFLYTIFIVATKITMMTTQTSTMTFAPFEDTLSWMLFGWQQPFSSCEKKSEAKSPSNGVGSLASKPVDVASDNVKKKHTKKNE

SEQ ID NO: 19595 - DNA, 220 bp, Homo sapiens
cagggagtttctgcaaccagatttccagtgagatgaattaatcagctaatgctgcagagacactaaatgagatgacaggcagctcccacaaagcagatgctcaattaattgctgagtaatacttcattgtctggatgtactacagtttatgtatccatttacctactgaagaacatcttggctgcttccaagttttgacaattatgaataaaggtgccat

SEQ ID NO: 19596 - DNA, 4666 bp, Homo sapiens
aaactgatttgtttcaattgtgaaaattatttctctcctgcccctgtgcacttctgccctgtctatattagatttcaagaggtttcccttttgtcatcttggccagacaatggaatgtctatcccgtttgaatctgggtttaaaaaagcatgggagctagtggccaagtgtcacatgtatgccgcatccctaaatagaagtctccccagggcgcttcctgacctgcgcaatgctgccgaaggcctcctttccccgctccccaggcagaggagcaaagtcacaggctgaggggcctgccacgacttgcccacaaaacaggtctggagtttggaagttacatttgctggttgcccagagatgagtgcagaattcagcttggaggtcctggaaacttctagtttactgatgtttatgcttttgctcatgcacccacagttcctgggacacagaatgctcacctgggggtttgtaccccagccaagaaggtgtcttcacagactcccctccttttagcaacttcatgcagatggagcttgggtggatggatcctggcacagtgttcagaacagtggccctgccagtgtgtgggcgccgcttgtgcagagcccctgtgggttctggtcctcaagggcaggggcgctcactgacagcggaacccatagtaccagcccatctttggtgggctgtttccaccccattcatccctgctcagctcttcataggacagcctgtgctggcagaaaattgcccccaccagtcaagacgtagggcatcaacatgagccatcagtaatgacagggcagctttgcagagcgtaaggtagcacctgataccttggaccaaaaccgtatttttatgtatctttcacatgtacagctcttgtctttgactcatcaaactttcttttttttttttttttgcttatttcagtttgagtatgaattaatgaaaacaattgtttcataggcacttgtatttcttacaactgaagatggatatttgcgaaggaaggttaacctgccctcttaactcagcagtggttctagcgtcctatgccgtacaatctcattttggagactataattcttccatacatcatccaggctatctttccgatagtcactttatacccgatcaaaatgaggactttttaacaaaagtcgaatctctgcatgagcagcacagtgggctaaaacaatcagaagcagaatcctgctatatcaacatagcgcggaccctcgacttctatggagtagaactgcacagtggtagggatctgcacaatttagacctaatgattggaattgcttccgcgggtgttgctgtgtaccgaaaatacatttgcacaagtttctatccttgggtgaacattctcaaaatttctttcaaaaggaaaaagttcttcatacatcagcgacagaaacaggctgaatccagggaacatattgtggccttcaacatgctgaattaccgatcttgcaaaaacttgtggaaatcctgtgttgagcaccatacgttctttcaggcaaagaagctactacctcaggaaaagaatgttctgtctcagtactggactatgggctctcggaacaccaaaaagtcggtaaataaccaatattgcaaaaaggtgattggcgggatggtgtggaacccagccatgcggagatccttatcagtggagcacttagaaaccaagagtctgccttctcgttcccctcccattactcccaactggcgaagtcctcggctccggcacgaaatccgaaagccacgccactcttctgcagataaccttgcaaatgaaatgacctacatcacggaaacggaagatgtattttacacgtacaagggctctctggcccctcaagacagcgattctgaagtttctcagaaccgaagcccgcaccaagagagtttatccgagaacaatccggcacaaagctacctgacccagaagtcatccagttctgtgtctccatcttcaaatgctccaggctcctgctcacctgacggcgttgatcagcagctcttagatgacttccacagggtgaccaaagggggctccaccgaggacgccagccagtactactgtgacaagaatgataatggtgacagctacttagtcttgatccgtatcacaccagatgaagatggaaaatttggatttaatcttaagggaggagtggatcaaaagatgcctcttgtggtatcaaggataaacccagagtcacctgcggacacctgcattcctaagctgaacgaaggggatcaaatcgtgttaatcaatggccgggacatctcagaacacacgcatgaccaagtggtgatgttcatcaaagccagccgggagtcccactcacgggagctggccctggtgatcaggaggagagctgtccgctcatttgctgacttcaagtctgaagatgaactgaaccagcttttccccgaagccattttccccatgtgtccggagggtggggacactttggagggatccatggcacagctaaagaagggcctcgaaagcgggacggtgctgatccagtttgagcaactctacagaaaaaagccaggtttggccatcacgtttgcaaagctgcctcaaaatttggacaaaaaccgatataaagatgtgctgccttatgacaccacccgggtattattgcagggaaatgaagattatattaatgcaagttacgtgaacatggaaattcctgctgctaaccttgtgaacaagtacatcgccactcaggggcccctgccgcatacctgtgcacagttttggcaggttgtctgggatcagaagttgtcactcattgtcatgttgacgactctcacagaacgagggcggaccaaatgtcaccagtactggccagatccccccgacgtcatgaaccacggcggctttcacatccagtgtcagtcagaggactgcaccatcgcctatgtgtcccgagaaatgctggtcacaaacacccagaccggggaagaacacacagtgacacatctccagtacgtcgcatggcctgaccacggtgtgcccgatgactcctccgactttctggaatttgtaaactatgtgaggtctctgagagtggacagcgagcccgtcctagttcactgcagtgctggaataggtcgaaccggtgtgttggtcactatggaaacagccatgtgcctaactgagaggaacctgcccatttacccactggatattgtccgaaaaatgcgagaccagcgcgccatgatggtgcagacatcaagccagtacaagtttgtgtgtgaagcgattcttcgtgtgtatgaagaaggtttagtccaaatgctggatcctagttaagacaactgtgaaaaagttcattcctctttcccaagggcatcctccttgaaagaggaggacagacctctctggaagcagcaagaggaaccagtagctgtgggaaaggaatgggcacctctgaacccaggcactttaaacttctatagaaaagatatcgtgtacataggaactggtgtagataagcatgcaattatggcatcatttaggcctgtatttctatggaaagatacaaaaaggatctcagtttggggcctgtcctaatgccttcttccctaacatcaccacacacacccctgtcggcatcctggagcaattgagaccggacacccacagagctgttgtcctcccagcaacaagatggtgtggttatcttgggtcatttggatgttttgtttgtttctgtgtgtcagactgtaagggctgagctttctgtgcttctaggtggagctggaacaattcagattcacccgccctgatgctaaggaaaccctgacgtatgtactagatggcagggcactgggggtcaggctgaaggctgagcaacacctctctgccctccctccctttgtcccatctcccagcgacttccaatattcatgtttctgagaattgtgtccctcttcaggttccctcttggtgcctaacctggattagtaatgtgcattcaggtgaattttcagctgaggctctgagaactggtactctcagtgtgttctggtcatcttgtggcttagttgtagaagcaggtgtgtctcttgcctctgcttgcctcctactgcacactcagcacccaggactggaatcaccgactactgaatctcctacatgtattgctgctacttcaagctcctccacttgaaaccttatgattttcccaaggggagatgggacagtgtcatctaaatattccgaatgtttggccttctgagaaaagagcttctagtaattgaaccatgggaaacccagcttctggagggttggccgtggggctgtgtacatgtgtgtgcccaggggtgagtgtttctcaggattcctaacgattcaaattaccgttgagtatatataaagaatgagtctctgtatggaagaacaaatgtgtgcattcacccccagtcacaatggtctccattgcatttcaaaggagaggatcagactatctgaatataaacacaatctgatgttaatttattctaagaacaccatcattttgattgtcctaaagaattctgcctttgtgaataccgtgttaaatttttttaaatttgtgacaggattgtagcaaattattatttaaggaaaataaattgtgtaaacatttaatgtggt

SEQ ID NO: 19597 - protein, 782 aa, Homo sapiens
MDICEGRLTCPLNSAVVLASYAVQSHFGDYNSSIHHPGYLSDSHFIPDQNEDFLTKVESLHEQHSGLKQSEAESCYINIARTLDFYGVELHSGRDLHNLDLMIGIASAGVAVYRKYICTSFYPWVNILKISFKRKKFFIHQRQKQAESREHIVAFNMLNYRSCKNLWKSCVEHHTFFQAKKLLPQEKNVLSQYWTMGSRNTKKSVNNQYCKKVIGGMVWNPAMRRSLSVEHLETKSLPSRSPPITPNWRSPRLRHEIRKPRHSSADNLANEMTYITETEDVFYTYKGSLAPQDSDSEVSQNRSPHQESLSENNPAQSYLTQKSSSSVSPSSNAPGSCSPDGVDQQLLDDFHRVTKGGSTEDASQYYCDKNDNGDSYLVLIRITPDEDGKFGFNLKGGVDQKMPLVVSRINPESPADTCIPKLNEGDQIVLINGRDISEHTHDQVVMFIKASRESHSRELALVIRRRAVRSFADFKSEDELNQLFPEAIFPMCPEGGDTLEGSMAQLKKGLESGTVLIQFEQLYRKKPGLAITFAKLPQNLDKNRYKDVLPYDTTRVLLQGNEDYINASYVNMEIPAANLVNKYIATQGPLPHTCAQFWQVVWDQKLSLIVMLTTLTERGRTKCHQYWPDPPDVMNHGGFHIQCQSEDCTIAYVSREMLVTNTQTGEEHTVTHLQYVAWPDHGVPDDSSDFLEFVNYVRSLRVDSEPVLVHCSAGIGRTGVLVTMETAMCLTERNLPIYPLDIVRKMRDQRAMMVQTSSQYKFVCEAILRVYEEGLVQMLDPS

SEQ ID NO: 19598 - DNA, 6256 bp, Homo sapiens
gaaaaggggaactagatgtgcagggtcgtagaattgtggccagtgggtggaggctacagggaggcagattttagcacagaatgagtaataaacagtgtgtgtctgtctcttctaaaattcactggttgacaactgacaccccacccccaccttccatcttaagaagggtggtatcccgttgtggagtagaatgtaactatgaccttctgggatttgggcaccagatttatcttactgcaacaggagccatggtgggagccacccccataactcttatagagctggtgggccaccaggactgccagatatatatatatattttttgaaacagggtcttgctatgttgcccagactggcctcaaactcctggactcaaaggatcctccctcagcctcctgagtagctgggattataggcacataccaccacgactagctgccagatcatcttatcttggaccaggcttctaccattaattcacatgctttaaaaaaattaaaaattaaaaaaatgaaaaataaaaaaacttaaaagattttacctatattcctggaacatagttatcttaccccagctttgtagttcctgtttaaggaaattccctctgaaggaaattttagctctcaagagtcaaagaagatgtatagaggtggtatctgttagtttttgtttgtttgttaaggatctaggcagagaggtcattacatttttctgaagttgaggtcacaggtggggtacccacaagagaggtcattacatttctgaagttaggcatcccaggcatctcttctaaagaactatcctgtattctaattgttaaataaatatcttcttcattgtgagcctccacaactgctgtttctgataaatttagatcattctttgcagaattttatatactggcaatctcaaaactaggctccttcaagattcctaggaagtctcccaagctcgggttgggttccactattctagtttctttgtgtatgatgccatggggttgactcagaaactttgctcaatatatgacaaggcagcatttggtgagtggtgatctccacgtttatcttctcatttatatccctaggaagacatactgattagctgagcttgtcaatgaaagcccgggttcaccattggattatctataactctcctttctctttttttctctcagtagcattgtaggaggagagaacacttaattctggttgaatgtcagcttggataaacatagaaacaaactagaaagaactgatgatgttctcctaggtggaaaagatggagattccaataccaaataggtgtgaatcagcaaatgtatgttatactgtctctcaaggccaggtgttcaatacattgtgggtagttaattataatcaaagtaataatattagagttacgacatggatcctaagctttttagccattaaacatataagaaatttgtagcatagtgagtttttttataacatgatcatccaggttaaaataagacacaattgacctcacatatcctatctgagctccgattttgtcatctgtaaaaatggagatagtggtacctaccttacagagttatgaggctgagataagagggaaagttacaaagtagtaccatgtacaaagcccggaactgtgcaaataggaggttgtaatactgtttgaagcattcccatctcaaaaagccagttccttggcctttataaatttgaaggaataatgaaactgatttgtttcaattgtgaaaattatttctctcctgcccctgtgcacttctgccctgtctatattagatttcaagaggtttcccttttgtcatcttggccagacaatggaatgtctatcccgtttgaatctgggtttaaaaaagcatgggagctagtggccaagtgtcacatgtatgccgcatccctaaatagaagtctccccagggcgcttcctgacctgcgcaatgctgccgaaggcctcctttccccgctccccaggcagaggagcaaagtcacaggctgaggggcctgccacgacttgcccacaaaacaggtctggagtttggaagttacatttgctggttgcccagagatgagtgcagaattcagcttggaggtcctggaaacttctagtttactgatgtttatgcttttgctcatgcacccacagttcctgggacacagaatgctcacctgggggtttgtaccccagccaagaaggtgtcttcacagactcccctccttttagcaacttcatgcagatggagcttgggtggatggatcctggcacagtgttcagaacagtggccctgccagtgtgtgggcgccgcttgtgcagagcccctgtgggttctggtcctcaagggcaggggcgctcactgacagcggaacccatagtaccagcccatctttggtgggctgtttccaccccattcatccctgctcagctcttcataggacagcctgtgctggcagaaaattgcccccaccagtcaagacgtagggcatcaacatgagccatcagtaatgacagggcagctttgcagagcgtaaggtagcacctgataccttggaccaaaaccgtatttttatgtatctttcacatgtacagctcttgtctttgactcatcaaactttcttttttttttttttttgcttatttcagtttgagtatgaattaatgaaaacaattgtttcataggcacttgtatttcttacaactgaagatggatatttgcgaaggaaggttaacctgccctcttaactcagcagtggttctagcgtcctatgccgtacaatctcattttggagactataattcttccatacatcatccaggctatctttccgatagtcactttatacccgatcaaaatgaggactttttaacaaaagtcgaatctctgcatgagcagcacagtgggctaaaacaatcagaagcagaatcctgctatatcaacatagcgcggaccctcgacttctatggagtagaactgcacagtggtagggatctgcacaatttagacctaatgattggaattgcttccgcgggtgttgctgtgtaccgaaaatacatttgcacaagtttctatccttgggtgaacattctcaaaatttctttcaaaaggaaaaagttcttcatacatcagcgacagaaacaggctgaatccagggaacatattgtggccttcaacatgctgaattaccgatcttgcaaaaacttgtggaaatcctgtgttgagcaccatacgttctttcaggcaaagaagctactacctcaggaaaagaatgttctgtctcagtactggactatgggctctcggaacaccaaaaagcgaagtcctcggctccggcacgaaatccgaaagccacgccactcttctgcagataaccttgcaaatgaaatgacctacatcacggaaacggaagatgtattttacacgtacaagggctctctggcccctcaagacagcgattctgaagtttctcagaaccgaagcccgcaccaagagagtttatccgagaacaatccggcacaaagctacctgacccagaagtcatccagttctgtgtctccatcttcaaatgctccaggctcctgctcacctgacggcgttgatcagcagctcttagatgacttccacagggtgaccaaagggggctccaccgaggacgccagccagtactactgtgacaagaatgataatggtgacagctacttagtcttgatccgtatcacaccagatgaagatggaaaatttggatttaatcttaagggaggagtggatcaaaagatgcctcttgtggtatcaaggataaacccagagtcacctgcggacacctgcattcctaagctgaacgaaggggatcaaatcgtgttaatcaatggccgggacatctcagaacacacgcatgaccaagtggtgatgttcatcaaagccagccgggagtcccactcacgggagctggccctggtgatcaggaggagagctgtccgctcatttgctgacttcaagtctgaagatgaactgaaccagcttttccccgaagccattttccccatgtgtccggagggtggggacactttggagggatccatggcacagctaaagaagggcctcgaaagcgggacggtgctgatccagtttgagcaactctacagaaaaaagccaggtttggccatcacgtttgcaaagctgcctcaaaatttggacaaaaaccgatataaagatgtgctgccttatgacaccacccgggtattattgcagggaaatgaagattatattaatgcaagttacgtgaacatggaaattcctgctgctaaccttgtgaacaagtacatcgccactcaggggcccctgccgcatacctgtgcacagttttggcaggttgtctgggatcagaagttgtcactcattgtcatgttgacgactctcacagaacgagggcggaccaaatgtcaccagtactggccagatccccccgacgtcatgaaccacggcggctttcacatccagtgtcagtcagaggactgcaccatcgcctatgtgtcccgagaaatgctggtcacaaacacccagaccggggaagaacacacagtgacacatctccagtacgtcgcatggcctgaccacggtgtgcccgatgactcctccgactttctggaatttgtaaactatgtgaggtctctgagagtggacagcgagcccgtcctagttcactgcagtgctggaataggtcgaaccggtgtgttggtcactatggaaacagccatgtgcctaactgagaggaacctgcccatttacccactggatattgtccgaaaaatgcgagaccagcgcgccatgatggtgcagacatcaagccagtacaagtttgtgtgtgaagcgattcttcgtgtgtatgaagaaggtttagtccaaatgctggatcctagttaagacaactgtgaaaaagttcattcctctttcccaagggcatcctccttgaaagaggaggacagacctctctggaagcagcaagaggaaccagtagctgtgggaaaggaatgggcacctctgaacccaggcactttaaacttctatagaaaagatatcgtgtacataggaactggtgtagataagcatgcaattatggcatcatttaggcctgtatttctatggaaagatacaaaaaggatctcagtttggggcctgtcctaatgccttcttccctaacatcaccacacacacccctgtcggcatcctggagcaattgagaccggacacccacagagctgttgtcctcccagcaacaagatggtgtggttatcttgggtcatttggatgttttgtttgtttctgtgtgtcagactgtaagggctgagctttctgtgcttctaggtggagctggaacaattcagattcacccgccctgatgctaaggaaaccctgacgtatgtactagatggcagggcactgggggtcaggctgaaggctgagcaacacctctctgccctccctccctttgtcccatctcccagcgacttccaatattcatgtttctgagaattgtgtccctcttcaggttccctcttggtgcctaacctggattagtaatgtgcattcaggtgaattttcagctgaggctctgagaactggtactctcagtgtgttctggtcatcttgtggcttagttgtagaagcaggtgtgtctcttgcctctgcttgcctcctactgcacactcagcacccaggactggaatcaccgactactgaatctcctacatgtattgctgctacttcaagctcctccacttgaaaccttatgattttcccaaggggagatgggacagtgtcatctaaatattccgaatgtttggccttctgagaaaagagcttctagtaattgaaccatgggaaacccagcttctggagggttggccgtggggctgtgtacatgtgtgtgcccaggggtgagtgtttctcaggattcctaacgattcaaattaccgttgagtatatataaagaatgagtctctgtatggaagaacaaatgtgtgcattcacccccagtcacaatggtctccattgcatttcaaaggagaggatcagactatctgaatataaacacaatctgatgttaatttattctaagaacaccatcattttgattgtcctaaagaattctgcctttgtgaataccgtgttaaatttttttaaatttgtgacaggattgtagcaaattattatttaaggaaaataaattgtgtaaacatttaatgtggt

SEQ ID NO: 19599 - protein, 737 aa, Homo sapiens
MDICEGRLTCPLNSAVVLASYAVQSHFGDYNSSIHHPGYLSDSHFIPDQNEDFLTKVESLHEQHSGLKQSEAESCYINIARTLDFYGVELHSGRDLHNLDLMIGIASAGVAVYRKYICTSFYPWVNILKISFKRKKFFIHQRQKQAESREHIVAFNMLNYRSCKNLWKSCVEHHTFFQAKKLLPQEKNVLSQYWTMGSRNTKKRSPRLRHEIRKPRHSSADNLANEMTYITETEDVFYTYKGSLAPQDSDSEVSQNRSPHQESLSENNPAQSYLTQKSSSSVSPSSNAPGSCSPDGVDQQLLDDFHRVTKGGSTEDASQYYCDKNDNGDSYLVLIRITPDEDGKFGFNLKGGVDQKMPLVVSRINPESPADTCIPKLNEGDQIVLINGRDISEHTHDQVVMFIKASRESHSRELALVIRRRAVRSFADFKSEDELNQLFPEAIFPMCPEGGDTLEGSMAQLKKGLESGTVLIQFEQLYRKKPGLAITFAKLPQNLDKNRYKDVLPYDTTRVLLQGNEDYINASYVNMEIPAANLVNKYIATQGPLPHTCAQFWQVVWDQKLSLIVMLTTLTERGRTKCHQYWPDPPDVMNHGGFHIQCQSEDCTIAYVSREMLVTNTQTGEEHTVTHLQYVAWPDHGVPDDSSDFLEFVNYVRSLRVDSEPVLVHCSAGIGRTGVLVTMETAMCLTERNLPIYPLDIVRKMRDQRAMMVQTSSQYKFVCEAILRVYEEGLVQMLDPS

SEQ ID NO: 19600 - DNA, 4151 bp, Homo sapiens
gagcgagcttccgcgccgcccgcacgcgcgacctacctgggcgctccgcgcccccggatgctgcaggttattcagcgatagttatgacctcccggttacgtgcgttgggtggaagaattaataatatacgcacctcggagttacccaaagagaaaactcgatcagaagtcatttgcagcatccactttttagatggcgtggtacagacctttaaagttactaaacaagacactggccaggttcttctggatatggtgcacaaccacctgggtgtgactgaaaaggaatattttggtttacagcatgatgacgactccgtggactctcctagatggctggaagcaagcaaagccatcaggaagcagttaaaaggaggtttcccctgtaccctgcattttcgagtaagattttttatacctgatcccaacacactgcagcaagaacaaaccaggcacttgtatttcttacaactgaagatggatatttgcgaaggaaggttaacctgccctcttaactcagcagtggttctagcgtcctatgccgtacaatctcattttggagactataattcttccatacatcatccaggctatctttccgatagtcactttatacccgatcaaaatgaggactttttaacaaaagtcgaatctctgcatgagcagcacagtgggctaaaacaatcagaagcagaatcctgctatatcaacatagcgcggaccctcgacttctatggagtagaactgcacagtggtagggatctgcacaatttagacctaatgattggaattgcttccgcgggtgttgctgtgtaccgaaaatacatttgcacaagtttctatccttgggtgaacattctcaaaatttctttcaaaaggaaaaagttcttcatacatcagcgacagaaacaggctgaatccagggaacatattgtggccttcaacatgctgaattaccgatcttgcaaaaacttgtggaaatcctgtgttgagcaccatacgttctttcaggcaaagaagctactacctcaggaaaagaatgttctgtctcagtactggactatgggctctcggaacaccaaaaagtcggtaaataaccaatattgcaaaaaggtgattggcgggatggtgtggaacccagccatgcggagatccttatcagtggagcacttagaaaccaagagtctgccttctcgttcccctcccattactcccaactggcgaagtcctcggctccggcacgaaatccgaaagccacgccactcttctgcagataaccttgcaaatgaaatgacctacatcacggaaacggaagatgtattttacacgtacaagggctctctggcccctcaagacagcgattctgaagtttctcagaaccgaagcccgcaccaagagagtttatccgagaacaatccggcacaaagctacctgacccagaagtcatccagttctgtgtctccatcttcaaatgctccaggctcctgctcacctgacggcgttgatcagcagctcttagatgacttccacagggtgaccaaagggggctccaccgaggacgccagccagtactactgtgacaagaatgataatggtgacagctacttagtcttgatccgtatcacaccagatgaagatggaaaatttggatttaatcttaagggaggagtggatcaaaagatgcctcttgtggtatcaaggataaacccagagtcacctgcggacacctgcattcctaagctgaacgaaggggatcaaatcgtgttaatcaatggccgggacatctcagaacacacgcatgaccaagtggtgatgttcatcaaagccagccgggagtcccactcacgggagctggccctggtgatcaggaggagagctgtccgctcatttgctgacttcaagtctgaagatgaactgaaccagcttttccccgaagccattttccccatgtgtccggagggtggggacactttggagggatccatggcacagctaaagaagggcctcgaaagcgggacggtgctgatccagtttgagcaactctacagaaaaaagccaggtttggccatcacgtttgcaaagctgcctcaaaatttggacaaaaaccgatataaagatgtgctgccttatgacaccacccgggtattattgcagggaaatgaagattatattaatgcaagttacgtgaacatggaaattcctgctgctaaccttgtgaacaagtacatcgccactcaggggcccctgccgcatacctgtgcacagttttggcaggttgtctgggatcagaagttgtcactcattgtcatgttgacgactctcacagaacgagggcggaccaaatgtcaccagtactggccagatccccccgacgtcatgaaccacggcggctttcacatccagtgtcagtcagaggactgcaccatcgcctatgtgtcccgagaaatgctggtcacaaacacccagaccggggaagaacacacagtgacacatctccagtacgtcgcatggcctgaccacggtgtgcccgatgactcctccgactttctggaatttgtaaactatgtgaggtctctgagagtggacagcgagcccgtcctagttcactgcagtgctggaataggtcgaaccggtgtgttggtcactatggaaacagccatgtgcctaactgagaggaacctgcccatttacccactggatattgtccgaaaaatgcgagaccagcgcgccatgatggtgcagacatcaagccagtacaagtttgtgtgtgaagcgattcttcgtgtgtatgaagaaggtttagtccaaatgctggatcctagttaagacaactgtgaaaaagttcattcctctttcccaagggcatcctccttgaaagaggaggacagacctctctggaagcagcaagaggaaccagtagctgtgggaaaggaatgggcacctctgaacccaggcactttaaacttctatagaaaagatatcgtgtacataggaactggtgtagataagcatgcaattatggcatcatttaggcctgtatttctatggaaagatacaaaaaggatctcagtttggggcctgtcctaatgccttcttccctaacatcaccacacacacccctgtcggcatcctggagcaattgagaccggacacccacagagctgttgtcctcccagcaacaagatggtgtggttatcttgggtcatttggatgttttgtttgtttctgtgtgtcagactgtaagggctgagctttctgtgcttctaggtggagctggaacaattcagattcacccgccctgatgctaaggaaaccctgacgtatgtactagatggcagggcactgggggtcaggctgaaggctgagcaacacctctctgccctccctccctttgtcccatctcccagcgacttccaatattcatgtttctgagaattgtgtccctcttcaggttccctcttggtgcctaacctggattagtaatgtgcattcaggtgaattttcagctgaggctctgagaactggtactctcagtgtgttctggtcatcttgtggcttagttgtagaagcaggtgtgtctcttgcctctgcttgcctcctactgcacactcagcacccaggactggaatcaccgactactgaatctcctacatgtattgctgctacttcaagctcctccacttgaaaccttatgattttcccaaggggagatgggacagtgtcatctaaatattccgaatgtttggccttctgagaaaagagcttctagtaattgaaccatgggaaacccagcttctggagggttggccgtggggctgtgtacatgtgtgtgcccaggggtgagtgtttctcaggattcctaacgattcaaattaccgttgagtatatataaagaatgagtctctgtatggaagaacaaatgtgtgcattcacccccagtcacaatggtctccattgcatttcaaaggagaggatcagactatctgaatataaacacaatctgatgttaatttattctaagaacaccatcattttgattgtcctaaagaattctgcctttgtgaataccgtgttaaatttttttaaatttgtgacaggattgtagcaaattattatttaaggaaaataaattgtgtaaacatttaatgtggt

SEQ ID NO: 19601 - protein, 913 aa, Homo sapiens
MTSRLRALGGRINNIRTSELPKEKTRSEVICSIHFLDGVVQTFKVTKQDTGQVLLDMVHNHLGVTEKEYFGLQHDDDSVDSPRWLEASKAIRKQLKGGFPCTLHFRVRFFIPDPNTLQQEQTRHLYFLQLKMDICEGRLTCPLNSAVVLASYAVQSHFGDYNSSIHHPGYLSDSHFIPDQNEDFLTKVESLHEQHSGLKQSEAESCYINIARTLDFYGVELHSGRDLHNLDLMIGIASAGVAVYRKYICTSFYPWVNILKISFKRKKFFIHQRQKQAESREHIVAFNMLNYRSCKNLWKSCVEHHTFFQAKKLLPQEKNVLSQYWTMGSRNTKKSVNNQYCKKVIGGMVWNPAMRRSLSVEHLETKSLPSRSPPITPNWRSPRLRHEIRKPRHSSADNLANEMTYITETEDVFYTYKGSLAPQDSDSEVSQNRSPHQESLSENNPAQSYLTQKSSSSVSPSSNAPGSCSPDGVDQQLLDDFHRVTKGGSTEDASQYYCDKNDNGDSYLVLIRITPDEDGKFGFNLKGGVDQKMPLVVSRINPESPADTCIPKLNEGDQIVLINGRDISEHTHDQVVMFIKASRESHSRELALVIRRRAVRSFADFKSEDELNQLFPEAIFPMCPEGGDTLEGSMAQLKKGLESGTVLIQFEQLYRKKPGLAITFAKLPQNLDKNRYKDVLPYDTTRVLLQGNEDYINASYVNMEIPAANLVNKYIATQGPLPHTCAQFWQVVWDQKLSLIVMLTTLTERGRTKCHQYWPDPPDVMNHGGFHIQCQSEDCTIAYVSREMLVTNTQTGEEHTVTHLQYVAWPDHGVPDDSSDFLEFVNYVRSLRVDSEPVLVHCSAGIGRTGVLVTMETAMCLTERNLPIYPLDIVRKMRDQRAMMVQTSSQYKFVCEAILRVYEEGLVQMLDPS

SEQ ID NO: 19602 - DNA, 4963 bp, Homo sapiens
gcgagcgagcttccgcgccgcccgcacgcgcgacctacctgggcgctccgcgcccccggatgctgcaggttattcagcgatagttatgacctcccggttacgtgcgttgggtggaagaattaataatatacgcacctcggagttacccaaagagaaaactcgatcagaagtcatttgcagcatccactttttagatggcgtggtacagacctttaaagttactaaacaagacactggccaggttcttctggatatggtgcacaaccacctgggtgtgactgaaaaggaatattttggtttacagcatgatgacgactccgtggactctcctagatggctggaagcaagcaaagccatcaggaagcagttaaaaggttggtgtgatcttttcatttcagtcgaacattaggtgttagtgtatcacagcctgtttctcccctccaatcgtcagtgcctgtgacatctggtacctgtagttccgggtgtccaggagtcatgagtgagccgacttctccctgtctgacttctgagtcagcagagatgcttccagatcagccctctaggatccgccccagctgtgggaaagaaggggaagggtgagagtaggcagctcagagcgagggaacccacatttctgtattcaaggaaggaaaaggaaggaggatggccttacttagcccgatgtgagagccagggtggacaagagagacagggagatagacaaacacaaacacctcatactttccaacagcatagtcgcgttcacggaaaaccgaaccataagtaggtaatgtcaccaatataaaagattaagtcttccaaactaccgcttatctctcaggagtgaatcccagtgctgcagctaactcccagttcggtggccagtcaggccacaccatagtccaccctctgccctgatctgctctcggcctgatgttccaacattgccagcattgttcccctttatgccactcatgccccagaccaacctggctgatctgcagggcctcccagtgcctcccctcagtctgttccatctgctgggaatgcttttccctcccacttccctctgtcgaaatcctgccttttttcaaggctgctcagatctcatttcctctcctagaaactgtgggtggctccctcgacattctcttagatttaccatcacccgtgttggggttctgaatgctcttgtcctcatctgtgttagttgcctttagttccctctcagaactgcaagttccttgaggttaggacccttgttatatttctctctgcatccccaaggtgcccaacacacacaaaaagtggccagtgcatggcggagtggagaagggcaagtggatttgcgcacgcaggtgcgcatacacaggatgccccccaacacacacacgcacacctgcctcagcacccaggcaggaagaagtagacacagtggccttcgctcccgtctcactgctgcccccacagggagcccgattctcaaagttcttccctcccatgagctgcatcctctgcgttcagaagtacctgtgggagcctcagggccacttgcagacaaatacctgcctcatccaagtccccaggaatgagtccacacaaggcatgaataggtgttgtcattcattctctcattaactcctgctttcggtgaacgtatcctgagctcagactgtggcaaggtgctgggctaagccctgggaatccagtccagatcaaatttggactctcccctcaaggagcccacagccaagtgtgcagacagcccagagggttcgacattctatgataatagtaagcacacgataggggacagccagaaagaaaaagaggctatgcctgcagcgcagagatgaaaagttttagaagagggggaggggaggtgaacaagcatcccaaggcagcaggaggacattgttctcccctgatgtgcagattgtcatagcgccatccgctggtacctagacatgtggacaggtgtactcaggggcacacccccgttagggattctttgaacacacgctgcagatgaagaaagaaagcactaaagagcagggagggtagagctcaggatgatctcaggtagaggaggagatctagcaggctagtgagaaggacttgagttgcagagagcaagaaagtgctcagtgcctagatagggctggcgaatatttactgagggatgatggtgaaattgacatgaagatcttgggatcttagcagcacaatctgatcttctcctgttgccgtctctgtgagaagaaatggactaattttatccacacaagcaaattgactctagatgttgatgcataaagccgtatttgaatatgttcattgtgtgatttactagtatactaacttaatatactttacattaaaagcatgagatattttctagtttaaaaatgattttgaaatgtggtatagcagaatcaaagatctcattactctaattctggttttgtcaccagctgtgtgacctaaggcaagtcacctctaattggcttatctgtaaaatggggctaccagtagcagcgtagcccactcatagtcatggtggtgttgaaatgcaggaatgtacatgaaaatgcttgaaacttataaatggctacacaaacgcaggctattatttctttgtatattttgcataataatgccgatttaaggattttttaaattcctaatacagatgacggagtgcaatgtttaaacacagccctaagataaacgtgtgctaggaagtagatgataactcagtctgtgctgatgttgcataaatgttttactttttgaagacttggagatttctgaaacaactaacttatgtactccatgtttgaaattagcccttttataatggaaaaagctatggttgagtgaaaaaatgcatcacttatggaagagaagcaacttacatacattgactttgtcaaagggaaaatttaatttgtttttgaaaaatgttgtaggaggtttcccctgtaccctgcattttcgagtaagattttttatacctgatcccaacacactgcagcaagaacaaaccaggtaacaacatttttttaaagttttctgtttagtgtataaaaatgagtaaccactaaaaatgtactcttcattttattactatggccaaataacttcatttgggtgtaactacaccaacaatgatgatccaagtaaaaatctggggtgcacatactgacattttaatcacctaatgagttttcagtcttgggcctgcttctcttatctcctgatttgctgccattcccagcatactcccatctgccacctcctacctctcccacctccttccacctccctggcctctcctgcctgctgaacacactgtgctcaaaggacaaaaagtcattttctaccaatgtaggcaggatgtagaagacaaatttgtaaaatagtcatccacaggtcaaatagcatgatgtctctgaagagctaaaatcaaggctcttgaagataacaagacatctcttgttataagaattttctttctttttttttgttttgagacggagtctctctcttcaccctggctggagcgcagaggtgcgagcttggctcactgcaacctccgcctcccaggttcaagcgatcctcccacctcagcctcccgagtagctaggattacaggcaggtaccaccatgcctggctaattttttttttttttttttttaacggagatggggtttccatgtcgtccaggctggtctcaaactcctgacctcaagtgatctgcctgcctcagcctcccaaggtgctgggattataggcatgagtcaccaggccagctttgttataagaattttctatcagatccccagtttgcaagagttagaaaggagagcaggctggattcagcttgtcttctcagtgaatcagcaagtacaggaaatatgtgaaccagataagggaaagagggctgtgataggagttgtttacccctcagggcttggagtctctcccaaccctgggctggtactggggtttttctaggtgtgagggacagagtaattggaatggagtaggagagtgtagcacaagaaagttgttgctgttttaacacagactgcacaaacaaactttccctcccctgtggcaacgttaagcccttttattattgatccatttatttttcttagggagggaagctatagaaaaaaagcaatagatgcttagtattgaatcctgttttacattcatcgtggccaaaagacataatcaaggaggcagcattaactcagacacagagtgttgccttgttaattttttttagcagtaattacatcacattttaacttgtaatatgttgaaaggccaaatattaatctgttactgtattttgccttctttgtgcacctcctccctctactatagcagacactgggaatttgactgtattttttattactttttaagccaatgtccaaggtgtctggtatgacacatccggtgaccacacagaagcatgccctgtcctctgagttttccccataccagctctttatgctggtaaactggggataggatagaaacactcagcccagcaggttacttcataagctgacggacacagagctggtgatgaaatctataagaatgtgtttgaaatgaccctaccaaggtttcctcaggccagtactaaataacacactctgggccaggcatggtggctcatacttgtgagcttcccagcacttcaggaacccaaggcgggagggtcacttgaggccaggagtttgaaaccagcctgggccacatagcaagaccctgcctctacaaaaataaaaataaaaaagtagtcaggtgtggtggtgcatgtgtcagcatctcaggaggctaactaggaggatcacttgagcccagaagttcaaggctgcagtgagccatgatcaagccatgtactccagcctaagtgatcgactgagaccctgttgc

SEQ ID NO: 19603 - protein, 107 aa, Homo sapiens
MTSRLRALGGRINNIRTSELPKEKTRSEVICSIHFLDGVVQTFKVTKQDTGQVLLDMVHNHLGVTEKEYFGLQHDDDSVDSPRWLEASKAIRKQLKGWCDLFISVEH

SEQ ID NO: 19604 - DNA, 232 bp, Homo sapiens
ggcatttcctgggcctggcacgaaactccagagccaataaatcctccccgttccgcggacgatatggaatgttacaggttattcagcgatagttatgacctcccggttacgtgcgttgggtggaagaattaataatatacgcacctcggagttacccaaagagaaaactcgatcagaagtcatttgcagcatccactttttagatggcgtggtacagacctttaaagttact

SEQ ID NO: 19605 - protein, 45 aa, Homo sapiens
MTSRLRALGGRINNIRTSELPKEKTRSEVICSIHFLDGVVQTFKV

SEQ ID NO: 19606 - DNA, 600 bp, Homo sapiens
tactttggaagccgattgaggcaagatttctgagacaagttctgaggtttccaagacagactttagcttttctaaatcattttttaagtgctatgtaaaggattacagcattcaattctccagtagtccaacagcatcatggtggagcaagagggattatcctgtgggcatcctccggaaaactgtatatacccaaaaggattgaagatcggtatacatggatatgcatacaccattcacaacggctaaaaggtagaaacaacccaatgtccatgaatggatgaatggataaacaagttgtgtgatatatcaatacagcagactattactcagccataaaaaggaatgaagttctgataaatgtgaccatgtggatgaaccttgaaaatattatgttaagtgaaagaagccagacaaaaggtcaaatattattattattccatttatatgaaatatccagaataggcaaatccatagagacagaaagcagattggtggttgccaggggctaagggagtagagaatggggagtgactgcttcatggtacagggcttccttttggggtggtgaaaatgctctgcaactagacagtagtgacg

SEQ ID NO: 19607 - protein, 36 aa, Homo sapiens
MVEQEGLSCGHPPENCIYPKGLKIGIHGYAYTIHNG

SEQ ID NO: 19608 - DNA, 4494 bp, Homo sapiens
cagtgcactcggctccgggagaggcgagcagcgccggtgagccccgcagcagcgcacccggccgcggagccccgcgatggagatggcagaggcggaattgcacaaggaaaggctgcaagccatagcagaaaaaagaaagaggcagactgaaatagaaggcaagcgacaacagcttgacgagcagatacttctgctgcagcattccaagtccaaagtgcttcgggagaaatggctgctgcagggcatacccgctggaactgccgaagaggaggaagccaggaggcggcagtctgaagaggatgagttcagagtcaagcaacttgaagataacattcagaggctggagcaagaaatacaaacgctagaaagtgaagagtcccagatatctgccaaagagcaaatcatcctagagaaactgaaggaaacagaaaaatccttcaaggactttcagaagggtttctccagtacggatggagctgtgtacgccatggaaattaatgtggagaaagacaaacaaacaggagagaccaagattctctctacatctaccattggcccagagggggtccatcagaaaggagtcaaagtctatgatgatggtaccaaagtagtgtatgaggtgcgctcaggaggcaccgtagtagaaaatggagtgcacaaattaagcacaaaggatgtagaagagcttattcagaaggctggacaatcaagcttaggaggagggcacgtgtctgaaaggactgtgattgcagatgggagcctcagccatcccaaggaacacatgctctgcaaagaagctaagttagaaatggtacataagtctaggaaagaccattcttccgggaacccagggcagcaggcccaagcccccagcgctgcagggccggaggcaaacttggatcagcccgtcaccatgatttttatgggctaccaaaatatcgaggatgaagaggagacgaaaaaggtgctaggctatgatgaaaccatcaaggctgaattggtcctcattgatgaagatgatgagaagtcattgagggagaagacagtgacggacgtgtccactattgacgggaacgcggctgagcttgtgtccgggaggccggtctcagacaccacagagccctcatccccagaagggaaggaagagagcctagctacagagccagccccaggtacccaaaagaaaaagcgctgtcaatgctgtgttgtcatgtgaccacttctttcttctcctttcttctgggcagcctgtactctccaccactcacgtagacctcactgtaccactaactgcaatactgtgaactggaagcaaacacctgccttgccttgcagttgaattgctttgatctctctcattttttttccttttcctcacctgagagacaacgtgcatgtgtgtgcttcattctctccaagaacttgcttttcctctaaacctttccttgtgtcttcaagagtgaatcacttccttcctgctcgattggaatggactcttcgtatcagccagtgatatggtagccttaactcacttgactggaattgaacccattggcactgggggtttcattttgtagtgtgttcctgtaacgtagtcacacactgccatgtctctggtttctcacttgcctcctttgctgtggatctttgtttttatatcttgtgtggcaaaatgctgttggctctagccggttgctagtgtagccaaaagtggaccttacttagtctgtccgatctagggtgatgctttttgctgccttacataagcttccagattacagtattgtgcattcatggctttctttctgttaaaactgaaatgaagtcaatgtagaagaacccagagcttgtcacagctgaaatgtagggactgattccataacctgcccatcagcggttgtctctctttctatggtttaaccgatgaaccctttatataagaagcaccattttaaaatttctaaggacatgaaacaaacattgtttgaagcatcagtagcaattgatctccaaacttaggcaaattcacaagccttgtttctattctcttaaaaaaatgtaaatttttatattgtttcttttttctggatattttctggtcatgttaatctattttcaatgaggagatcatcttgagaagtatctttgcagtgaccatatttctaaaacagtctgtccaacctacaatggttgccatgatgctcccacttcatcatggatggtgctgtaatgcattaactgttcatctcctccccagttgattacaaagccttgcatccatactcttttctttctggccccatgagaaagagaatgttttaggtaacttcaacttgtaggtttatctgcccttcaaaaaaaaaaactttaaaaaacttttaaaaattaagaaagacctatcttctcaatgttaagcacttaatttcataacaaatattaagtggcacatagctgagcttcttagggcattgttttgtttttagcttctggagattccagaagagcaaagaatattttttatctagaacacaatgaacagtttttgaaataccttctcagcactcccccaaagcaaaaagccacatatgtagtaaaaccaaagggaaacaatttaataaaataacaatagtatagtaatgaaataaagatataacatgattactggttttaataagagttatcttaactttaagttatttgcccatttatagcattgttatgaattattcataaaattatgtcccacagtatatagttttgaaaaaacatatgatatactacatccagtctaacttctgtggaaagtagatcagaaaaaataagatagtcttgagagaattttattatagaagctgtctaatttgacctattttgcttgctcagtgctaaatctattgcttttttttaatctcctggcttgaaattatatttacttcaataggaaaggtaaaaacatcagtttttacttttcaaagttaattttctgaaataattgcattttaatgagcacaaaatgggtcattttatttttattatactcatcttgtttacacctatacataaacagaaaacgttaaagaagagaaaaataaaggagctaagttctgctgttgaagattatttcatccaaggcttggttttgaataactgagggaaatatctctaaatctcaagttcatcaaagcagctgcaatggaataaaattgctattttatcgagaaacctggtttggatgcttataaattccactactctcagcttcattttcctgagtacgtggtcactgaagcatcatttagacattacataaactggcatgcagataaacctatttacatagagggagaaaacagtttcaatgtcttggacaatctgttattttaatgatttacttaagaaagaaacaatctgaaagcttaccatagcttatcttttctactcacttggagattcaagctattcaatgtgagttttaaaaagttaagcacagttagtgagtgaaatggtagaatgtagaacctttaagcttgctggttgataaacagaatcaatcttccaggacagataattccctgaagggacctatccttgcataagtgaactagttactcatacagaaaatgatctgcacatcttactacaacactacacacaagaactaaaagattaatgattatctgtattctcttcactaattactattatgggggaataatgattagcaaattatatgaattcgagttctctctatacttttattagtaaagcttatcatttaatggactgaagtaagatgtgttacctttattcgagctatttgtagccacactaaatgaaggtgtgtttgaatatggcgcatatatttgcatatgtcccatcattttcttgtcataatggggaattcaggcttagccagtacttctatgggatgagacctataatcccacctatagcagcaagtaactacccttcatgatgatagtgtacatggagctgtgattatgaacatgctgcctttcctgctgccattggcattctctctgtaaattttattatgtgtggtatcacactctccaaaaatgcagggtatttggttacataaccaaactaattaaagaatcagtaatgaaattgcaaaaccatgatcttttttgagctaatgattagttgggctttcctttaaaataatataatcaggccgagtgcagcggctcacacctgtaatctcggcactttggaagtccgcggcgggtggttcacctgaggtcgggagttcaagaccagcctgaccaacatggagaaacccccatctctactaaaaaaaaaatacaaaattagccaggcgtgatggcgcatgcctgtaatcccagctactcgggagactgaggcaggagaatcgcttgaacctgggaggcaggggttgcaatgagccgagatgtgcactccagcctgggcaacaaagagcgaaactccatctcaaaaaaaaaaaaaaaa

SEQ ID NO: 19609 - protein, 379 aa, Homo sapiens; identical to SEQ ID NO: 4980

SEQ ID NO: 19610 - DNA, 506 bp, Homo sapiens
atgaagactcagcagctctctggcctccccagggaaaacagtgtctgtccccacggaaagaagaagggcagctggcagggccacttctgctgcaaaggtgattttactatgcagccactattaaaaaccacagatgtcattgatgatgatgatgatgatgatgatgatgatgatgatgatgatcatgatcatgatcatgatgatggtgatcatgatgatggtgatgaagacggcaatgactgcagaatttggggaagaggaagcctgaaggagtccacaaaacaatgtccttcaaatcagagtttattcaatgctgatttttcatttttctatggttctgtttggggacaagtcagtcaaataacttgaacctcagcgtcctcatctgcagaatgggaataataacagtttgtaaagttatcgtgaagatgacacaaaatgctggagacgttggacgtgctctatagaaaataatttctaaacaataaagaatattataataaaca

SEQ ID NO: 19611 - protein, 122 aa, Homo sapiens
MKTQQLSGLPRENSVCPHGKKKGSWQGHFCCKGDFTMQPLLKTTDVIDDDDDDDDDDDDDDHDHDHDDGDHDDGDEDGNDCRIWGRGSLKESTKQCPSNQSLFNADFSFFYGSVWGQVSQIT

SEQ ID NO: 19612 - DNA, 5257 bp, Homo sapiens
ccagaggctgagcccgggcgagcccgccgtgcgcacagctctgcccgccgcccctggagcggatccccagccgtccctgggcgttctcccgggttctagcaaagccccccggggtgcccatcagtttccttgggtgactacagcgtgtgttttttctttcctctttcccctgcctgtgtgcccttctccaggatggcagaggcggaattgcacaaggaaaggctgcaagccatagcagaaaaaagaaagaggcagactgaaatagaaggcaagcgacaacagcttgacgagcagatacttctgctgcagcattccaagtccaaagtgcttcgggagaaatggctgctgcagggcatacccgctggaactgccgaagaggaggaagccaggaggcggcagtctgaagaggatgagttcagagtcaagcaacttgaagataacattcagaggctggagcaagaaatacaaacgctagaaagtgaagagtcccagatatctgccaaagagcaaatcatcctagagaaactgaaggaaacagaaaaatccttcaaggactttcagaagggtttctccagtacggatggagatgcagtaaattacatttcctcccagcttcccgacctgccaatcctctgttcacgaacagcagaaccatcacctgggcaggacgggaccagcagagcggctggagtcgggtgggagaatgtgctgctaaaggaaggtgagtcagcctcgaacgccacagaaacatccggcccagacatgactatcaagaagcctccccagctttctgaggatgatatctggctaaaaagcgagggagacaactatagtgccaccctcctggagcctgctgccagctctctttccccagatcacaaaaacatggaaattgaggtgtctgttgcagaatgtaaaagtgttcctggaatcacctctaccccacatcccatggaccatccctccgctttctattcacccccgcataatggcctccttactgatcaccacgaatccctggataatgatgttgccagagagatccgctatctagatgaggtgctagaggccaactgctgtgattctgctgtggatggaacgtacaatggaacatcctccccagagcctggtgcagtggttctggtgggcggcctaagcccccctgtccacgaggcgacccagccagaacccactgaaagaacagctagccggcaggcacctcctcacatcgagctcagtaatagcagccctgaccccatggcagaggcagaaagaacaaatggccattcccccagccagcctagagatgcgctgggggacagcctgcaggtgcctgtcagccccagctccacaaccagctcacggtgttcttcccgagatggagagttcactctcaccacactgaaaaaggaggccaagtttgagctgcgtgccttccatgaggacaagaagccctccaagctctttgaggatgacgagcatgagaaagaacaatactgcattagaaaagtgaggccttcagaggagatgctggagctggaaaaggagaggagagagctcatccgcagccaggccgtcaagaagaatcctggcattgcagcaaaatggtggaatcccccgcaggaaaaaaccatcgaggagcagctggacgaggaacatctggagtcgcacaaaaagtacaaggagcgcaaagagagaagggcacagcaggaacagttgctgctgcagaagcagttacagcagcagcagcagcagcccccatcgcagctctgcacagcccctgcctcttctcatgaacgcgcaagcatgattgacaaagcaaaggaggacattgtcacagagcagatagatttctctgctgctcgcaaacaatttcagctgatggagaattccaggcaagcggtggccaagggccagagtacacccaggctgttctccatcaagcctttctacaggcctctggggtcagtcaactcagacaagccactgactaatccgagaccaccttctgtcgggggacctccagaagacagtggtgcctcagccgccaagggacagaaatcccccggtgccctggagaccccatcggcagcaggaagccagggcaacacagcctctcaggggaaggaagggccctacagcgagccttctaaacgtgggcccttatctaaactgtgggctgaggatggagaatttacgagcgcccgggctgtcctcactgtggtcaaggatgatgaccatgggattttggatcagttctcaagatctgtcaatgtctccttgacccaagaggagcttgactctggtctggacgaattgtcggtgaggtctcaggataccacagtcctggagaccctatccaatgatttcagcatggacaacatcagtgacagcggggcatccaatgagacaaccaatgccctccaggaaaattcactggctgatttttctctgccccagacaccacaaactgacaacccctcagagggccgaggagaaggcgtctccaagtcatttagtgatcatggtttctattccccttcctccacgctgggggactctccgttggttgatgaccccttggagtatcaggctggcctcctggtgcagaatgccattcaacaagccatagccgagcaggtggataaagctgtgtccaaaaccagcagggatggagcagagcaacagggacctgaagcgactgtagaggaagctgaagctgcggctttcggctcagaaaagcctcagagcatgtttgagccacctcaggtgtcttctcctgttcaagagaaaagggatgtattaccaaagattctgcctgctgaagacagggcgctcagggaaagggggcccccccagccactgccagctgtgcagcccagtggcccgattaacatggaggagaccaggcccgaaggaagctatttcagcaagtactcggaggcagctgagctgagaagcacagcctccctcctggccactcaagaatctgacgtgatggttgggcctttcaagctgaggtccaggaaacagcggactttgtccatgattgaggaagagatccgagcagctcaggaaagggaagaggagctgaagaggcagagacaagtcttgcagagtacgcagagccccaggacaaagaatgccccatcactgccctccagaacatgctacaaaactgctccagggaaaatagagaaagtcaaacctcctccatcccccaccactgaaggccccagcttgcagcctgacttagcccctgaagaggctgccggaacccagcggcccaagaatctgatgcagaccctcatggaagactatgagacacacaaatctaaaaggcgcgagagaatggatgatagtagttacacttctaagttactgtcttgcaaggtgacttccgaggtcctcgaggccacacgggttaatcgaagaaagagcgcactggctttgcgctgggaagcagggatctatgccaaccaggaggaagaagacaacgaataaacttccttcaacccaggaagcgtctttggtgcttgggagaccaagaaaccaagaaattaacaactgaaagcattttaatggactatttattaaagtgcaaacaaactcagcaatccttatgtagaccagaagctgcaatatacaatgatgaaaatgaaacgaaaaggaagtccccccatcagactctggacacccaggaatcaaaagagaaaggacttttttggtgactcaatcccagtgtctggtttggggccaatctacaatggatccaaaaggacaaaacatgttacaagcaaatcaacatagttgctgcaggcggaactgagaccagcctctctgggcgatgaaggacaatggtggtagggccacttagagagcagtagggcccaggctggtgcagcctacatggcacaggatatttccctgcaccagtttcccacctgtcacttgcagcatcagagggtgttgcattaactccattttctccagcagccataaaatgaatggcgtttctctccatatttgcccagaagaggcagttatgattccacttctcctacatttaattatttttaattgagaacaactcatgatcacaattcataaaatccatattttaagacaatagttcttcatgtcacaaacacaatctattctacatgaggaggctgagaaaggggaagagaaaaacaaaccaaatggatgatgttagctttaggatcgtgtctgcttataatattcactgatctgcagtttatgagaacacattttcacagttatgtttcttcataggaaaactatatttagtgggcaacaactatttttatgatgggatgggggagtatatacacgtatagaatctgtacgcgttgaacaacttggttcaagatggtgggggcatttttagagcggcaataattgaaaaaaaaggcgaactctgccttggagaggtagatgataagaaataaaaaggtgtttataactattttgtattataaagtgggccttagagataggaagaagaatgatggattccttttggatcaatcagaaaggaaacacgaaagaaaagtcaggaaggtagagagagaaaaagggagggaaggagaaagaatgggaataaaataaggaggtaagagatactatttttgctgagcaaccagtgtgtttcaggatgatacaaagaaaaatatagaatagaaataagtgcaggcttggaatcagctacaaatcctaaagatggggtgtgtgtggatgtgtgtgtgtgtgtgtgtacaccattgtgtgtttgtaaaatgtgtatgttcatgagtaagggtgtgtgtgtgtgtgtattaaaattccagagtgaccgtggcacttgggtgtacaggtaattcctccagagctgtttgctggcttcaggagtggagtgagaatttcttttttatgaaaagggatataaaggcaccgagctgatgcagtatttgtaatattaagttgacctaacaaggtatttgcatgagtcacaattacaaagttttgagcggttttgtaatttgacatttaggagagtctcctatttattctcatactttacattcatgcttagtatactatagaggatgccagctttaatctttctgtcatttaaagcaatatgataagggtattcaataattgggtgccctaaatttctggatgagaaaattttcaattctggccatgagaaagaaaaaaaaataaacagccttctttttttttcctttgtttt

SEQ ID NO: 19613 - protein, 1103 aa, Homo sapiens; identical to SEQ ID NO: 4976

SEQ ID NO: 19614 - DNA, 7520 bp, Homo sapiens
ccagaggctgagcccgggcgagcccgccgtgcgcacagctctgcccgccgcccctggagcggatccccagccgtccctgggcgttctcccgggttctagcaaagccccccggggtgcccatcagtttccttgggtgactacagcgtgtgttttttctttcctctttcccctgcctgtgtgcccttctccaggatggcagaggcggaattgcacaaggaaaggctgcaagccatagcagaaaaaagaaagaggcagactgaaatagaaggcaagcgacaacagcttgacgagcagatacttctgctgcagcattccaagtccaaagtgcttcgggagaaatggctgctgcagggcatacccgctggaactgccgaagaggaggaagccaggaggcggcagtctgaagaggatgagttcagagtcaagcaacttgaagataacattcagaggctggagcaagaaatacaaacgctagaaagtgaagagtcccagatatctgccaaagagcaaatcatcctagagaaactgaaggaaacagaaaaatccttcaaggactttcagaagggtttctccagtacggatggagatgcagtaaattacatttcctcccagcttcccgacctgccaatcctctgttcacgaacagcagaaccatcacctgggcaggacgggaccagcagagcggctggagtcgggtgggagaatgtgctgctaaaggaaggtgagtcagcctcgaacgccacagaaacatccggcccagacatgactatcaagaagcctccccagctttctgaggatgatatctggctaaaaagcgagggagacaactatagtgccaccctcctggagcctgctgccagctctctttccccagatcacaaaaacatggaaattgaggtgtctgttgcagaatgtaaaagtgttcctggaatcacctctaccccacatcccatggaccatccctccgctttctattcacccccgcataatggcctccttactgatcaccacgaatccctggataatgatgttgccagagagatccgctatctagatgaggtgctagaggccaactgctgtgattctgctgtggatggaacgtacaatggaacatcctccccagagcctggtgcagtggttctggtgggcggcctaagcccccctgtccacgaggcgacccagccagaacccactgaaagaacagctagccggcaggcacctcctcacatcgagctcagtaatagcagccctgaccccatggcagaggcagaaagaacaaatggccattcccccagccagcctagagatgcgctgggggacagcctgcaggtgcctgtcagccccagctccacaaccagctcacggtgttcttcccgagatggagagttcactctcaccacactgaaaaaggaggccaagtttgagctgcgtgccttccatgaggacaagaagccctccaagctctttgaggatgacgagcatgagaaagaacaatactgcattagaaaagtgaggccttcagaggagatgctggagctggaaaaggagaggagagagctcatccgcagccaggccgtcaagaagaatcctggcattgcagcaaaatggtggaatcccccgcaggaaaaaaccatcgaggagcagctggacgaggaacatctggagtcgcacaaaaagtacaaggagcgcaaagagagaagggcacagcaggaacagttgctgctgcagaagcagttacagcagcagcagcagcagcccccatcgcagctctgcacagcccctgcctcttctcatgaacgcgcaagcatgattgacaaagcaaaggaggacattgtcacagagcagatagatttctctgctgctcgcaaacaatttcagctgatggagaattccaggcaagcggtggccaagggccagagtacacccaggctgttctccatcaagcctttctacaggcctctggggtcagtcaactcagacaagccactgactaatccgagaccaccttctgtcgggggacctccagaagacagtggtgcctcagccgccaagggacagaaatcccccggtgccctggagaccccatcggcagcaggaagccagggcaacacagcctctcaggggaaggaagggccctacagcgagccttctaaacgtgggcccttatctaaactgtgggctgaggatggagaatttacgagcgcccgggctgtcctcactgtggtcaaggatgatgaccatgggattttggatcagttctcaagatctgtcaatgtctccttgacccaagaggagcttgactctggtctggacgaattgtcggtgaggtctcaggataccacagtcctggagaccctatccaatgatttcagcatggacaacatcagtgacagcggggcatccaatgagacaaccaatgccctccaggaaaattcactggctgatttttctctgccccagacaccacaaactgacaacccctcagagggccgaggagaaggcgtctccaagtcatttagtgatcatggtttctattccccttcctccacgctgggggactctccgttggttgatgaccccttggagtatcaggctggcctcctggtgcagaatgccattcaacaagccatagccgagcaggtggataaagctgtgtccaaaaccagcagggatggagcagagcaacagggacctgaagcgactgtagaggaagctgaagctgcggctttcggctcagaaaagcctcagagcatgtttgagccacctcaggtgtcttctcctgttcaagagaaaagggatgtattaccaaagattctgcctgctgaagacagggcgctcagggaaagggggcccccccagccactgccagctgtgcagcccagtggcccgattaacatggaggagaccaggcccgaaggaagctatttcagcaagtactcggaggcagctgagctgagaagcacagcctccctcctggccactcaagaatctgacgtgatggttgggcctttcaagctgaggtccaggaaacagcggactttgtccatgattgaggaagagatccgagcagctcaggaaagggaagaggagctgaagaggcagagacaagtcttgcagagtacgcagagccccaggacaaagaatgccccatcactgccctccagaacatgctacaaaactgctccagggaaaatagagaaagtcaaacctcctccatcccccaccactgaaggccccagcttgcagcctgacttagcccctgaagaggctgccggaacccagcggcccaagaatctgatgcagaccctcatggaagactatgagacacacaaatctaaaaggcgcgagagaatggatgatagtagttacacttctaagttactgtcttgcaaggtgacttccgaggtcctcgaggccacacgggttaatcgaagaaagagcgcactggctttgcgctgggaagcagggatctatgccaaccaggaggaagaagacaacgaataaacttccttcaacccaggaagcgtctttggtgcttgggagaccaagaaaccaagaaattaacaactgaaagcattttaatggactatttattaaagtgcaaacaaactcagcaatccttatgtagaccagaagctgcaatatacaatgatgaaaatgaaacgaaaaggaagtccccccatcagactctggacacccaggaatcaaaagagaaaggacttttttggtgactcaatcccagtgtctggtttggggccaatctacaatggatccaaaaggacaaaacatgttacaagcaaatcaacatagttgctgcaggcggaactgagaccagcctctctgggcgatgaaggacaatggtggtagggccacttagagagcagtagggcccaggctggtgcagcctacatggcacaggatatttccctgcaccagtttcccacctgtcacttgcagcatcagagggtgttgcattaactccattttctccagcagccataaaatgaatggcgtttctctccatatttgcccagaagaggcagttatgattccacttctcctacatttaattatttttaattgagaacaactcatgatcacaattcataaaatccatattttaagacaatagttcttcatgtcacaaacacaatctattctacatgaggaggctgagaaaggggaagagaaaaacaaaccaaatggatgatgttagctttaggatcgtgtctgcttataatattcactgatctgcagtttatgagaacacattttcacagttatgtttcttcataggaaaactatatttagtgggcaacaactatttttatgatgggatgggggagtatatacacgtatagaatctgtacgcgttgaacaacttggttcaagatggtgggggcatttttagagcggcaataattgaaaaaaaaggcgaactctgccttggagaggtagatgataagaaataaaaaggtgtttataactattttgtattataaagtgggccttagagataggaagaagaatgatggattccttttggatcaatcagaaaggaaacacgaaagaaaagtcaggaaggtagagagagaaaaagggagggaaggagaaagaatgggaataaaataaggaggtaagagatactatttttgctgagcaaccagtgtgtttcaggatgatacaaagaaaaatatagaatagaaataagtgcaggcttggaatcagctacaaatcctaaagatggggtgtgtgtggatgtgtgtgtgtgtgtgtgtacaccattgtgtgtttgtaaaatgtgtatgttcatgagtaagggtgtgtgtgtgtgtgtattaaaattccagagtgaccgtggcacttgggtgtacaggtaattcctccagagctgtttgctggcttcaggagtggagtgagaatttcttttttatgaaaagggatataaaggcaccgagctgatgcagtatttgtaatattaagttgacctaacaaggtatttgcatgagtcacaattacaaagttttgagcggttttgtaatttgacatttaggagagtctcctatttattctcatactttacattcatgcttagtatactatagaggatgccagctttaatctttctgtcatttaaagcaatatgataagggtattcaataattgggtgccctaaatttctggatgagaaaattttcaattctggccatgagaaagaaaaaaaaataaacagccttctttttttttcctttgttttaaaactgtggttttttaaaaaagcaataattaactcagacctcactaaaaatcatttttgtttttatattgttatgtcataagctctattatgttattctaacaagtagcaatttcacaaaatttgtatgtagatgttaacgcacatttcctttgcttcttttattagactagtgttgactttggggggggacatttattcacaaatgagaagtaggcacaaagtaaaaaatggaaccatctactaacaaggatcctttaaaactgccaagggagctctaacttgaagccacatcctacagatggcagcccaaatagcacatgggcaattggcaccatctttatatggttgagtctcctgaatattttgaatgaattctcaacaaaatgtgctagccactggggacgcaaaacaagtaagatccctgttgcaagaaattcattttatagtgagggaggttggcatggagactaaaattctcaggaaaatgagatccgtgttagattagaagtcctgatgtgaaatgggaggactcaggaaggaggatcgtctttacctgaggatttctagccagaggtcccagatgcctgggctgagaacccagcgataagggggcgttcccaaagcagacacagggataagaacagaggaggcagcagcattgcacagccccaggcacagtggcagttaggatggctggagagtaggatagttctatgggttgcccaaaaaatgtgatgcgcttcatgttttctctgactcatggatctggtagagaccatagacatgatatagactaacttccccatttttcacaagaggaaaccatccttatgacttaccttaaagttttttgttctgttttgaaggaaaccatgtgcttcatgaaacctacagttgacaagagaatgtacagctaagagaaaagcttaagaggccacactattcgcggaatggctttagaggcagatgaagtggtctttgaccacagttgattgaaccagagcacttattgcttaaagaataacagagttctagagctgggggttcttgggccatgctccgtgtgtggataaggaaagaaatactgtttctgggactctcccacagtcacaaagctgttttcactgtggcccctacatctcttaacttttgctattactcctatgctgccttccggattactgctgtctatcttcttgctccactcactgaagatcctattataatcccatgaaaatgtaaattacagtttacttgggagagccagattttctctgtgctcttgagttttttattcattcaagaaaccttgggccaccgctttgtacatagcaccgtgctaggctctgggatcccaaatggacccttttaactttctgaagatgggaccgtcccctggaggaaagtcattcctgcctaatccatcgagagaaagaggcttacgaaaaactttgcctctgatgctcagccccacccccaaatagcacacaagcttgttaaccccacctcttacaaaatgtttagattctgtaggtgttaaaagcctttctggaagtattgcattctgccgtgtttataggtgttcactttcctccagagctgattaactactgacatgacttggctttctcatccagaaattatggaaacagggtctgtcagtggcaggaggccgtgctgtgttttacttggatgacacaatgcagtttacttgcctcttcatacccatgcatgctgctcaccctagacaatgacatataagccgtatatagatcaatgtccacatatatatacacacacacatatatatatataaagtgtaacaaggaacactaaaacagtgttgattcttgtctctgaagacaaataattaaaccttttttttcccaactaaagaatggatttaattaaactatgtattgaaaaaaaagtagcctaagtgttagagatggtgaatatattccattttagttaaagaacaaatttcctgaattttaagcattcagtgagctgccaattttgattttgtgttgctctttacccaaattattttttctttgtttttctttttttgggggaggaggggaaaaaagcagcaatactgtgtttggaaattatactctgtatctggttttcctgtgtatgttaaccacttaaatgttattatcctgctttggttttagagtgattgtgaggcattcaatgcaagtatacagttattttctcattaaaatccaatgtgtgttgagtttttataaat

SEQ ID NO: 19615 - protein, 1103 aa, Homo sapiens; identical to SEQ ID NO: 4976

SEQ ID NO: 19616 - DNA, 5206 bp, Homo sapiens
cccgggcgagcccgccgtgcgcacagctctgcccgccgcccctggagcggatccccagccgtccctgggcgttctcccgggttctagcaaagccccccggggtgcccatcagtttccttgggtgactacagcgtgtgttttttctttcctctttcccctgcctgtgtgcccttctccaggatggcagaggcggaattgcacaaggaaaggctgcaagccatagcagaaaaaagaaagaggcagactgaaatagaaggcaagcgacaacagcttgacgagcagatacttctgctgcagcattccaagtccaaagtgcttcgggagaaatggctgctgcagggcatacccgctggaactgccgaagaggaggaagccaggaggcggcagtctgaagaggatgagttcagagtcaagcaacttgaagataacattcagaggctggagcaagaaatacaaacgctagaaagtgaagagtcccagatatctgccaaagagcaaatcatcctagagaaactgaaggaaacagaaaaatccttcaaggactttcagaagggtttctccagtacggatggagatgcagtaaattacatttcctcccagcttcccgacctgccaatcctctgttcacgaacagcagaaccatcacctgggcaggacgggaccagcagagcggctggagtcgggtgggagaatgtgctgctaaaggaaggtgagtcagcctcgaacgccacagaaacatccggcccagacatgactatcaagaagcctccccagctttctgaggatgatatctggctaaaaagcgagggagacaactatagtgccaccctcctggagcctgctgccagctctctttccccagatcacaaaaacatggaaattgaggtgtctgttgcagaatgtaaaagtgttcctggaatcacctctaccccacatcccatggaccatccctccgctttctattcacccccgcataatggcctccttactgatcaccacgaatccctggataatgatgttgccagagagatccgctatctagatgaggtgctagaggccaactgctgtgattctgctgtggatggaacgtacaatggaacatcctccccagagcctggtgcagtggttctggtgggcggcctaagcccccctgtccacgaggcgacccagccagaacccactgaaagaacagctagccggcaggcacctcctcacatcgagctcagtaatagcagccctgaccccatggcagaggcagaaagaacaaatggccattcccccagccagcctagagatgcgctgggggacagcctgcaggtgcctgtcagccccagctccacaaccagctcacggtgttcttcccgagatggagagttcactctcaccacactgaaaaaggaggccaagtttgagctgcgtgccttccatgaggacaagaagccctccaagctctttgaggatgacgagcatgagaaagaacaatactgcattagaaaagtgaggccttcagaggagatgctggagctggaaaaggagaggagagagctcatccgcagccaggccgtcaagaagaatcctggcattgcagcaaaatggtggaatcccccgcaggaaaaaaccatcgaggagcagctggacgaggaacatctggagtcgcacaaaaagtacaaggagcgcaaagagagaagggcacagcaggaacagttgctgctgcagaagcagttacagcagcagcagcagcagcccccatcgcagctctgcacagcccctgcctcttctcatgaacgcgcaagcatgattgacaaagcaaaggaggacattgtcacagagcagatagatttctctgctgctcgcaaacaatttcagctgatggagaattccaggcaagcggtggccaagggccagagtacacccaggctgttctccatcaagcctttctacaggcctctggggtcagtcaactcagacaagccactgactaatccgagaccaccttctgtcgggggacctccagaagacagtggtgcctcagccgccaagggacagaaatcccccggtgccctggagaccccatcggcagcaggaagccagggcaacacagcctctcaggggaaggaagggccctacagcgagccttctaaacgtgggcccttatctaaactgtgggctgaggatggagaatttacgagcgcccgggctgtcctcactgtggtcaaggatgatgaccatgggattttggatcagttctcaagatctgtcaatgtctccttgacccaagaggagcttgactctggtctggacgaattgtcggtgaggtctcaggataccacagtcctggagaccctatccaatgatttcagcatggacaacatcagtgacagcggggcatccaatgagacaaccaatgccctccaggaaaattcactggctgatttttctctgccccagacaccacaaactgacaacccctcagagggccgaggagaaggcgtctccaagtcatttagtgatcatggtttctattccccttcctccacgctgggggactctccgttggttgatgaccccttggagtatcaggctggcctcctggtgcagaatgccattcaacaagccatagccgagcaggtggataaagctgtgtccaaaaccagcagggatggagcagagcaacagggacctgaagcgactgtagaggaagctgaagctgcggctttcggctcagaaaagcctcagagcatgtttgagccacctcaggtgtcttctcctgttcaagagaaaagggatgtattaccaaagattctgcctgctgaagacagggcgctcagggaaagggggcccccccagccactgccagctgtgcagcccagtggcccgattaacatggaggagaccaggcccgaaggaagctatttcagcaagtactcggaggcagctgagctgagaagcacagcctccctcctggccactcaagaatctgacgtgatggttgggcctttcaagctgaggtccaggaaacagcggactttgtccatgattgaggaagagatccgagcagctcaggaaagggaagaggagctgaagaggcagagacaagtcttgcagagtacgcagagccccaggacaaagaatgccccatcactgccctccagaacatgctacaaaactgctccagggaaaatagagaaagtcaaacctcctccatcccccaccactgaaggccccagcttgcagcctgacttagcccctgaagaggctgccggaacccagcggcccaagaatctgatgcagaccctcatggaagactatgagacacacaaatctaaaaggcgcgagagaatggatgatagtagtgtcctcgaggccacacgggttaatcgaagaaagagcgcactggctttgcgctgggaagcagggatctatgccaaccaggaggaagaagacaacgaataaacttccttcaacccaggaagcgtctttggtgcttgggagaccaagaaaccaagaaattaacaactgaaagcattttaatggactatttattaaagtgcaaacaaactcagcaatccttatgtagaccagaagctgcaatatacaatgatgaaaatgaaacgaaaaggaagtccccccatcagactctggacacccaggaatcaaaagagaaaggacttttttggtgactcaatcccagtgtctggtttggggccaatctacaatggatccaaaaggacaaaacatgttacaagcaaatcaacatagttgctgcaggcggaactgagaccagcctctctgggcgatgaaggacaatggtggtagggccacttagagagcagtagggcccaggctggtgcagcctacatggcacaggatatttccctgcaccagtttcccacctgtcacttgcagcatcagagggtgttgcattaactccattttctccagcagccataaaatgaatggcgtttctctccatatttgcccagaagaggcagttatgattccacttctcctacatttaattatttttaattgagaacaactcatgatcacaattcataaaatccatattttaagacaatagttcttcatgtcacaaacacaatctattctacatgaggaggctgagaaaggggaagagaaaaacaaaccaaatggatgatgttagctttaggatcgtgtctgcttataatattcactgatctgcagtttatgagaacacattttcacagttatgtttcttcataggaaaactatatttagtgggcaacaactatttttatgatgggatgggggagtatatacacgtatagaatctgtacgcgttgaacaacttggttcaagatggtgggggcatttttagagcggcaataattgaaaaaaaaggcgaactctgccttggagaggtagatgataagaaataaaaaggtgtttataactattttgtattataaagtgggccttagagataggaagaagaatgatggattccttttggatcaatcagaaaggaaacacgaaagaaaagtcaggaaggtagagagagaaaaagggagggaaggagaaagaatgggaataaaataaggaggtaagagatactatttttgctgagcaaccagtgtgtttcaggatgatacaaagaaaaatatagaatagaaataagtgcaggcttggaatcagctacaaatcctaaagatggggtgtgtgtggatgtgtgtgtgtgtgtgtgtacaccattgtgtgtttgtaaaatgtgtatgttcatgagtaagggtgtgtgtgtgtgtgtattaaaattccagagtgaccgtggcacttgggtgtacaggtaattcctccagagctgtttgctggcttcaggagtggagtgagaatttcttttttatgaaaagggatataaaggcaccgagctgatgcagtatttgtaatattaagttgacctaacaaggtatttgcatgagtcacaattacaaagttttgagcggttttgtaatttgacatttaggagagtctcctatttattctcatactttacattcatgcttagtatactatagaggatgccagctttaatctttctgtcatttaaagcaatatgataagggtattcaataattgggtgccctaaatttctggatgagaaaattttcaattctggccatgagaaagaaaaaaaaataaacagccttctttttttttcctttgtttt

SEQ ID NO: 19617 - protein, 1090 aa, Homo sapiens; identical to SEQ ID NO: 4978

SEQ ID NO: 19618 - DNA, 7469 bp, Homo sapiens
cccgggcgagcccgccgtgcgcacagctctgcccgccgcccctggagcggatccccagccgtccctgggcgttctcccgggttctagcaaagccccccggggtgcccatcagtttccttgggtgactacagcgtgtgttttttctttcctctttcccctgcctgtgtgcccttctccaggatggcagaggcggaattgcacaaggaaaggctgcaagccatagcagaaaaaagaaagaggcagactgaaatagaaggcaagcgacaacagcttgacgagcagatacttctgctgcagcattccaagtccaaagtgcttcgggagaaatggctgctgcagggcatacccgctggaactgccgaagaggaggaagccaggaggcggcagtctgaagaggatgagttcagagtcaagcaacttgaagataacattcagaggctggagcaagaaatacaaacgctagaaagtgaagagtcccagatatctgccaaagagcaaatcatcctagagaaactgaaggaaacagaaaaatccttcaaggactttcagaagggtttctccagtacggatggagatgcagtaaattacatttcctcccagcttcccgacctgccaatcctctgttcacgaacagcagaaccatcacctgggcaggacgggaccagcagagcggctggagtcgggtgggagaatgtgctgctaaaggaaggtgagtcagcctcgaacgccacagaaacatccggcccagacatgactatcaagaagcctccccagctttctgaggatgatatctggctaaaaagcgagggagacaactatagtgccaccctcctggagcctgctgccagctctctttccccagatcacaaaaacatggaaattgaggtgtctgttgcagaatgtaaaagtgttcctggaatcacctctaccccacatcccatggaccatccctccgctttctattcacccccgcataatggcctccttactgatcaccacgaatccctggataatgatgttgccagagagatccgctatctagatgaggtgctagaggccaactgctgtgattctgctgtggatggaacgtacaatggaacatcctccccagagcctggtgcagtggttctggtgggcggcctaagcccccctgtccacgaggcgacccagccagaacccactgaaagaacagctagccggcaggcacctcctcacatcgagctcagtaatagcagccctgaccccatggcagaggcagaaagaacaaatggccattcccccagccagcctagagatgcgctgggggacagcctgcaggtgcctgtcagccccagctccacaaccagctcacggtgttcttcccgagatggagagttcactctcaccacactgaaaaaggaggccaagtttgagctgcgtgccttccatgaggacaagaagccctccaagctctttgaggatgacgagcatgagaaagaacaatactgcattagaaaagtgaggccttcagaggagatgctggagctggaaaaggagaggagagagctcatccgcagccaggccgtcaagaagaatcctggcattgcagcaaaatggtggaatcccccgcaggaaaaaaccatcgaggagcagctggacgaggaacatctggagtcgcacaaaaagtacaaggagcgcaaagagagaagggcacagcaggaacagttgctgctgcagaagcagttacagcagcagcagcagcagcccccatcgcagctctgcacagcccctgcctcttctcatgaacgcgcaagcatgattgacaaagcaaaggaggacattgtcacagagcagatagatttctctgctgctcgcaaacaatttcagctgatggagaattccaggcaagcggtggccaagggccagagtacacccaggctgttctccatcaagcctttctacaggcctctggggtcagtcaactcagacaagccactgactaatccgagaccaccttctgtcgggggacctccagaagacagtggtgcctcagccgccaagggacagaaatcccccggtgccctggagaccccatcggcagcaggaagccagggcaacacagcctctcaggggaaggaagggccctacagcgagccttctaaacgtgggcccttatctaaactgtgggctgaggatggagaatttacgagcgcccgggctgtcctcactgtggtcaaggatgatgaccatgggattttggatcagttctcaagatctgtcaatgtctccttgacccaagaggagcttgactctggtctggacgaattgtcggtgaggtctcaggataccacagtcctggagaccctatccaatgatttcagcatggacaacatcagtgacagcggggcatccaatgagacaaccaatgccctccaggaaaattcactggctgatttttctctgccccagacaccacaaactgacaacccctcagagggccgaggagaaggcgtctccaagtcatttagtgatcatggtttctattccccttcctccacgctgggggactctccgttggttgatgaccccttggagtatcaggctggcctcctggtgcagaatgccattcaacaagccatagccgagcaggtggataaagctgtgtccaaaaccagcagggatggagcagagcaacagggacctgaagcgactgtagaggaagctgaagctgcggctttcggctcagaaaagcctcagagcatgtttgagccacctcaggtgtcttctcctgttcaagagaaaagggatgtattaccaaagattctgcctgctgaagacagggcgctcagggaaagggggcccccccagccactgccagctgtgcagcccagtggcccgattaacatggaggagaccaggcccgaaggaagctatttcagcaagtactcggaggcagctgagctgagaagcacagcctccctcctggccactcaagaatctgacgtgatggttgggcctttcaagctgaggtccaggaaacagcggactttgtccatgattgaggaagagatccgagcagctcaggaaagggaagaggagctgaagaggcagagacaagtcttgcagagtacgcagagccccaggacaaagaatgccccatcactgccctccagaacatgctacaaaactgctccagggaaaatagagaaagtcaaacctcctccatcccccaccactgaaggccccagcttgcagcctgacttagcccctgaagaggctgccggaacccagcggcccaagaatctgatgcagaccctcatggaagactatgagacacacaaatctaaaaggcgcgagagaatggatgatagtagtgtcctcgaggccacacgggttaatcgaagaaagagcgcactggctttgcgctgggaagcagggatctatgccaaccaggaggaagaagacaacgaataaacttccttcaacccaggaagcgtctttggtgcttgggagaccaagaaaccaagaaattaacaactgaaagcattttaatggactatttattaaagtgcaaacaaactcagcaatccttatgtagaccagaagctgcaatatacaatgatgaaaatgaaacgaaaaggaagtccccccatcagactctggacacccaggaatcaaaagagaaaggacttttttggtgactcaatcccagtgtctggtttggggccaatctacaatggatccaaaaggacaaaacatgttacaagcaaatcaacatagttgctgcaggcggaactgagaccagcctctctgggcgatgaaggacaatggtggtagggccacttagagagcagtagggcccaggctggtgcagcctacatggcacaggatatttccctgcaccagtttcccacctgtcacttgcagcatcagagggtgttgcattaactccattttctccagcagccataaaatgaatggcgtttctctccatatttgcccagaagaggcagttatgattccacttctcctacatttaattatttttaattgagaacaactcatgatcacaattcataaaatccatattttaagacaatagttcttcatgtcacaaacacaatctattctacatgaggaggctgagaaaggggaagagaaaaacaaaccaaatggatgatgttagctttaggatcgtgtctgcttataatattcactgatctgcagtttatgagaacacattttcacagttatgtttcttcataggaaaactatatttagtgggcaacaactatttttatgatgggatgggggagtatatacacgtatagaatctgtacgcgttgaacaacttggttcaagatggtgggggcatttttagagcggcaataattgaaaaaaaaggcgaactctgccttggagaggtagatgataagaaataaaaaggtgtttataactattttgtattataaagtgggccttagagataggaagaagaatgatggattccttttggatcaatcagaaaggaaacacgaaagaaaagtcaggaaggtagagagagaaaaagggagggaaggagaaagaatgggaataaaataaggaggtaagagatactatttttgctgagcaaccagtgtgtttcaggatgatacaaagaaaaatatagaatagaaataagtgcaggcttggaatcagctacaaatcctaaagatggggtgtgtgtggatgtgtgtgtgtgtgtgtgtacaccattgtgtgtttgtaaaatgtgtatgttcatgagtaagggtgtgtgtgtgtgtgtattaaaattccagagtgaccgtggcacttgggtgtacaggtaattcctccagagctgtttgctggcttcaggagtggagtgagaatttcttttttatgaaaagggatataaaggcaccgagctgatgcagtatttgtaatattaagttgacctaacaaggtatttgcatgagtcacaattacaaagttttgagcggttttgtaatttgacatttaggagagtctcctatttattctcatactttacattcatgcttagtatactatagaggatgccagctttaatctttctgtcatttaaagcaatatgataagggtattcaataattgggtgccctaaatttctggatgagaaaattttcaattctggccatgagaaagaaaaaaaaataaacagccttctttttttttcctttgttttaaaactgtggttttttaaaaaagcaataattaactcagacctcactaaaaatcatttttgtttttatattgttatgtcataagctctattatgttattctaacaagtagcaatttcacaaaatttgtatgtagatgttaacgcacatttcctttgcttcttttattagactagtgttgactttggggggggacatttattcacaaatgagaagtaggcacaaagtaaaaaatggaaccatctactaacaaggatcctttaaaactgccaagggagctctaacttgaagccacatcctacagatggcagcccaaatagcacatgggcaattggcaccatctttatatggttgagtctcctgaatattttgaatgaattctcaacaaaatgtgctagccactggggacgcaaaacaagtaagatccctgttgcaagaaattcattttatagtgagggaggttggcatggagactaaaattctcaggaaaatgagatccgtgttagattagaagtcctgatgtgaaatgggaggactcaggaaggaggatcgtctttacctgaggatttctagccagaggtcccagatgcctgggctgagaacccagcgataagggggcgttcccaaagcagacacagggataagaacagaggaggcagcagcattgcacagccccaggcacagtggcagttaggatggctggagagtaggatagttctatgggttgcccaaaaaatgtgatgcgcttcatgttttctctgactcatggatctggtagagaccatagacatgatatagactaacttccccatttttcacaagaggaaaccatccttatgacttaccttaaagttttttgttctgttttgaaggaaaccatgtgcttcatgaaacctacagttgacaagagaatgtacagctaagagaaaagcttaagaggccacactattcgcggaatggctttagaggcagatgaagtggtctttgaccacagttgattgaaccagagcacttattgcttaaagaataacagagttctagagctgggggttcttgggccatgctccgtgtgtggataaggaaagaaatactgtttctgggactctcccacagtcacaaagctgttttcactgtggcccctacatctcttaacttttgctattactcctatgctgccttccggattactgctgtctatcttcttgctccactcactgaagatcctattataatcccatgaaaatgtaaattacagtttacttgggagagccagattttctctgtgctcttgagttttttattcattcaagaaaccttgggccaccgctttgtacatagcaccgtgctaggctctgggatcccaaatggacccttttaactttctgaagatgggaccgtcccctggaggaaagtcattcctgcctaatccatcgagagaaagaggcttacgaaaaactttgcctctgatgctcagccccacccccaaatagcacacaagcttgttaaccccacctcttacaaaatgtttagattctgtaggtgttaaaagcctttctggaagtattgcattctgccgtgtttataggtgttcactttcctccagagctgattaactactgacatgacttggctttctcatccagaaattatggaaacagggtctgtcagtggcaggaggccgtgctgtgttttacttggatgacacaatgcagtttacttgcctcttcatacccatgcatgctgctcaccctagacaatgacatataagccgtatatagatcaatgtccacatatatatacacacacacatatatatatataaagtgtaacaaggaacactaaaacagtgttgattcttgtctctgaagacaaataattaaaccttttttttcccaactaaagaatggatttaattaaactatgtattgaaaaaaaagtagcctaagtgttagagatggtgaatatattccattttagttaaagaacaaatttcctgaattttaagcattcagtgagctgccaattttgattttgtgttgctctttacccaaattattttttctttgtttttctttttttgggggaggaggggaaaaaagcagcaatactgtgtttggaaattatactctgtatctggttttcctgtgtatgttaaccacttaaatgttattatcctgctttggttttagagtgattgtgaggcattcaatgcaagtatacagttattttctcattaaaatccaatgtgtgttgagtttttataaat

SEQ ID NO: 19619 - protein, 1090 aa, Homo sapiens; identical to SEQ ID NO: 4978

SEQ ID NO: 19620 - DNA, 1332 bp, Homo sapiens
gcgtgtgttttttctttcctctttcccctgcctgtgtgcccttctccaggatggcagaggcggaattgcacaaggaaaggctgcaagccatagcagaaaaaagaaagaggcagactgaaatagaaggcaagcgacaacagcttgacgagcagatacttctgctgcagcattccaagtccaaagtgcttcgggagaaatggctgctgcagggcatacccgctggaactgccgaagaggaggaagccaggaggcggcagtctgaagaggatgagttcagagtcaagcaacttgaagataacattcagaggctggagcaagaaatacaaacgctagaaagtgaagagtcccagatatctgccaaagagcaaatcatcctagagaaactgaaggaaacagaaaaatccttcaaggactttcagaagggtttctccagtacggatggagatgcagtaaattacatttcctcccagcttcccgacctgccaatcctctgttcacgaacagcagaaccatcacctgggcaggacgggaccagcagagcggctgctgtgtacgccatggaaattaatgtggagaaagacaaacaaacaggagagaccaagattctctctacatctaccattggcccagagggggtccatcagaaaggagtcaaagtctatgatgatggtaccaaagtagtgtatgaggtgcgctcaggaggcaccgtagtagaaaatggagtgcacaaattaagcacaaaggatgtagaagagcttattcagaaggctggacaatcaagcttaggaggagggcacgtgtctgaaaggactgtgattgcagatgggagcctcagccatcccaaggaacacatgctctgcaaagaagctaagttagaaatggtacataagtctaggaaagaccattcttccgggaacccagggcagcaggcccaagcccccagcgctgcagggccggaggcaaacttggatcagcccgtcaccatgatttttatgggctaccaaaatatcgaggatgaagaggagacgaaaaaggtgctaggctatgatgaaaccatcaaggctgaattggtcctcattgatgaagatgatgagaagtcattgagggagaagacagtgacggacgtgtccactattgacgggaacgcggctgagcttgtgtccgggaggccggtctcagacaccacagagccctcatccccagaagggaaggaagagagcctagctacagagccagccccaggtacccaaaagaaaaagcgctgtcaatgctgtgttgtcatgtgaccacttctttcttctcctttcttctgggcagcctgtactctccacc

SEQ ID NO: 19621 - protein, 411 aa, Homo sapiens
MAEAELHKERLQAIAEKRKRQTEIEGKRQQLDEQILLLQHSKSKVLREKWLLQGIPAGTAEEEEARRRQSEEDEFRVKQLEDNIQRLEQEIQTLESEESQISAKEQIILEKLKETEKSFKDFQKGFSSTDGDAVNYISSQLPDLPILCSRTAEPSPGQDGTSRAAAVYAMEINVEKDKQTGETKILSTSTIGPEGVHQKGVKVYDDGTKVVYEVRSGGTVVENGVHKLSTKDVEELIQKAGQSSLGGGHVSERTVIADGSLSHPKEHMLCKEAKLEMVHKSRKDHSSGNPGQQAQAPSAAGPEANLDQPVTMIFMGYQNIEDEEETKKVLGYDETIKAELVLIDEDDEKSLREKTVTDVSTIDGNAAELVSGRPVSDTTEPSSPEGKEESLATEPAPGTQKKKRCQCCVVM

SEQ ID NO: 19622 - DNA, 1315 bp, Homo sapiens
ctttcctctttcccctgcctgtgtgcccttctccaggatggcagaggcggaattgcacaaggaaaggctgcaagccatagcagaaaaaagaaagaggcagactgaaatagaaggcaagcgacaacagcttgacgagcagatacttctgctgcagcattccaagtccaaagtgcttcgggagaaatggctgctgcagggcatacccgctggaactgccgaagaggaggaagccaggaggcggcagtctgaagaggatgagttcagagtcaagcaacttgaagataacattcagaggctggagcaagaaatacaaacgctagaaagtgaagagtcccagatatctgccaaagagcaaatcatcctagagaaactgaaggaaacagaaaaatccttcaaggactttcagaagggtttctccagtacggatggagatgcagtaaattacatttcctcccagcttcccgacctgccaatcctctgttcacgaacagcagaaccatcacctgggcaggacgggaccagcagagcggctgctgtgtacgccatggaaattaatgtggagaaagacaaacaaacaggagagaccaagattctctctacatctaccattggcccagagggggtccatcagaaaggagtcaaagtctatgatgatggtaccaaagtagtgtatgaggtgcgctcaggaggcaccgtagtagaaaatggagtgcacaaattaagcacaaaggatgtagaagagcttattcagaaggctggacaatcaagcttaggaggagggcacgtgtctgaaaggactgtgattgcagatgggagcctcagccatcccaaggaacacatgctctgcaaagaagctaagttagaaatggtacataagtctaggaaagaccattcttccgggaacccagggcagcaggcccaagcccccagcgctgcagggccggaggcaaacttggatcagcccgtcaccatgatttttatgggctaccaaaatatcgaggatgaagaggagacgaaaaaggtgctaggctatgatgaaaccatcaaggctgaattggtcctcattgatgaagatgatgagaagtcattgagggagaagacagtgacggacgtgtccactattgacgggaacgcggctgagcttgtgtccgggaggccggtctcagacaccacagagccctcatccccagaagggaaggaagagagcctagctacagagccagccccaggagtcgggtgggagaatgtgctgctaaaggaaggtgagtcagcctcgaacgccacagaaacatccggcccagacatgactatcaag

SEQ ID NO: 19623 - protein, 425 aa, Homo sapiens
MAEAELHKERLQAIAEKRKRQTEIEGKRQQLDEQILLLQHSKSKVLREKWLLQGIPAGTAEEEEARRRQSEEDEFRVKQLEDNIQRLEQEIQTLESEESQISAKEQIILEKLKETEKSFKDFQKGFSSTDGDAVNYISSQLPDLPILCSRTAEPSPGQDGTSRAAAVYAMEINVEKDKQTGETKILSTSTIGPEGVHQKGVKVYDDGTKVVYEVRSGGTVVENGVHKLSTKDVEELIQKAGQSSLGGGHVSERTVIADGSLSHPKEHMLCKEAKLEMVHKSRKDHSSGNPGQQAQAPSAAGPEANLDQPVTMIFMGYQNIEDEEETKKVLGYDETIKAELVLIDEDDEKSLREKTVTDVSTIDGNAAELVSGRPVSDTTEPSSPEGKEESLATEPAPGVGWENVLLKEGESASNATETSGPDMTI

SEQ ID NO: 19624 - DNA, 5139 bp, Homo sapiens
gagaatttctcccactcttcgagcctacagcagacatgttaggagaatgctgctgcttgcaacacacccagagacggtggggcaggtgacactgcgtgtgtgcccggtgtctctggaagtgtctatacagatgtgtgctgctgctgctgctgctttctgccttaaaatttctggagccaacacccacccactcttacagcctctgtctctttattttcaaggaaaaaagaaagaggcagactgaaatagaaggcaagcgacaacagcttgacgagcagatacttctgctgcagcattccaagtccaaagtgcttcgggagaaatggctgctgcagggcatacccgctggaactgccgaagaggaggaagccaggaggcggcagtctgaagaggatgagttcagagtcaagcaacttgaagataacattcagaggctggagcaagaaatacaaacgctagaaagtgaagagtcccagatatctgccaaagagcaaatcatcctagagaaactgaaggaaacagaaaaatccttcaaggactttcagaagggtttctccagtacggatggaggagtcgggtgggagaatgtgctgctaaaggaaggtgagtcagcctcgaacgccacagaaacatccggcccagacatgactatcaagaagcctccccagctttctgaggatgatatctggctaaaaagcgagggagacaactatagtgccaccctcctggagcctgctgccagctctctttccccagatcacaaaaacatggaaattgaggtgtctgttgcagaatgtaaaagtgttcctggaatcacctctaccccacatcccatggaccatccctccgctttctattcacccccgcataatggcctccttactgatcaccacgaatccctggataatgatgttgccagagagatccgctatctagatgaggtgctagaggccaactgctgtgattctgctgtggatggaacgtacaatggaacatcctccccagagcctggtgcagtggttctggtgggcggcctaagcccccctgtccacgaggcgacccagccagaacccactgaaagaacagctagccggcaggcacctcctcacatcgagctcagtaatagcagccctgaccccatggcagaggcagaaagaacaaatggccattcccccagccagcctagagatgcgctgggggacagcctgcaggtgcctgtcagccccagctccacaaccagctcacggtgttcttcccgagatggagagttcactctcaccacactgaaaaaggaggccaagtttgagctgcgtgccttccatgaggacaagaagccctccaagctctttgaggatgacgagcatgagaaagaacaatactgcattagaaaagtgaggccttcagaggagatgctggagctggaaaaggagaggagagagctcatccgcagccaggccgtcaagaagaatcctggcattgcagcaaaatggtggaatcccccgcaggaaaaaaccatcgaggagcagctggacgaggaacatctggagtcgcacaaaaagtacaaggagcgcaaagagagaagggcacagcaggaacagttgctgctgcagaagcagttacagcagcagcagcagcagcccccatcgcagctctgcacagcccctgcctcttctcatgaacgcgcaagcatgattgacaaagcaaaggaggacattgtcacagagcagatagatttctctgctgctcgcaaacaatttcagctgatggagaattccaggcaagcggtggccaagggccagagtacacccaggctgttctccatcaagcctttctacaggcctctggggtcagtcaactcagacaagccactgactaatccgagaccaccttctgtcgggggacctccagaagacagtggtgcctcagccgccaagggacagaaatcccccggtgccctggagaccccatcggcagcaggaagccagggcaacacagcctctcaggggaaggaagggccctacagcgagccttctaaacgtgggcccttatctaaactgtgggctgaggatggagaatttacgagcgcccgggctgtcctcactgtggtcaaggatgatgaccatgggattttggatcagttctcaagatctgtcaatgtctccttgacccaagaggagcttgactctggtctggacgaattgtcggtgaggtctcaggataccacagtcctggagaccctatccaatgatttcagcatggacaacatcagtgacagcggggcatccaatgagacaaccaatgccctccaggaaaattcactggctgatttttctctgccccagacaccacaaactgacaacccctcagagggccgaggagaaggcgtctccaagtcatttagtgatcatggtttctattccccttcctccacgctgggggactctccgttggttgatgaccccttggagtatcaggctggcctcctggtgcagaatgccattcaacaagccatagccgagcaggtggataaagctgtgtccaaaaccagcagggatggagcagagcaacagggacctgaagcgactgtagaggaagctgaagctgcggctttcggctcagaaaagcctcagagcatgtttgagccacctcaggtgtcttctcctgttcaagagaaaagggatgtattaccaaagattctgcctgctgaagacagggcgctcagggaaagggggcccccccagccactgccagctgtgcagcccagtggcccgattaacatggaggagaccaggcccgaaggaagctatttcagcaagtactcggaggcagctgagctgagaagcacagcctccctcctggccactcaagaatctgacgtgatggttgggcctttcaagctgaggtccaggaaacagcggactttgtccatgattgaggaagagatccgagcagctcaggaaagggaagaggagctgaagaggcagagacaagtcttgcagagtacgcagagccccaggacaaagaatgccccatcactgccctccagaacatgctacaaaactgctccagggaaaatagagaaagtcaaacctcctccatcccccaccactgaaggccccagcttgcagcctgacttagcccctgaagaggctgccggaacccagcggcccaagaatctgatgcagaccctcatggaagactatgagacacacaaatctaaaaggcgcgagagaatggatgatagtagttacacttctaagttactgtcttgcaaggtgacttccgaggtcctcgaggccacacgggttaatcgaagaaagagcgcactggctttgcgctgggaagcagggatctatgccaaccaggaggaagaagacaacgaataaacttccttcaacccaggaagcgtctttggtgcttgggagaccaagaaaccaagaaattaacaactgaaagcattttaatggactatttattaaagtgcaaacaaactcagcaatccttatgtagaccagaagctgcaatatacaatgatgaaaatgaaacgaaaaggaagtccccccatcagactctggacacccaggaatcaaaagagaaaggacttttttggtgactcaatcccagtgtctggtttggggccaatctacaatggatccaaaaggacaaaacatgttacaagcaaatcaacatagttgctgcaggcggaactgagaccagcctctctgggcgatgaaggacaatggtggtagggccacttagagagcagtagggcccaggctggtgcagcctacatggcacaggatatttccctgcaccagtttcccacctgtcacttgcagcatcagagggtgttgcattaactccattttctccagcagccataaaatgaatggcgtttctctccatatttgcccagaagaggcagttatgattccacttctcctacatttaattatttttaattgagaacaactcatgatcacaattcataaaatccatattttaagacaatagttcttcatgtcacaaacacaatctattctacatgaggaggctgagaaaggggaagagaaaaacaaaccaaatggatgatgttagctttaggatcgtgtctgcttataatattcactgatctgcagtttatgagaacacattttcacagttatgtttcttcataggaaaactatatttagtgggcaacaactatttttatgatgggatgggggagtatatacacgtatagaatctgtacgcgttgaacaacttggttcaagatggtgggggcatttttagagcggcaataattgaaaaaaaaggcgaactctgccttggagaggtagatgataagaaataaaaaggtgtttataactattttgtattataaagtgggccttagagataggaagaagaatgatggattccttttggatcaatcagaaaggaaacacgaaagaaaagtcaggaaggtagagagagaaaaagggagggaaggagaaagaatgggaataaaataaggaggtaagagatactatttttgctgagcaaccagtgtgtttcaggatgatacaaagaaaaatatagaatagaaataagtgcaggcttggaatcagctacaaatcctaaagatggggtgtgtgtggatgtgtgtgtgtgtgtgtgtacaccattgtgtgtttgtaaaatgtgtatgttcatgagtaagggtgtgtgtgtgtgtgtattaaaattccagagtgaccgtggcacttgggtgtacaggtaattcctccagagctgtttgctggcttcaggagtggagtgagaatttcttttttatgaaaagggatataaaggcaccgagctgatgcagtatttgtaatattaagttgacctaacaaggtatttgcatgagtcacaattacaaagttttgagcggttttgtaatttgacatttaggagagtctcctatttattctcatactttacattcatgcttagtatactatagaggatgccagctttaatctttctgtcatttaaagcaatatgataagggtattcaataattgggtgccctaaatttctggatgagaaaattttcaattctggccatgagaaagaaaaaaaaataaacagccttctttttttttcctttgtttt

SEQ ID NO: 19625 - protein, 913 aa, Homo sapiens
MTIKKPPQLSEDDIWLKSEGDNYSATLLEPAASSLSPDHKNMEIEVSVAECKSVPGITSTPHPMDHPSAFYSPPHNGLLTDHHESLDNDVAREIRYLDEVLEANCCDSAVDGTYNGTSSPEPGAVVLVGGLSPPVHEATQPEPTERTASRQAPPHIELSNSSPDPMAEAERTNGHSPSQPRDALGDSLQVPVSPSSTTSSRCSSRDGEFTLTTLKKEAKFELRAFHEDKKPSKLFEDDEHEKEQYCIRKVRPSEEMLELEKERRELIRSQAVKKNPGIAAKWWNPPQEKTIEEQLDEEHLESHKKYKERKERRAQQEQLLLQKQLQQQQQQPPSQLCTAPASSHERASMIDKAKEDIVTEQIDFSAARKQFQLMENSRQAVAKGQSTPRLFSIKPFYRPLGSVNSDKPLTNPRPPSVGGPPEDSGASAAKGQKSPGALETPSAAGSQGNTASQGKEGPYSEPSKRGPLSKLWAEDGEFTSARAVLTVVKDDDHGILDQFSRSVNVSLTQEELDSGLDELSVRSQDTTVLETLSNDFSMDNISDSGASNETTNALQENSLADFSLPQTPQTDNPSEGRGEGVSKSFSDHGFYSPSSTLGDSPLVDDPLEYQAGLLVQNAIQQAIAEQVDKAVSKTSRDGAEQQGPEATVEEAEAAAFGSEKPQSMFEPPQVSSPVQEKRDVLPKILPAEDRALRERGPPQPLPAVQPSGPINMEETRPEGSYFSKYSEAAELRSTASLLATQESDVMVGPFKLRSRKQRTLSMIEEEIRAAQEREEELKRQRQVLQSTQSPRTKNAPSLPSRTCYKTAPGKIEKVKPPPSPTTEGPSLQPDLAPEEAAGTQRPKNLMQTLMEDYETHKSKRRERMDDSSYTSKLLSCKVTSEVLEATRVNRRKSALALRWEAGIYANQEEEDNE

SEQ ID NO: 19626 - DNA, 4698 bp, Homo sapiens
ggaggggaagcgaggaggcggggaaggggcgggccccaggagcaggcgggcggggctccccgccctccagcgcgcccggaggctaccactccctgcagatgcgctggccccagcccggggctgccgctcgccttcccccggagtctcctggacccccggagtctcctggacccccggagcgggaggcagcggccgcgcggcgctggactggagcagaaccccaggactgcgcccccgggagcgggcgcccagagaagcctccccagctttctgaggatgatatctggctaaaaagcgagggagacaactatagtgccaccctcctggagcctgctgccagctctctttccccagatcacaaaaacatggaaattgaggtgtctgttgcagaatgtaaaagtgttcctggaatcacctctaccccacatcccatggaccatccctccgctttctattcacccccgcataatggcctccttactgatcaccacgaatccctggataatgatgttgccagagagatccgctatctagatgaggtgctagaggccaactgctgtgattctgctgtggatggaacgtacaatggaacatcctccccagagcctggtgcagtggttctggtgggcggcctaagcccccctgtccacgaggcgacccagccagaacccactgaaagaacagctagccggcaggcacctcctcacatcgagctcagtaatagcagccctgaccccatggcagaggcagaaagaacaaatggccattcccccagccagcctagagatgcgctgggggacagcctgcaggtgcctgtcagccccagctccacaaccagctcacggtgttcttcccgagatggagagttcactctcaccacactgaaaaaggaggccaagtttgagctgcgtgccttccatgaggacaagaagccctccaagctctttgaggatgacgagcatgagaaagaacaatactgcattagaaaagtgaggccttcagaggagatgctggagctggaaaaggagaggagagagctcatccgcagccaggccgtcaagaagaatcctggcattgcagcaaaatggtggaatcccccgcaggaaaaaaccatcgaggagcagctggacgaggaacatctggagtcgcacaaaaagtacaaggagcgcaaagagagaagggcacagcaggaacagttgctgctgcagaagcagttacagcagcagcagcagcagcccccatcgcagctctgcacagcccctgcctcttctcatgaacgcgcaagcatgattgacaaagcaaaggaggacattgtcacagagcagatagatttctctgctgctcgcaaacaatttcagctgatggagaattccaggcaagcggtggccaagggccagagtacacccaggctgttctccatcaagcctttctacaggcctctggggtcagtcaactcagacaagccactgactaatccgagaccaccttctgtcgggggacctccagaagacagtggtgcctcagccgccaagggacagaaatcccccggtgccctggagaccccatcggcagcaggaagccagggcaacacagcctctcaggggaaggaagggccctacagcgagccttctaaacgtgggcccttatctaaactgtgggctgaggatggagaatttacgagcgcccgggctgtcctcactgtggtcaaggatgatgaccatgggattttggatcagttctcaagatctgtcaatgtctccttgacccaagaggagcttgactctggtctggacgaattgtcggtgaggtctcaggataccacagtcctggagaccctatccaatgatttcagcatggacaacatcagtgacagcggggcatccaatgagacaaccaatgccctccaggaaaattcactggctgatttttctctgccccagacaccacaaactgacaacccctcagagggccgaggagaaggcgtctccaagtcatttagtgatcatggtttctattccccttcctccacgctgggggactctccgttggttgatgaccccttggagtatcaggctggcctcctggtgcagaatgccattcaacaagccatagccgagcaggtggataaagctgtgtccaaaaccagcagggatggagcagagcaacagggacctgaagcgactgtagaggaagctgaagctgcggctttcggctcagaaaagcctcagagcatgtttgagccacctcaggtgtcttctcctgttcaagagaaaagggatgtattaccaaagattctgcctgctgaagacagggcgctcagggaaagggggcccccccagccactgccagctgtgcagcccagtggcccgattaacatggaggagaccaggcccgaaggaagctatttcagcaagtactcggaggcagctgagctgagaagcacagcctccctcctggccactcaagaatctgacgtgatggttgggcctttcaagctgaggtccaggaaacagcggactttgtccatgattgaggaagagatccgagcagctcaggaaagggaagaggagctgaagaggcagagacaagtcttgcagagtacgcagagccccaggacaaagaatgccccatcactgccctccagaacatgctacaaaactgctccagggaaaatagagaaagtcaaacctcctccatcccccaccactgaaggccccagcttgcagcctgacttagcccctgaagaggctgccggaacccagcggcccaagaatctgatgcagaccctcatggaagactatgagacacacaaatctaaaaggcgcgagagaatggatgatagtagtgtcctcgaggccacacgggttaatcgaagaaagagcgcactggctttgcgctgggaagcagggatctatgccaaccaggaggaagaagacaacgaataaacttccttcaacccaggaagcgtctttggtgcttgggagaccaagaaaccaagaaattaacaactgaaagcattttaatggactatttattaaagtgcaaacaaactcagcaatccttatgtagaccagaagctgcaatatacaatgatgaaaatgaaacgaaaaggaagtccccccatcagactctggacacccaggaatcaaaagagaaaggacttttttggtgactcaatcccagtgtctggtttggggccaatctacaatggatccaaaaggacaaaacatgttacaagcaaatcaacatagttgctgcaggcggaactgagaccagcctctctgggcgatgaaggacaatggtggtagggccacttagagagcagtagggcccaggctggtgcagcctacatggcacaggatatttccctgcaccagtttcccacctgtcacttgcagcatcagagggtgttgcattaactccattttctccagcagccataaaatgaatggcgtttctctccatatttgcccagaagaggcagttatgattccacttctcctacatttaattatttttaattgagaacaactcatgatcacaattcataaaatccatattttaagacaatagttcttcatgtcacaaacacaatctattctacatgaggaggctgagaaaggggaagagaaaaacaaaccaaatggatgatgttagctttaggatcgtgtctgcttataatattcactgatctgcagtttatgagaacacattttcacagttatgtttcttcataggaaaactatatttagtgggcaacaactatttttatgatgggatgggggagtatatacacgtatagaatctgtacgcgttgaacaacttggttcaagatggtgggggcatttttagagcggcaataattgaaaaaaaaggcgaactctgccttggagaggtagatgataagaaataaaaaggtgtttataactattttgtattataaagtgggccttagagataggaagaagaatgatggattccttttggatcaatcagaaaggaaacacgaaagaaaagtcaggaaggtagagagagaaaaagggagggaaggagaaagaatgggaataaaataaggaggtaagagatactatttttgctgagcaaccagtgtgtttcaggatgatacaaagaaaaatatagaatagaaataagtgcaggcttggaatcagctacaaatcctaaagatggggtgtgtgtggatgtgtgtgtgtgtgtgtgtacaccattgtgtgtttgtaaaatgtgtatgttcatgagtaagggtgtgtgtgtgtgtgtattaaaattccagagtgaccgtggcacttgggtgtacaggtaattcctccagagctgtttgctggcttcaggagtggagtgagaatttcttttttatgaaaagggatataaaggcaccgagctgatgcagtatttgtaatattaagttgacctaacaaggtatttgcatgagtcacaattacaaagttttgagcggttttgtaatttgacatttaggagagtctcctatttattctcatactttacattcatgcttagtatactatagaggatgccagctttaatctttctgtcatttaaagcaatatgataagggtattcaataattgggtgccctaaatttctggatgagaaaattttcaattctggccatgagaaagaaaaaaaaataaacagccttctttttttttcctttgtttt

SEQ ID NO: 19627 - protein, 948 aa, Homo sapiens; identical to SEQ ID NO: 2443

SEQ ID NO: 19628 - DNA, 6961 bp, Homo sapiens
ggaggggaagcgaggaggcggggaaggggcgggccccaggagcaggcgggcggggctccccgccctccagcgcgcccggaggctaccactccctgcagatgcgctggccccagcccggggctgccgctcgccttcccccggagtctcctggacccccggagtctcctggacccccggagcgggaggcagcggccgcgcggcgctggactggagcagaaccccaggactgcgcccccgggagcgggcgcccagagaagcctccccagctttctgaggatgatatctggctaaaaagcgagggagacaactatagtgccaccctcctggagcctgctgccagctctctttccccagatcacaaaaacatggaaattgaggtgtctgttgcagaatgtaaaagtgttcctggaatcacctctaccccacatcccatggaccatccctccgctttctattcacccccgcataatggcctccttactgatcaccacgaatccctggataatgatgttgccagagagatccgctatctagatgaggtgctagaggccaactgctgtgattctgctgtggatggaacgtacaatggaacatcctccccagagcctggtgcagtggttctggtgggcggcctaagcccccctgtccacgaggcgacccagccagaacccactgaaagaacagctagccggcaggcacctcctcacatcgagctcagtaatagcagccctgaccccatggcagaggcagaaagaacaaatggccattcccccagccagcctagagatgcgctgggggacagcctgcaggtgcctgtcagccccagctccacaaccagctcacggtgttcttcccgagatggagagttcactctcaccacactgaaaaaggaggccaagtttgagctgcgtgccttccatgaggacaagaagccctccaagctctttgaggatgacgagcatgagaaagaacaatactgcattagaaaagtgaggccttcagaggagatgctggagctggaaaaggagaggagagagctcatccgcagccaggccgtcaagaagaatcctggcattgcagcaaaatggtggaatcccccgcaggaaaaaaccatcgaggagcagctggacgaggaacatctggagtcgcacaaaaagtacaaggagcgcaaagagagaagggcacagcaggaacagttgctgctgcagaagcagttacagcagcagcagcagcagcccccatcgcagctctgcacagcccctgcctcttctcatgaacgcgcaagcatgattgacaaagcaaaggaggacattgtcacagagcagatagatttctctgctgctcgcaaacaatttcagctgatggagaattccaggcaagcggtggccaagggccagagtacacccaggctgttctccatcaagcctttctacaggcctctggggtcagtcaactcagacaagccactgactaatccgagaccaccttctgtcgggggacctccagaagacagtggtgcctcagccgccaagggacagaaatcccccggtgccctggagaccccatcggcagcaggaagccagggcaacacagcctctcaggggaaggaagggccctacagcgagccttctaaacgtgggcccttatctaaactgtgggctgaggatggagaatttacgagcgcccgggctgtcctcactgtggtcaaggatgatgaccatgggattttggatcagttctcaagatctgtcaatgtctccttgacccaagaggagcttgactctggtctggacgaattgtcggtgaggtctcaggataccacagtcctggagaccctatccaatgatttcagcatggacaacatcagtgacagcggggcatccaatgagacaaccaatgccctccaggaaaattcactggctgatttttctctgccccagacaccacaaactgacaacccctcagagggccgaggagaaggcgtctccaagtcatttagtgatcatggtttctattccccttcctccacgctgggggactctccgttggttgatgaccccttggagtatcaggctggcctcctggtgcagaatgccattcaacaagccatagccgagcaggtggataaagctgtgtccaaaaccagcagggatggagcagagcaacagggacctgaagcgactgtagaggaagctgaagctgcggctttcggctcagaaaagcctcagagcatgtttgagccacctcaggtgtcttctcctgttcaagagaaaagggatgtattaccaaagattctgcctgctgaagacagggcgctcagggaaagggggcccccccagccactgccagctgtgcagcccagtggcccgattaacatggaggagaccaggcccgaaggaagctatttcagcaagtactcggaggcagctgagctgagaagcacagcctccctcctggccactcaagaatctgacgtgatggttgggcctttcaagctgaggtccaggaaacagcggactttgtccatgattgaggaagagatccgagcagctcaggaaagggaagaggagctgaagaggcagagacaagtcttgcagagtacgcagagccccaggacaaagaatgccccatcactgccctccagaacatgctacaaaactgctccagggaaaatagagaaagtcaaacctcctccatcccccaccactgaaggccccagcttgcagcctgacttagcccctgaagaggctgccggaacccagcggcccaagaatctgatgcagaccctcatggaagactatgagacacacaaatctaaaaggcgcgagagaatggatgatagtagtgtcctcgaggccacacgggttaatcgaagaaagagcgcactggctttgcgctgggaagcagggatctatgccaaccaggaggaagaagacaacgaataaacttccttcaacccaggaagcgtctttggtgcttgggagaccaagaaaccaagaaattaacaactgaaagcattttaatggactatttattaaagtgcaaacaaactcagcaatccttatgtagaccagaagctgcaatatacaatgatgaaaatgaaacgaaaaggaagtccccccatcagactctggacacccaggaatcaaaagagaaaggacttttttggtgactcaatcccagtgtctggtttggggccaatctacaatggatccaaaaggacaaaacatgttacaagcaaatcaacatagttgctgcaggcggaactgagaccagcctctctgggcgatgaaggacaatggtggtagggccacttagagagcagtagggcccaggctggtgcagcctacatggcacaggatatttccctgcaccagtttcccacctgtcacttgcagcatcagagggtgttgcattaactccattttctccagcagccataaaatgaatggcgtttctctccatatttgcccagaagaggcagttatgattccacttctcctacatttaattatttttaattgagaacaactcatgatcacaattcataaaatccatattttaagacaatagttcttcatgtcacaaacacaatctattctacatgaggaggctgagaaaggggaagagaaaaacaaaccaaatggatgatgttagctttaggatcgtgtctgcttataatattcactgatctgcagtttatgagaacacattttcacagttatgtttcttcataggaaaactatatttagtgggcaacaactatttttatgatgggatgggggagtatatacacgtatagaatctgtacgcgttgaacaacttggttcaagatggtgggggcatttttagagcggcaataattgaaaaaaaaggcgaactctgccttggagaggtagatgataagaaataaaaaggtgtttataactattttgtattataaagtgggccttagagataggaagaagaatgatggattccttttggatcaatcagaaaggaaacacgaaagaaaagtcaggaaggtagagagagaaaaagggagggaaggagaaagaatgggaataaaataaggaggtaagagatactatttttgctgagcaaccagtgtgtttcaggatgatacaaagaaaaatatagaatagaaataagtgcaggcttggaatcagctacaaatcctaaagatggggtgtgtgtggatgtgtgtgtgtgtgtgtgtacaccattgtgtgtttgtaaaatgtgtatgttcatgagtaagggtgtgtgtgtgtgtgtattaaaattccagagtgaccgtggcacttgggtgtacaggtaattcctccagagctgtttgctggcttcaggagtggagtgagaatttcttttttatgaaaagggatataaaggcaccgagctgatgcagtatttgtaatattaagttgacctaacaaggtatttgcatgagtcacaattacaaagttttgagcggttttgtaatttgacatttaggagagtctcctatttattctcatactttacattcatgcttagtatactatagaggatgccagctttaatctttctgtcatttaaagcaatatgataagggtattcaataattgggtgccctaaatttctggatgagaaaattttcaattctggccatgagaaagaaaaaaaaataaacagccttctttttttttcctttgttttaaaactgtggttttttaaaaaagcaataattaactcagacctcactaaaaatcatttttgtttttatattgttatgtcataagctctattatgttattctaacaagtagcaatttcacaaaatttgtatgtagatgttaacgcacatttcctttgcttcttttattagactagtgttgactttggggggggacatttattcacaaatgagaagtaggcacaaagtaaaaaatggaaccatctactaacaaggatcctttaaaactgccaagggagctctaacttgaagccacatcctacagatggcagcccaaatagcacatgggcaattggcaccatctttatatggttgagtctcctgaatattttgaatgaattctcaacaaaatgtgctagccactggggacgcaaaacaagtaagatccctgttgcaagaaattcattttatagtgagggaggttggcatggagactaaaattctcaggaaaatgagatccgtgttagattagaagtcctgatgtgaaatgggaggactcaggaaggaggatcgtctttacctgaggatttctagccagaggtcccagatgcctgggctgagaacccagcgataagggggcgttcccaaagcagacacagggataagaacagaggaggcagcagcattgcacagccccaggcacagtggcagttaggatggctggagagtaggatagttctatgggttgcccaaaaaatgtgatgcgcttcatgttttctctgactcatggatctggtagagaccatagacatgatatagactaacttccccatttttcacaagaggaaaccatccttatgacttaccttaaagttttttgttctgttttgaaggaaaccatgtgcttcatgaaacctacagttgacaagagaatgtacagctaagagaaaagcttaagaggccacactattcgcggaatggctttagaggcagatgaagtggtctttgaccacagttgattgaaccagagcacttattgcttaaagaataacagagttctagagctgggggttcttgggccatgctccgtgtgtggataaggaaagaaatactgtttctgggactctcccacagtcacaaagctgttttcactgtggcccctacatctcttaacttttgctattactcctatgctgccttccggattactgctgtctatcttcttgctccactcactgaagatcctattataatcccatgaaaatgtaaattacagtttacttgggagagccagattttctctgtgctcttgagttttttattcattcaagaaaccttgggccaccgctttgtacatagcaccgtgctaggctctgggatcccaaatggacccttttaactttctgaagatgggaccgtcccctggaggaaagtcattcctgcctaatccatcgagagaaagaggcttacgaaaaactttgcctctgatgctcagccccacccccaaatagcacacaagcttgttaaccccacctcttacaaaatgtttagattctgtaggtgttaaaagcctttctggaagtattgcattctgccgtgtttataggtgttcactttcctccagagctgattaactactgacatgacttggctttctcatccagaaattatggaaacagggtctgtcagtggcaggaggccgtgctgtgttttacttggatgacacaatgcagtttacttgcctcttcatacccatgcatgctgctcaccctagacaatgacatataagccgtatatagatcaatgtccacatatatatacacacacacatatatatatataaagtgtaacaaggaacactaaaacagtgttgattcttgtctctgaagacaaataattaaaccttttttttcccaactaaagaatggatttaattaaactatgtattgaaaaaaaagtagcctaagtgttagagatggtgaatatattccattttagttaaagaacaaatttcctgaattttaagcattcagtgagctgccaattttgattttgtgttgctctttacccaaattattttttctttgtttttctttttttgggggaggaggggaaaaaagcagcaatactgtgtttggaaattatactctgtatctggttttcctgtgtatgttaaccacttaaatgttattatcctgctttggttttagagtgattgtgaggcattcaatgcaagtatacagttattttctcattaaaatccaatgtgtgttgagtttttataaat

SEQ ID NO: 19629 - protein, 948 aa, Homo sapiens; identical to SEQ ID NO: 2443

SEQ ID NO: 19630 - DNA, 1550 bp, Homo sapiens
agccagggtgcacgcaggaatctgtctggaaaaaggcagttctcactgaggaggtttgaggcgcgcgctctgggcaggaagcctccccagctttctgaggatgatatctggctaaaaagcgagggagacaactatagtgccaccctcctggagcctgctgccagctctctttccccagatcacaaaaacatggaaattgaggtgtctgttgcagaatgtaaaagtgttcctggaatcacctctaccccacatcccatggaccatccctccgctttctattcacccccgcataatggcctccttactgatcaccacgaatccctggataatgatgttgccagagagatccgctatctagatgaggtgctagaggccaactgctgtgattctgctgtggatggaacgtacaatggaacatcctccccagagcctggtgcagtggttctggtgggcggcctaagcccccctgtccacgaggcgacccagccagaacccactgaaagaacagctagccggcaggcacctcctcacatcgagctcagtaatagcagccctgaccccatggcagaggcagaaagaacaaatggccattcccccagccagcctagagatgcgctgggggacagcctgcaggtgcctgtcagccccagctccacaaccagctcacggtgttcttcccgagatggagagttcactctcaccacactgaaaaaggaggccaagtttgagctgcgtgccttccatgaggacaagaagccctccaagctctttgaggatgacgagcatgagaaagaacaatactgcattagaaaagtgaggccttcagaggagatgctggagctggaaaaggagaggagagagctcatccgcagccaggccgtcaagaagaatcctggcattgcagcaaaatggtggaatcccccgcaggaaaaaaccatcgaggagcagctggacgaggaacatctggagtcgcacaaaaagtacaaggagcgcaaagagagaagggcacagcaggaacagttgctgctgcagaagcagttacagcagcagcagcagcagcccccatcgcagctctgcacagcccctgcctcttctcatgaacgcgcaagcatgattgacaaagcaaaggaggacattgtcacagagcagatagatttctctgctgctcgcaaacaatttcagctgatggagaattccaggcaagcggtggccaagggccagagtacacccaggctgttctccatcaagcctttctacaggcctctggggtcagtcaactcagacaagccactgactaatccgagaccaccttctgtcgggggacctccagaagacagtggtgcctcagccgccaagggacagaaatcccccggtgccctggagaccccatcggcagcaggaagccagggcaacacagcctctcaggggaaggaagggccctacagcgagccttctaaacgtgggcccttatctaaactgtgggctgaggatggagaatttacgagcgcccgggctgtcctcactgtggtcaaggatgatgaccatgggat

SEQ ID NO: 19631 - protein, 452 aa, Homo sapiens
MEIEVSVAECKSVPGITSTPHPMDHPSAFYSPPHNGLLTDHHESLDNDVAREIRYLDEVLEANCCDSAVDGTYNGTSSPEPGAVVLVGGLSPPVHEATQPEPTERTASRQAPPHIELSNSSPDPMAEAERTNGHSPSQPRDALGDSLQVPVSPSSTTSSRCSSRDGEFTLTTLKKEAKFELRAFHEDKKPSKLFEDDEHEKEQYCIRKVRPSEEMLELEKERRELIRSQAVKKNPGIAAKWWNPPQEKTIEEQLDEEHLESHKKYKERKERRAQQEQLLLQKQLQQQQQQPPSQLCTAPASSHERASMIDKAKEDIVTEQIDFSAARKQFQLMENSRQAVAKGQSTPRLFSIKPFYRPLGSVNSDKPLTNPRPPSVGGPPEDSGASAAKGQKSPGALETPSAAGSQGNTASQGKEGPYSEPSKRGPLSKLWAEDGEFTSARAVLTVVKDDDH

SEQ ID NO: 19632 - DNA, 1839 bp, Homo sapiens
gggagggtggaacggcccactcggagtcccagctccttctccttcctgtcgtcgttagcagggagggccagaggaggtgcagccagcctgcttagaaactttggtgcaccgcgctttcttcaattctttttgcccggcacagtttgcgccgttgaagagggctggaagtttatttccagctattgctgcagcacttccttctcctagtgctgttcgttcttcttatgggaactggtactcactccctccaagtctgtgagcgtcttgctggggatggcggatcaccttggagctctgaggacctcgcacggcccaggctgagagcatatagctctgcagggtcccaggatatgcttatggatccaagaagcctccccagctttctgaggatgatatctggctaaaaagcgagggagacaactatagtgccaccctcctggagcctgctgccagctctctttccccagatcacaaaaacatggaaattgaggtgtctgttgcagaatgtaaaagtgttcctggaatcacctctaccccacatcccatggaccatccctccgctttctattcacccccgcataatggcctccttactgatcaccacgaatccctggataatgatgttgccagagagatccgctatctagatgaggtgctagaggccaactgctgtgattctgctgtggatggaacgtacaatggaacatcctccccagagcctggtgcagtggttctggtgggcggcctaagcccccctgtccacgaggcgacccagccagaacccactgaaagaacagctagccggcaggcacctcctcacatcgagctcagtaatagcagccctgaccccatggcagaggcagaaagaacaaatggccattcccccagccagcctagagatgcgctgggggacagcctgcaggtgcctgtcagccccagctccacaaccagctcacggtgttcttcccgagatggagagttcactctcaccacactgaaaaaggaggccaagtttgagctgcgtgccttccatgaggacaagaagccctccaagctctttgaggatgacgagcatgagaaagaacaatactgcattagaaaagtgaggccttcagaggagatgctggagctggaaaaggagaggagagagctcatccgcagccaggccgtcaagaagaatcctggcattgcagcaaaatggtggaatcccccgcaggaaaaaaccatcgaggagcagctggacgaggaacatctggagtcgcacaaaaagtacaaggagcgcaaagagagaagggcacagcaggaacagttgctgctgcagaagcagttacagcagcagcagcagcagcccccatcgcagctctgcacagcccctgcctcttctcatgaacgcgcaagcatgattgacaaagcaaaggaggacattgtcacagagcagatagatttctctgctgctcgcaaacaatttcagctgatggagaattccaggcaagcggtggccaagggccagagtacacccaggctgttctccatcaagcctttctacaggcctctggggtcagtcaactcagacaagccactgactaatccgagaccaccttctgtcgggggacctccagaagacagtggtgcctcagccgccaagggacagaaatcccccggtgccctggagaccccatcggcagcaggaagccagggcaacacagcctctcaggggaaggaagggccctacagcgagccttctaaacgtgggcccttatctaaactgtgggctgaggatggagaatttacgagcgcccgggctgtcctcactgtggtcaaggatgatgaccatgggat

SEQ ID NO: 19633 - protein, 59 aa, Homo sapiens
MGTGTHSLQVCERLAGDGGSPWSSEDLARPRLRAYSSAGSQDMLMDPRSLPSFLRMISG

SEQ ID NO: 19634 - DNA, 3662 bp, Homo sapiens
gatggagagttcactctcaccacactgaaaaaggaggccaagtttgagctgcgtgccttccatgaggacaagaagccctccaagctctttgaggatgacgagcatgagaaagaacaatactgcattagaaaagtgaggccttcagaggagatgctggagctggaaaaggagaggagagagctcatccgcagccaggccgtcaagaagaatcctggcattgcagcaaaatggtggaatcccccgcaggaaaaaaccatcgaggagcagctggacgaggaacatctggagtcgcacaaaaagtacaaggagcgcaaagagagaagggcacagcaggaacagttgctgctgcagaagcagttacagcagcagcagcagcagcccccatcgcagctctgcacagcccctgcctcttctcatgaacgcgcaagcatgattgacaaagcaaaggaggacattgtcacagagcagatagatttctctgctgctcgcaaacaatttcagctgatggagaattccaggcaagcggtggccaagggccagagtacacccaggctgttctccatcaagcctttctacaggcctctggggtcagtcaactcagacaagccactgactaatccgagaccaccttctgtcgggggacctccagaagacagtggtgcctcagccgccaagggacagaaatcccccggtgccctggagaccccatcggcagcaggaagccagggcaacacagcctctcaggggaaggaagggccctacagcgagccttctaaacgtgggcccttatctaaactgtgggctgaggatggagaatttacgagcgcccgggctgtcctcactgtggtcaaggatgatgaccatgggattttggatcagttctcaagatctgtcaatgtctccttgacccaagaggagcttgactctggtctggacgaattgtcggtgaggtctcaggataccacagtcctggagaccctatccaatgatttcagcatggacaacatcagtgacagcggggcatccaatgagacaaccaatgccctccaggaaaattcactggctgatttttctctgccccagacaccacaaactgacaacccctcagagggccgaggagaaggcgtctccaagtcatttagtgatcatggtttctattccccttcctccacgctgggggactctccgttggttgatgaccccttggagtatcaggctggcctcctggtgcagaatgccattcaacaagccatagccgagcaggtggataaagctgtgtccaaaaccagcagggatggagcagagcaacagggacctgaagcgactgtagaggaagctgaagctgcggctttcggctcagaaaagcctcagagcatgtttgagccacctcaggtgtcttctcctgttcaagagaaaagggatgtattaccaaagattctgcctgctgaagacagggcgctcagggaaagggggcccccccagccactgccagctgtgcagcccagtggcccgattaacatggaggagaccaggcccgaaggaagctatttcagcaagtactcggaggcagctgagctgagaagcacagcctccctcctggccactcaagaatctgacgtgatggttgggcctttcaagctgaggtccaggaaacagcggactttgtccatgattgaggaagagatccgagcagctcaggaaagggaagaggagctgaagaggcagagacaagtcttgcagagtacgcagagccccaggacaaagaatgccccatcactgccctccagaacatgctacaaaactgctccaggtcctcgaggccacacgggttaatcgaagaaagagcgcactggctttgcgctgggaagcagggatctatgccaaccaggaggaagaagacaacgaataaacttccttcaacccaggaagcgtctttggtgcttgggagaccaagaaaccaagaaattaacaactgaaagcattttaatggactatttattaaagtgcaaacaaactcagcaatccttatgtagaccagaagctgcaatatacaatgatgaaaatgaaacgaaaaggaagtccccccatcagactctggacacccaggaatcaaaagagaaaggacttttttggtgactcaatcccagtgtctggtttggggccaatctacaatggatccaaaaggacaaaacatgttacaagcaaatcaacatagttgctgcaggcggaactgagaccagcctctctgggcgatgaaggacaatggtggtagggccacttagagagcagtagggcccaggctggtgcagcctacatggcacaggatatttccctgcaccagtttcccacctgtcacttgcagcatcagagggtgttgcattaactccattttctccagcagccataaaatgaatggcgtttctctccatatttgcccagaagaggcagttatgattccacttctcctacatttaattatttttaattgagaacaactcatgatcacaattcataaaatccatattttaagacaatagttcttcatgtcacaaacacaatctattctacatgaggaggctgagaaaggggaagagaaaaacaaaccaaatggatgatgttagctttaggatcgtgtctgcttataatattcactgatctgcagtttatgagaacacattttcacagttatgtttcttcataggaaaactatatttagtgggcaacaactatttttatgatgggatgggggagtatatacacgtatagaatctgtacgcgttgaacaacttggttcaagatggtgggggcatttttagagcggcaataattgaaaaaaaaggcgaactctgccttggagaggtagatgataagaaataaaaaggtgtttataactattttgtattataaagtgggccttagagataggaagaagaatgatggattccttttggatcaatcagaaaggaaacacgaaagaaaagtcaggaaggtagagagagaaaaagggagggaaggagaaagaatgggaataaaataaggaggtaagagatactatttttgctgagcaaccagtgtgtttcaggatgatacaaagaaaaatatagaatagaaataagtgcaggcttggaatcagctacaaatcctaaagatggggtgtgtgtggatgtgtgtgtgtgtgtgtgtacaccattgtgtgtttgtaaaatgtgtatgttcatgagtaagggtgtgtgtgtgtgtgtattaaaattccagagtgaccgtggcacttgggtgtacaggtaattcctccagagctgtttgctggcttcaggagtggagtgagaatttcttttttatgaaaagggatataaaggcaccgagctgatgcagtatttgtaatattaagttgacctaacaaggtatttgcatgagtcacaattacaaagttttgagcggttttgtaatttgacatttaggagagtctcctatttattctcatactttacattcatgcttagtatactatagaggatgccagctttaatctttctgtcatttaaagcaatatgataagggtattcaataattgggtgccctaaatttctggatgagaaaattttcaattctggccatgagaaagaaaaaaaaataaacagccttctttttttttcctttgtttt

SEQ ID NO: 19635 - protein, 560 aa, Homo sapiens
MLELEKERRELIRSQAVKKNPGIAAKWWNPPQEKTIEEQLDEEHLESHKKYKERKERRAQQEQLLLQKQLQQQQQQPPSQLCTAPASSHERASMIDKAKEDIVTEQIDFSAARKQFQLMENSRQAVAKGQSTPRLFSIKPFYRPLGSVNSDKPLTNPRPPSVGGPPEDSGASAAKGQKSPGALETPSAAGSQGNTASQGKEGPYSEPSKRGPLSKLWAEDGEFTSARAVLTVVKDDDHGILDQFSRSVNVSLTQEELDSGLDELSVRSQDTTVLETLSNDFSMDNISDSGASNETTNALQENSLADFSLPQTPQTDNPSEGRGEGVSKSFSDHGFYSPSSTLGDSPLVDDPLEYQAGLLVQNAIQQAIAEQVDKAVSKTSRDGAEQQGPEATVEEAEAAAFGSEKPQSMFEPPQVSSPVQEKRDVLPKILPAEDRALRERGPPQPLPAVQPSGPINMEETRPEGSYFSKYSEAAELRSTASLLATQESDVMVGPFKLRSRKQRTLSMIEEEIRAAQEREEELKRQRQVLQSTQSPRTKNAPSLPSRTCYKTAPGPRGHTG

SEQ ID NO: 19636 - DNA, 5014 bp, Homo sapiens
agaggagcttgactctggtctggacgaattgtcggtgaggtctcaggataccacagtcctggagaccctatccaatgatttcagcatggacaacatcagtgacagcggggcatccaatgagacaaccaatgccctccaggaaaattcactggctgatttttctctgccccagacaccacaaactgacaacccctcagagggccgaggagaaggcgtctccaagtcatttagtgatcatggtttctattccccttcctccacgctgggggactctccgttggttgatgaccccttggagtatcaggctggcctcctggtgcagaatgccattcaacaagccatagccgagcaggtggataaagctgtgtccaaaaccagcagggatggagcagagcaacagggacctgaagcgactgtagaggaagctgaagctgcggctttcggctcagaaaagcctcagagcatgtttgagccacctcaggtgtcttctcctgttcaagagaaaagggatgtattaccaaagattctgcctgctgaagacagggcgctcagggaaagggggcccccccagccactgccagctgtgcagcccagtggcccgattaacatggaggagaccaggcccgaaggaagctatttcagcaagtactcggaggcagctgagctgagaagcacagcctccctcctggccactcaagaatctgacgtgatggttgggcctttcaagctgaggtccaggaaacagcggactttgtccatgattgaggaagagatccgagcagctcaggaaagggaagaggagctgaagaggcagagacaagtcttgcagagtacgcagagccccaggacaaagaatgccccatcactgccctccagaacatgctacaaaactgctccaggtcctcgaggccacacgggttaatcgaagaaagagcgcactggctttgcgctgggaagcagggatctatgccaaccaggaggaagaagacaacgaataaacttccttcaacccaggaagcgtctttggtgcttgggagaccaagaaaccaagaaattaacaactgaaagcattttaatggactatttattaaagtgcaaacaaactcagcaatccttatgtagaccagaagctgcaatatacaatgatgaaaatgaaacgaaaaggaagtccccccatcagactctggacacccaggaatcaaaagagaaaggacttttttggtgactcaatcccagtgtctggtttggggccaatctacaatggatccaaaaggacaaaacatgttacaagcaaatcaacatagttgctgcaggcggaactgagaccagcctctctgggcgatgaaggacaatggtggtagggccacttagagagcagtagggcccaggctggtgcagcctacatggcacaggatatttccctgcaccagtttcccacctgtcacttgcagcatcagagggtgttgcattaactccattttctccagcagccataaaatgaatggcgtttctctccatatttgcccagaagaggcagttatgattccacttctcctacatttaattatttttaattgagaacaactcatgatcacaattcataaaatccatattttaagacaatagttcttcatgtcacaaacacaatctattctacatgaggaggctgagaaaggggaagagaaaaacaaaccaaatggatgatgttagctttaggatcgtgtctgcttataatattcactgatctgcagtttatgagaacacattttcacagttatgtttcttcataggaaaactatatttagtgggcaacaactatttttatgatgggatgggggagtatatacacgtatagaatctgtacgcgttgaacaacttggttcaagatggtgggggcatttttagagcggcaataattgaaaaaaaaggcgaactctgccttggagaggtagatgataagaaataaaaaggtgtttataactattttgtattataaagtgggccttagagataggaagaagaatgatggattccttttggatcaatcagaaaggaaacacgaaagaaaagtcaggaaggtagagagagaaaaagggagggaaggagaaagaatgggaataaaataaggaggtaagagatactatttttgctgagcaaccagtgtgtttcaggatgatacaaagaaaaatatagaatagaaataagtgcaggcttggaatcagctacaaatcctaaagatggggtgtgtgtggatgtgtgtgtgtgtgtgtgtacaccattgtgtgtttgtaaaatgtgtatgttcatgagtaagggtgtgtgtgtgtgtgtattaaaattccagagtgaccgtggcacttgggtgtacaggtaattcctccagagctgtttgctggcttcaggagtggagtgagaatttcttttttatgaaaagggatataaaggcaccgagctgatgcagtatttgtaatattaagttgacctaacaaggtatttgcatgagtcacaattacaaagttttgagcggttttgtaatttgacatttaggagagtctcctatttattctcatactttacattcatgcttagtatactatagaggatgccagctttaatctttctgtcatttaaagcaatatgataagggtattcaataattgggtgccctaaatttctggatgagaaaattttcaattctggccatgagaaagaaaaaaaaataaacagccttctttttttttcctttgttttaaaactgtggttttttaaaaaagcaataattaactcagacctcactaaaaatcatttttgtttttatattgttatgtcataagctctattatgttattctaacaagtagcaatttcacaaaatttgtatgtagatgttaacgcacatttcctttgcttcttttattagactagtgttgactttggggggggacatttattcacaaatgagaagtaggcacaaagtaaaaaatggaaccatctactaacaaggatcctttaaaactgccaagggagctctaacttgaagccacatcctacagatggcagcccaaatagcacatgggcaattggcaccatctttatatggttgagtctcctgaatattttgaatgaattctcaacaaaatgtgctagccactggggacgcaaaacaagtaagatccctgttgcaagaaattcattttatagtgagggaggttggcatggagactaaaattctcaggaaaatgagatccgtgttagattagaagtcctgatgtgaaatgggaggactcaggaaggaggatcgtctttacctgaggatttctagccagaggtcccagatgcctgggctgagaacccagcgataagggggcgttcccaaagcagacacagggataagaacagaggaggcagcagcattgcacagccccaggcacagtggcagttaggatggctggagagtaggatagttctatgggttgcccaaaaaatgtgatgcgcttcatgttttctctgactcatggatctggtagagaccatagacatgatatagactaacttccccatttttcacaagaggaaaccatccttatgacttaccttaaagttttttgttctgttttgaaggaaaccatgtgcttcatgaaacctacagttgacaagagaatgtacagctaagagaaaagcttaagaggccacactattcgcggaatggctttagaggcagatgaagtggtctttgaccacagttgattgaaccagagcacttattgcttaaagaataacagagttctagagctgggggttcttgggccatgctccgtgtgtggataaggaaagaaatactgtttctgggactctcccacagtcacaaagctgttttcactgtggcccctacatctcttaacttttgctattactcctatgctgccttccggattactgctgtctatcttcttgctccactcactgaagatcctattataatcccatgaaaatgtaaattacagtttacttgggagagccagattttctctgtgctcttgagttttttattcattcaagaaaccttgggccaccgctttgtacatagcaccgtgctaggctctgggatcccaaatggacccttttaactttctgaagatgggaccgtcccctggaggaaagtcattcctgcctaatccatcgagagaaagaggcttacgaaaaactttgcctctgatgctcagccccacccccaaatagcacacaagcttgttaaccccacctcttacaaaatgtttagattctgtaggtgttaaaagcctttctggaagtattgcattctgccgtgtttataggtgttcactttcctccagagctgattaactactgacatgacttggctttctcatccagaaattatggaaacagggtctgtcagtggcaggaggccgtgctgtgttttacttggatgacacaatgcagtttacttgcctcttcatacccatgcatgctgctcaccctagacaatgacatataagccgtatatagatcaatgtccacatatatatacacacacacatatatatatataaagtgtaacaaggaacactaaaacagtgttgattcttgtctctgaagacaaataattaaaccttttttttcccaactaaagaatggatttaattaaactatgtattgaaaaaaaagtagcctaagtgttagagatggtgaatatattccattttagttaaagaacaaatttcctgaattttaagcattcagtgagctgccaattttgattttgtgttgctctttacccaaattattttttctttgtttttctttttttgggggaggaggggaaaaaagcagcaatactgtgtttggaaattatactctgtatctggttttcctgtgtatgttaaccacttaaatgttattatcctgctttggttttagagtgattgtgaggcattcaatgcaagtatacagttattttctcattaaaatccaatgtgtgttgagtttttataaat

SEQ ID NO: 19637 - protein, 278 aa, Homo sapiens
MDNISDSGASNETTNALQENSLADFSLPQTPQTDNPSEGRGEGVSKSFSDHGFYSPSSTLGDSPLVDDPLEYQAGLLVQNAIQQAIAEQVDKAVSKTSRDGAEQQGPEATVEEAEAAAFGSEKPQSMFEPPQVSSPVQEKRDVLPKILPAEDRALRERGPPQPLPAVQPSGPINMEETRPEGSYFSKYSEAAELRSTASLLATQESDVMVGPFKLRSRKQRTLSMIEEEIRAAQEREEELKRQRQVLQSTQSPRTKNAPSLPSRTCYKTAPGPRGHTG

SEQ ID NO: 19638 - DNA, 2207 bp, Homo sapiens
ggggctgacaagcaggatgttcccttgtactgagaggaaacgaaattgaaaatgcaagtctgagctcatttctttctggtgacttgtgggtcgcttcagatgtttgcaaccttatcccaatgctgtgtgaagaaaggaggtcattgaaggaggccctggcttaggcatgtcctctgggaaaatagagaaagtcaaacctcctccatcccccaccactgaaggccccagcttgcagcctgacttagcccctgaagaggctgccggaacccagcggcccaagaatctgatgcagaccctcatggaagactatgagacacacaaatctaaaaggcgcgagagaatggatgatagtagtgtcctcgaggccacacgggttaatcgaagaaagagcgcactggctttgcgctgggaagcagggatctatgccaaccaggaggaagaagacaacgaataaacttccttcaacccaggaagcgtctttggtgcttgggagaccaagaaaccaagaaattaacaactgaaagcattttaatggactatttattaaagtgcaaacaaactcagcaatccttatgtagaccagaagctgcaatatacaatgatgaaaatgaaacgaaaaggaagtccccccatcagactctggacacccaggaatcaaaagagaaaggacttttttggtgactcaatcccagtgtctggtttggggccaatctacaatggatccaaaaggacaaaacatgttacaagcaaatcaacatagttgctgcaggcggaactgagaccagcctctctgggcgatgaaggacaatggtggtagggccacttagagagcagtagggcccaggctggtgcagcctacatggcacaggatatttccctgcaccagtttcccacctgtcacttgcagcatcagagggtgttgcattaactccattttctccagcagccataaaatgaatggcgtttctctccatatttgcccagaagaggcagttatgattccacttctcctacatttaattatttttaattgagaacaactcatgatcacaattcataaaatccatattttaagacaatagttcttcatgtcacaaacacaatctattctacatgaggaggctgagaaaggggaagagaaaaacaaaccaaatggatgatgttagctttaggatcgtgtctgcttataatattcactgatctgcagtttatgagaacacattttcacagttatgtttcttcataggaaaactatatttagtgggcaacaactatttttatgatgggatgggggagtatatacacgtatagaatctgtacgcgttgaacaacttggttcaagatggtgggggcatttttagagcggcaataattgaaaaaaaaggcgaactctgccttggagaggtagatgataagaaataaaaaggtgtttataactattttgtattataaagtgggccttagagataggaagaagaatgatggattccttttggatcaatcagaaaggaaacacgaaagaaaagtcaggaaggtagagagagaaaaagggagggaaggagaaagaatgggaataaaataaggaggtaagagatactatttttgctgagcaaccagtgtgtttcaggatgatacaaagaaaaatatagaatagaaataagtgcaggcttggaatcagctacaaatcctaaagatggggtgtgtgtggatgtgtgtgtgtgtgtgtgtacaccattgtgtgtttgtaaaatgtgtatgttcatgagtaagggtgtgtgtgtgtgtgtattaaaattccagagtgaccgtggcacttgggtgtacaggtaattcctccagagctgtttgctggcttcaggagtggagtgagaatttcttttttatgaaaagggatataaaggcaccgagctgatgcagtatttgtaatattaagttgacctaacaaggtatttgcatgagtcacaattacaaagttttgagcggttttgtaatttgacatttaggagagtctcctatttattctcatactttacattcatgcttagtatactatagaggatgccagctttaatctttctgtcatttaaagcaatatgataagggtattcaataattgggtgccctaaatttctggatgagaaaattttcaattctggccatgagaaagaaaaaaaaataaacagccttctttttttttcctttgtttt

SEQ ID NO: 19639 - protein, 95 aa, Homo sapiens [sequence omitted]

SEQ ID NO: 19640 - DNA, 4470 bp, Homo sapiens
ggggctgacaagcaggatgttcccttgtactgagaggaaacgaaattgaaaatgcaagtctgagctcatttctttctggtgacttgtgggtcgcttcagatgtttgcaaccttatcccaatgctgtgtgaagaaaggaggtcattgaaggaggccctggcttaggcatgtcctctgggaaaatagagaaagtcaaacctcctccatcccccaccactgaaggccccagcttgcagcctgacttagcccctgaagaggctgccggaacccagcggcccaagaatctgatgcagaccctcatggaagactatgagacacacaaatctaaaaggcgcgagagaatggatgatagtagtgtcctcgaggccacacgggttaatcgaagaaagagcgcactggctttgcgctgggaagcagggatctatgccaaccaggaggaagaagacaacgaataaacttccttcaacccaggaagcgtctttggtgcttgggagaccaagaaaccaagaaattaacaactgaaagcattttaatggactatttattaaagtgcaaacaaactcagcaatccttatgtagaccagaagctgcaatatacaatgatgaaaatgaaacgaaaaggaagtccccccatcagactctggacacccaggaatcaaaagagaaaggacttttttggtgactcaatcccagtgtctggtttggggccaatctacaatggatccaaaaggacaaaacatgttacaagcaaatcaacatagttgctgcaggcggaactgagaccagcctctctgggcgatgaaggacaatggtggtagggccacttagagagcagtagggcccaggctggtgcagcctacatggcacaggatatttccctgcaccagtttcccacctgtcacttgcagcatcagagggtgttgcattaactccattttctccagcagccataaaatgaatggcgtttctctccatatttgcccagaagaggcagttatgattccacttctcctacatttaattatttttaattgagaacaactcatgatcacaattcataaaatccatattttaagacaatagttcttcatgtcacaaacacaatctattctacatgaggaggctgagaaaggggaagagaaaaacaaaccaaatggatgatgttagctttaggatcgtgtctgcttataatattcactgatctgcagtttatgagaacacattttcacagttatgtttcttcataggaaaactatatttagtgggcaacaactatttttatgatgggatgggggagtatatacacgtatagaatctgtacgcgttgaacaacttggttcaagatggtgggggcatttttagagcggcaataattgaaaaaaaaggcgaactctgccttggagaggtagatgataagaaataaaaaggtgtttataactattttgtattataaagtgggccttagagataggaagaagaatgatggattccttttggatcaatcagaaaggaaacacgaaagaaaagtcaggaaggtagagagagaaaaagggagggaaggagaaagaatgggaataaaataaggaggtaagagatactatttttgctgagcaaccagtgtgtttcaggatgatacaaagaaaaatatagaatagaaataagtgcaggcttggaatcagctacaaatcctaaagatggggtgtgtgtggatgtgtgtgtgtgtgtgtgtacaccattgtgtgtttgtaaaatgtgtatgttcatgagtaagggtgtgtgtgtgtgtgtattaaaattccagagtgaccgtggcacttgggtgtacaggtaattcctccagagctgtttgctggcttcaggagtggagtgagaatttcttttttatgaaaagggatataaaggcaccgagctgatgcagtatttgtaatattaagttgacctaacaaggtatttgcatgagtcacaattacaaagttttgagcggttttgtaatttgacatttaggagagtctcctatttattctcatactttacattcatgcttagtatactatagaggatgccagctttaatctttctgtcatttaaagcaatatgataagggtattcaataattgggtgccctaaatttctggatgagaaaattttcaattctggccatgagaaagaaaaaaaaataaacagccttctttttttttcctttgttttaaaactgtggttttttaaaaaagcaataattaactcagacctcactaaaaatcatttttgtttttatattgttatgtcataagctctattatgttattctaacaagtagcaatttcacaaaatttgtatgtagatgttaacgcacatttcctttgcttcttttattagactagtgttgactttggggggggacatttattcacaaatgagaagtaggcacaaagtaaaaaatggaaccatctactaacaaggatcctttaaaactgccaagggagctctaacttgaagccacatcctacagatggcagcccaaatagcacatgggcaattggcaccatctttatatggttgagtctcctgaatattttgaatgaattctcaacaaaatgtgctagccactggggacgcaaaacaagtaagatccctgttgcaagaaattcattttatagtgagggaggttggcatggagactaaaattctcaggaaaatgagatccgtgttagattagaagtcctgatgtgaaatgggaggactcaggaaggaggatcgtctttacctgaggatttctagccagaggtcccagatgcctgggctgagaacccagcgataagggggcgttcccaaagcagacacagggataagaacagaggaggcagcagcattgcacagccccaggcacagtggcagttaggatggctggagagtaggatagttctatgggttgcccaaaaaatgtgatgcgcttcatgttttctctgactcatggatctggtagagaccatagacatgatatagactaacttccccatttttcacaagaggaaaccatccttatgacttaccttaaagttttttgttctgttttgaaggaaaccatgtgcttcatgaaacctacagttgacaagagaatgtacagctaagagaaaagcttaagaggccacactattcgcggaatggctttagaggcagatgaagtggtctttgaccacagttgattgaaccagagcacttattgcttaaagaataacagagttctagagctgggggttcttgggccatgctccgtgtgtggataaggaaagaaatactgtttctgggactctcccacagtcacaaagctgttttcactgtggcccctacatctcttaacttttgctattactcctatgctgccttccggattactgctgtctatcttcttgctccactcactgaagatcctattataatcccatgaaaatgtaaattacagtttacttgggagagccagattttctctgtgctcttgagttttttattcattcaagaaaccttgggccaccgctttgtacatagcaccgtgctaggctctgggatcccaaatggacccttttaactttctgaagatgggaccgtcccctggaggaaagtcattcctgcctaatccatcgagagaaagaggcttacgaaaaactttgcctctgatgctcagccccacccccaaatagcacacaagcttgttaaccccacctcttacaaaatgtttagattctgtaggtgttaaaagcctttctggaagtattgcattctgccgtgtttataggtgttcactttcctccagagctgattaactactgacatgacttggctttctcatccagaaattatggaaacagggtctgtcagtggcaggaggccgtgctgtgttttacttggatgacacaatgcagtttacttgcctcttcatacccatgcatgctgctcaccctagacaatgacatataagccgtatatagatcaatgtccacatatatatacacacacacatatatatatataaagtgtaacaaggaacactaaaacagtgttgattcttgtctctgaagacaaataattaaaccttttttttcccaactaaagaatggatttaattaaactatgtattgaaaaaaaagtagcctaagtgttagagatggtgaatatattccattttagttaaagaacaaatttcctgaattttaagcattcagtgagctgccaattttgattttgtgttgctctttacccaaattattttttctttgtttttctttttttgggggaggaggggaaaaaagcagcaatactgtgtttggaaattatactctgtatctggttttcctgtgtatgttaaccacttaaatgttattatcctgctttggttttagagtgattgtgaggcattcaatgcaagtatacagttattttctcattaaaatccaatgtgtgttgagtttttataaat

SEQ ID NO: 19641 - protein, 95 aa, Homo sapiens [sequence omitted]

SEQ ID NO: 19642 - DNA, 1527 bp, Homo sapiens
ccagaagctgcaatatacaatgatgaaaatgaaacgaaaaggaagtccccccatcagactctggacacccaggaatcaaaagagaaaggacttttttggtgactcaatcccagtgtctggtttggggccaatctacaatggatccaaaaggacaaaacatgttacaagcaaatcaacatagttgctgcaggcggaactgagaccagcctctctgggcgatgaaggacaatggtggtagggccacttagagagcagtagggcccaggctggtgcagcctacatggcacaggatatttccctgcaccagtttcccacctgtcacttgcagcatcagagggtgttgcattaactccattttctccagcagccataaaatgaatggcgtttctctccatatttgcccagaagaggcagttatgattccacttctcctacatttaattatttttaattgagaacaactcatgatcacaattcataaaatccatattttaagacaatagttcttcatgtcacaaacacaatctattctacatgaggaggctgagaaaggggaagagaaaaacaaaccaaatggatgatgttagctttaggatcgtgtctgcttataatattcactgatctgcagtttatgagaacacattttcacagttatgtttcttcataggaaaactatatttagtgggcaacaactatttttatgatgggatgggggagtatatacacgtatagaatctgtacgcgttgaacaacttggttcaagatggtgggggcatttttagagcggcaataattgaaaaaaaaggcgaactctgccttggagaggtagatgataagaaataaaaaggtgtttataactattttgtattataaagtgggccttagagataggaagaagaatgatggattccttttggatcaatcagaaaggaaacacgaaagaaaagtcaggaaggtagagagagaaaaagggagggaaggagaaagaatgggaataaaataaggaggtaagagatactatttttgctgagcaaccagtgttgtgtgtacaccattgtgtgtttgtaaaatgtgtatgttcatgagtaagggtgtgtgtgtgtgtgtattaaaattccagagtgaccgtggcacttgggtgtacaggtaattcctccagagctgtttgctggcttcaggagtggagtgagaatttcttttttatgaaaagggatataaaggcaccgagctgatgcagtatttgtaatattaagttgacctaacaaggtatttgcatgagtcacaattacaaagttttgagcggttttgtaatttgacatttaggagagtctcctatttattctcatactttacattcatgcttagtatactatagaggatgccagctttaatctttctgtcatttaaagcaatatgataagggtattcaataattgggtgccctaaatttctggatgagaaaattttcaattctggccatgagaaagaaaaaaaaataaacagccttctttttttttcctttgtttt

SEQ ID NO: 19643 - protein, 57 aa, Homo sapiens [sequence omitted]

SEQ ID NO: 19644 - DNA, 1500 bp, Homo sapiens
aaataaaaaggtgtttataactattttgtattataaagtgggccttagagataggaagaagaatgatggattccttttggatcaatcagaaaggaaacacgaaagaaaagtcaggaaggtagagagagaaaaagggagggaaggagaaagaatgggaataaaataaggaggtaagagatactatttttgctgagcaaccagtgtgtttcaggatgatacaaagaaaaatatagaatagaaataagtgcaggcttggaatcagctacaaatcctaaagatggggtgtgtgtggatgtgtgtgtgtgtgtgtgtacaccattgtgtgtttgtaaaatgtgtatgttcatgagtaagggtgtgtgtgtgtgtgtattaaaattccagagtgaccgtggcacttgggtgtacaggtaattcctccagagctgtttgctggcttcaggagtggagtgagaatttcttttttatgaaaagggatataaaggcaccgagctgatgcagtatttgtaatattaagttgacctaacaaggtatttgcatgagtcacaattacaaagttttgagcggttttgtaatttgacatttaggagagtctcctatttattctcatactttacattcatgcttagtatactatagaggatgccagctttaatctttctgtcatttaaagcaatatgataagggtattcaataattgggtgccctaaatttctggatgagaaaattttcaattctggccatgagaaagaaaaaaaaataaacagccttctttttttttcctttgttttaaaactgtggttttttaaaaaagcaataattaactcagacctcactaaaaatcatttttgtttttatattgttatgtcataagctctattatgttattctaacaagtagcaatttcacaaaatttgtatgtagatgttaacgcacatttcctttgcttcttttattagactagtgttgactttggggggggacatttattcacaaatgagaagtaggcacaaagtaaaaaatggaaccatctactaacaaggatcctttaaaactgccaagggagctctaacttgaagccacatcctacagatggcagcccaaatagcacatgggcaattggcaccatctttatatggttgagtctcctgaatattttgaatgaattctcaacaaaatgtgctagccactggggacgcaaaacaagtaagatccctgttgcaagaaattcattttatagtgagggaggttggcatggagactaaaattctcaggaaaatgagatccgtgttagattagaagtcctgatgtgaaatgggaggaggggaaaaaagcagcaatactgtgtttggaaattatactctgtatctggttttcctgtgtatgttaaccacttaaatgttattatcctgctttggttttagagtgattgtgaggcattcaatgcaagtatacagttattttctcattaaaatccaatgtgtgttgagtttttataaa

SEQ ID NO: 19645 - protein, 45 aa, Homo sapiens [sequence omitted]

SEQ ID NO: 19646 - DNA, 609 bp, Homo sapiens
aaattgccgatgtggcatctccagctgcgatgcctgggccatctgctgtcaccatctcctgggagagatgatctcgaagagaagagcccagagaaagttcatccaaaggaagaaagttctttgttgctcccaccaaaacctcactcttcccctagacttgggctcctatcacagccttggctttgatccctgagagcctctttcctggacagtacagtgcggggagatggtgcaagcccatttcgacttcacacgcatgtgaagctgccaatgtgtgcttctgtgggaagagcagttaagagccggggttcaaatgcaagcactaccatttacaagctatgcattgaaaaactaacctcccggggctgcagtttcctactatgtaaaatggaaatcaatataaatataaatataaatgtatcatagtcatggagagcctggagtgcctgtcacattctcagtgacattcacaagtgttatccactgttactagactttgatcaaatttttaaaggggtgcccccacttccaaattcagaactctcaccacttagaggttgaaagatatcacccctgacaggtgccacagaacacccccagatgctcaga

SEQ ID NO: 19647 - protein, 58 aa, Homo sapiens
MWHLQLRCLGHLLSPSPGRDDLEEKSPEKVHPKEESSLLLPPKPHSSPRLGLLSQPWL

SEQ ID NO: 19648 - DNA, 2664 bp, Homo sapiens
gacttcaccgtggcactgggaattggattctaaactttaggatcaagcaatggaaggacctggaataagacaccttcttgacccccctgaagggctctgagcagctgggcttgcctttctctttgctcccccagtcctccccttacttctcggtctcccactccccatcactcctttccctgcctcctcctgcctgtctccatcttcctccctctctttcttctctcgccccattaatccccgcttgtcactatcacctccttcctccagtctttcccccttcgctgccccttctttcctctgacatttccttctcctcttactgccactgtctcccacctttctcctcccccacatttctccctatccctacctcctcttccccttcatctttctccttcccccttatttttctatctccttcctcagtcccactcctctttccaccctccttttgcccgtcacttctccttctccctcactgccccctccctctctctcccctccccaggtcctgccccacccagctgtgtttgcttttctcccggatccggatggaggggttgccctgcccgtgcccagccctgccccacttctggcagcttaggtctcacttaatggctgagggctccaggactcaggcccctgggaaagggcccccactcagcatccagttcctgcgagcccagtatgaaggcttgaagaggcagcagaggacccaggcccacctcctggtgcttccaaaaggaggaaacacacctgctcctgcagaatcgatggtcaatgctgtttggattaacaaggagagaagaagctcactgtccctggaagaggcagattctgaggtggaggggaggctggaggaggctgcccagggctgccttcaggcccccaagtctccatggcacacgcacctggagatgcattgtttggtccaaacctccccccaggacaccagtcatcaagtacatcataggggcaagcttgtgggatctgatcaaaggctccctcctgaaggagacacacacttgtttgaaaccaatcagatgactcagcaaggaaccggaatcccagaggctgcccagcttccatgccaggtgggcaatacccaaacaaaggcagtggaatctggcttaaaattcagcactcaatgtcctctttccataaagaacccacacaggtctggcaaaccagcttactatccatttccccagaggaaaacacccaggatctcccaagctgcccggaacctgggcttatatggctcagcgtgaagctttctattctgccagatgtcttgaccttgaggccacctatggccttatagaagaaccaaggaggcagagccacaacgaggtctctagctatgagcaagaactggactaacctaattataggaattgtgggagacgaacttcacaatggtaacatggttttacccttccaataagaagagacttcccaggccaaattgcccacagtttaggatgaagaggactgtctggtcagtgcagccccattctgacattactatgaggtcctggatatccattccttggggaggaccagtaagacatctgctccatccctggaactggataattttggaacataaaccagggacctagccaacagaatgccttagcaatgcccaggggtcaatgggcgtggcattcttgttttcaatgtcttctgatgatttctcatatattctggagaagacaagctctgagaattcagatgctttttctggtggctatgtctggggggccatctcacttagaagtcacaacactcattggcagtgatcacatcatttcaatttgggcttcccaaagtatggtcacccagggtatgaaggtgagatcaatgctacctaccattttgtgtctttaaggggtctttagaaagggctaatcatctgtcactgctcactgagacatgtacattccagcatcatcacagagttatctccttccttccttccttccttccttccttccttccttctgtctctccctccctccctcccttcctcccttctttccttctttctttcctctcttccttcttgccttctttcctgccttcctgcctatcttttctctctctctctctctgcaaattaagttcttattaaaaactgccaatcattgacgatatataatgatgagatcctgaacaaaagaggcaaagaaatgctcctacttgaaaaatacacattccctatagactgcctcctgtttagtccaacttagatcactcagatccttcctgggatcaaatatatttttaaacctaagacaaagcgaagcaggtgtcacttgggtgatagggaaaaaagcttgtatttcctggttaatgtttagcttttgtaatgctatttaaacacacctaaggtgcctttccctcatctcaggtgctttctctgtaaagtttcactcccacctttcttttctctgcatggccgtccagtcttgcccatctacatccagagctgttaactagtagtgtcattacctgtgaaaaacatgtagaagcttccttgaaccacccagaaatccactcaaatttggggattgtcattccttttgtgaataattaatacaattcagttgttttttaaatattctaataaaaaaggaaattttctcaaaaaaattt

SEQ ID NO: 19649 - protein, 239 aa, Homo sapiens
MEGLPCPCPALPHFWQLRSHLMAEGSRTQAPGKGPPLSIQFLRAQYEGLKRQQRTQAHLLVLPKGGNTPAPAESMVNAVWINKERRSSLSLEEADSEVEGRLEEAAQGCLQAPKSPWHTHLEMHCLVQTSPQDTSHQVHHRGKLVGSDQRLPPEGDTHLFETNQMTQQGTGIPEAAQLPCQVGNTQTKAVESGLKFSTQCPLSIKNPHRSGKPAYYPFPQRKTPRISQAARNLGLYGSA

SEQ ID NO: 19650 - DNA, 1077 bp, Homo sapiens
gctgaggcaagagaatcacttgaaccccggaggcaaaggttactgtgagccgagatcaggcctttgcactccagcctgggcaacaagtgaaactccgtctcaaaaacaaaacaaaacaaaaatgagtccttggtaactagaatattcggttcccagggttacagtatctagatagtaaataattcagggaagttagtggtaagagatttcttgatcatttctactgagaattttatttaacaagcattccttatgaaaaataatatctatgaaaaatttccttcatgaggaacgaaaactttcatttaatgaatgacaagggtatagttttaaaataaagggcaaaaatcaaaggttggtaaacgtgtgatctcagctctggaaaccccattatgcttatgtcaacggtgatgtctgagtgttgaggtttgggaaagactgcttttcaggaagccttggacgctgcaggtgataaacttgtagtagttgacttctcagccacgtggtgtgggccttgcaaaatgatcaagcctttctttcattccctctctgaaaagtattccaacgtgatattccttgaagtagatgtggatgactgtcaggatgttgcttcagagtgtgaagtcaaatgcatgccaacattccagttttttaagaagggacaaaaggtgggtgaattttctggagccaataaggaaaagcttgaagccaccattaatgaattagtctaatcatgttttctgaaaatataaccagccattggctatttaaaacttgtaatttttttaatttacaaaaatataaaatatgaagacataaacccagttgccatctgcgtgacaataaaacattaatgctaacactttttaaaaccgtctcatgtctgaatagctttcaaaataaatgtgaaatggtcatttaatgtattttcctatattctcaatcactttttagtaaccttgtaggccactgattattttaagattttaaaaattattattgctaccttaatgtattgctacaaaaatctcttgttgggggcaatgcaggtaataaagtagtatgttgttatttgtt

SEQ ID NO: 19651 - protein, 69 aa, Homo sapiens [sequence omitted]

SEQ ID NO: 19652 - DNA, 869 bp, Homo sapiens
ctcgcaggctccaggggcggggcgtggccggggcgcagcgacgggcgcggaggtccggccgggcgcgcgcgcccccgccacacgcacgccgggcgtgccagtttataaagggagagagcaagcagcgagtcttgaagctctgtttggtgctttggatccatttccatcggtccttacagccgctcgtcagactccagcagccaagatggtgaagcagatcgagagcaagactgcttttcaggaagccttggacgctgcaggtgataaacttgtagtagttgacttctcagccacgtggtgtgggccttgcaaaatgatcaagcctttctttcattccctctctgaaaagtattccaacgtgatattccttgaagtagatgtggatgactgtcaggatgttgcttcagagtgtgaagtcaaatgcatgccaacattccagttttttaagaagggacaaaaggtgggtgaattttctggagccaataaggaaaagcttgaagccaccattaatgaattagtctaatcatgttttctgaaaatataaccagccattggctatttaaaacttgtaatttttttaatttacaaaaatataaaatatgaagacataaacccagttgccatctgcgtgacaataaaacattaatgctaacactttttaaaaccgtctcatgtctgaatagctttcaaaataaatgtgaaatggtcatttaatgtattttcctatattctcaatcactttttagtaaccttgtaggccactgattattttaagattttaaaaattattattgctaccttaatgtattgctacaaaaatctcttgttgggggcaatgcaggtaataaagtagtatgttgttatttgtt

SEQ ID NO: 19653 - protein, 105 aa, Homo sapiens; identical to SEQ ID NO: 2447

SEQ ID NO: 19654 - DNA, 426 bp, Homo sapiens
agtcttgaagctctgtttggtgctttggatccatttccatcggtccttacagccgctcgtcagactccagcagccaagatggtgaagcagatcgagagcaaggatgttgcttcagagtgtgaagtcaaatgcatgccaacattccagttttttaagaagggacaaaaggtgggtgaattttctggagccaataaggaaaagcttgaagccaccattaatgaattagtctaatcatgttttctgaaaatataaccagccattggctatttaaaacttgtaatttttttaatttacaaaaatataaaatatgaagacataaacccagttgccatctgcgtgacaataaaacattaatgctaacactttttaaaaccgtctcatgtctgaatagctttcaaaataaatgtgaaatggtcatttaatgta

SEQ ID NO: 19655 - protein, 50 aa, Homo sapiens
MVKQIESKDVASECEVKCMPTFQFFKKGQKVGEFSGANKEKLEATINELV

SEQ ID NO: 19656 - DNA, 502 bp, Homo sapiens
agtcttgaagctctgtttggtgctttggatccatttccatcggtccttacagccgctcgtcagactccagcagccaagatggtgaagcagatcgagagcaagactgcttttcaggaagccttggacgctgcagtattccaacgtgatattccttgaagtagatgtggatgactgtcaggatgttgcttcagagtgtgaagtcaaatgcatgccaacattccagttttttaagaagggacaaaaggtgggtgaattttctggagccaataaggaaaagcttgaagccaccattaatgaattagtctaatcatgttttctgaaaatataaccagccattggctatttaaaacttgtaatttttttaatttacaaaaatataaaatatgaagacataaacccagttgccatctgcgtgacaataaaacattaatgctaacactttttaaaaccgtctcatgtctgaatagctttcaaaataaatgtgaaatggtcatttaatgta

SEQ ID NO: 19657 - protein, 46 aa, Homo sapiens
MWMTVRMLLQSVKSNACQHSSFLRRDKRWVNFLEPIRKSLKPPLMN

SEQ ID NO: 19658 - DNA, 635 bp, Homo sapiens
gtggccggggcgcagcgacgggcgcggaggtccggccgggcgcgcgcgcccccgccacacgcacgccgggcgtgccagtttataaagggagagagcaagcagcgagtcttgaagctctgtttggtgctttggatccatttccatcggtccttacagccgctcgtcagactccagcagccaagatggtgaagcagatcgagagcaagactgcttttcaggaagccttggacgctgcaggtgataaacttgtagtagttgacttctcagccacgtggtgtgggccttgcaaaatgatcaagcctttctttcatgatgttgcttcagagtgtgaagtcaaatgcatgccaacattccagttttttaagaagggacaaaaggtgggtgaattttctggagccaataaggaaaagcttgaagccaccattaatgaattagtctaatcatgttttctgaaaatataaccagccattggctatttaaaacttgtaatttttttaatttacaaaaatataaaatatgaagacataaacccagttgccatctgcgtgacaataaaacattaatgctaacactttttaaaaccgtctcatgtctgaatagctttcaaaataaatgtgaaatggtcatttaatgta

SEQ ID NO: 19659 - protein, 85 aa, Homo sapiens
MVKQIESKTAFQEALDAAGDKLVVVDFSATWCGPCKMIKPFFHDVASECEVKCMPTFQFFKKGQKVGEFSGANKEKLEATINELV

SEQ ID NO: 19660 - DNA, 1061 bp, Homo sapiens
caaaattagccaggtgtggtggcgtgtgcctgtagtcccagctactggggaggctgaggagggaggatggcttgagtctgggaagtggagattgcagtgagctgagactatgcccctgcattccatccagcctgggtgacacagccagaccctgtctcaaaaataataataatcagtaaacccagtgtggggttattcctttagattactattattttgttcttgaacaattgatttttatttttttagactttttagcctttatataatcattctgtgtactctgccttcataataaaactggaaaaattatgagcaagaaataagaggtactagttctgaggaatagttaagattatcatactgagtccaattgtagcagaattttttgttgcttctttgtatgatacttaaaatagttgaaaatttgattggattaaagagcatattggatcgctggagtatctgatgctagtaacattctgaacattctgcctgttaatgtgcccgtcaaaggaagtaaatattaataaaacttcttcattgagaatataaccggtttggcttttgtaatgccattatattcattatattaattttcatatgctgaaaaatgtcctcatgcggaaatgtggggtacatgacagggaaaagtttctggttttggattacttctgtcaaagctcagtactcgcagtcttgtatttaatcctctccctttgctactttccctaccaggatgttgcttcagagtgtgaagtcaaatgcatgccaacattccagttttttaagaagggacaaaaggtgggtgaattttctggagccaataaggaaaagcttgaagccaccattaatgaattagtctaatcatgttttctgaaaatataaccagccattggctatttaaaacttgtaatttttttaatttacaaaaatataaaatatgaagacataaacccagttgccatctgcgtgacaataaaacattaatgctaacactttttaaaaccgtctcatgtctgaatagctttcaaaataaatgtgaaatggtcatttaatgt

SEQ ID NO: 19661 - protein, 87 aa, Homo sapiens
MLKNVLMRKCGVHDREKFLVLDYFCQSSVLAVLYLILSLCYFPYQDVASECEVKCMPTFQFFKKGQKVGEFSGANKEKLEATINELV

SEQ ID NO: 19662 - DNA, 925 bp, Homo sapiens
gctgaggcaagagaatcacttgaaccccggaggcaaaggttactgtgagccgagatcaggcctttgcactccagcctgggcaacaagtgaaactccgtctcaaaaacaaaacaaaacaaaaatgagtccttggtaactagaatattcggttcccagggttacagtatctagatagtaaataattcagggaagttagtggtaagagatttcttgatcatttctactgagaattttatttaacaagcattccttatgaaaaataatatctatgaaaaatttccttcatgaggaacgaaaactttcatttaatgaatgacaagggtatagttttaaaataaagggcaaaaatcaaaggttggtaaacgtgtgatctcagctctggaaaccccattatgcttatgtcaacggtgatgtctgagtgttgaggtttgggaaagactgcttttcaggaagccttggacgctgcaggtgataaacttgtagtagttgacttctcagccacgtggtgtgggccttgcaaaatgatcaagcctttctttcattccctctctgaaaagtattccaacgtgatattccttgaagtagatgtggatgactgtcaggatgttgcttcagagtgtgaagtcaaatgcatgccaacattccagttttttaagaagggacaaaaggtgggtgaattttctggagccaataaggaaaagcttgaagccaccattaatgaattagtctaatcatgttttctgaaaatataaccagccattggctatttaaaacttgtaatttttttaatttacaaaaatataaaatatgaagacataaacccagttgccatctgcgtgacaataaaacattaatgctaacactttttaaaaccgtctcatgtctgaatagctttcaaaataaatgtgaaatggtcatttaatgt

SEQ ID NO: 19663 - protein, 69 aa, Homo sapiens [sequence omitted]

SEQ ID NO: 19664 - DNA, 717 bp, Homo sapiens
ctcgcaggctccaggggcggggcgtggccggggcgcagcgacgggcgcggaggtccggccgggcgcgcgcgcccccgccacacgcacgccgggcgtgccagtttataaagggagagagcaagcagcgagtcttgaagctctgtttggtgctttggatccatttccatcggtccttacagccgctcgtcagactccagcagccaagatggtgaagcagatcgagagcaagactgcttttcaggaagccttggacgctgcaggtgataaacttgtagtagttgacttctcagccacgtggtgtgggccttgcaaaatgatcaagcctttctttcattccctctctgaaaagtattccaacgtgatattccttgaagtagatgtggatgactgtcaggatgttgcttcagagtgtgaagtcaaatgcatgccaacattccagttttttaagaagggacaaaaggtgggtgaattttctggagccaataaggaaaagcttgaagccaccattaatgaattagtctaatcatgttttctgaaaatataaccagccattggctatttaaaacttgtaatttttttaatttacaaaaatataaaatatgaagacataaacccagttgccatctgcgtgacaataaaacattaatgctaacactttttaaaaccgtctcatgtctgaatagctttcaaaataaatgtgaaatggtcatttaatgt

SEQ ID NO: 19665 - protein, 105 aa, Homo sapiens; identical to SEQ ID NO: 2447

SEQ ID NO: 19666 - DNA, 1004 bp, Homo sapiens
caaaattagccaggtgtggtggcgtgtgcctgtagtcccagctactggggaggctgaggagggaggatggcttgagtctgggaagtggagattgcagtgagctgagactatgcccctgcattccatccagcctgggtgacacagccagaccctgtctcaaaaataataataatcagtaaacccagtgtggggttattcctttagattactattattttgttcttgaacaattgatttttatttttttagactttttagcctttatataatcattctgtgtactctgccttcataataaaactggaaaaattatgagcaagaaataagaggtactagttctgaggaatagttaagattatcatactgagtccaattgtagcagaattttttgttgcttctttgtatgatacttaaaatagttgaaaatttgattggattaaagagcatattggatcgctggagtatctgatgctagtaacattctgaacattctgcctgttaatgtgcccgtcaaaggaagtaaatattaataaaacttcttcattgagaatataaccggtttggcttttgtaatgccattatattcattatattaattttcatatgctgaaaaatgtcctcatgcggaaatgtggggtacatgacagggaaaagtttctggttttggattacttctgtcaaagctcagtactcgcagtcttgtatttaatcctctccctttgctactttccctaccaggatgttgcttcagagtgtgaagtcaaatgcatgccaacattccagttttttaagaagggacaaaaggtgggtgaattttctggagccaataaggaaaagcttgaagccaccattaatgaattagtctaatcatgttttctgaaaatataaccagccattggctatttaaaacttgtaatttttttaatttacaaaaatataaaatatgaagacataaacccagttgccatctgcgtgacaataaaacattaatgctaacacttttt

SEQ ID NO: 19667 - protein, 87 aa, Homo sapiens; identical to SEQ ID NO: 19661

SEQ ID NO: 19668 - DNA, 868 bp, Homo sapiens
gctgaggcaagagaatcacttgaaccccggaggcaaaggttactgtgagccgagatcaggcctttgcactccagcctgggcaacaagtgaaactccgtctcaaaaacaaaacaaaacaaaaatgagtccttggtaactagaatattcggttcccagggttacagtatctagatagtaaataattcagggaagttagtggtaagagatttcttgatcatttctactgagaattttatttaacaagcattccttatgaaaaataatatctatgaaaaatttccttcatgaggaacgaaaactttcatttaatgaatgacaagggtatagttttaaaataaagggcaaaaatcaaaggttggtaaacgtgtgatctcagctctggaaaccccattatgcttatgtcaacggtgatgtctgagtgttgaggtttgggaaagactgcttttcaggaagccttggacgctgcaggtgataaacttgtagtagttgacttctcagccacgtggtgtgggccttgcaaaatgatcaagcctttctttcattccctctctgaaaagtattccaacgtgatattccttgaagtagatgtggatgactgtcaggatgttgcttcagagtgtgaagtcaaatgcatgccaacattccagttttttaagaagggacaaaaggtgggtgaattttctggagccaataaggaaaagcttgaagccaccattaatgaattagtctaatcatgttttctgaaaatataaccagccattggctatttaaaacttgtaatttttttaatttacaaaaatataaaatatgaagacataaacccagttgccatctgcgtgacaataaaacattaatgctaacacttttt

SEQ ID NO: 19669 - protein, 69 aa, Homo sapiens [sequence omitted]

SEQ ID NO: 19670 - DNA, 444 bp, Homo sapiens
agtcttgaagctctgtttggtgctttggatccatttccatcggtccttacagccgctcgtcagactccagcagccaagatggtgaagcagatcgagagcaagactgcttttcaggaagccttggacgctgcagtattccaacgtgatattccttgaagtagatgtggatgactgtcaggatgttgcttcagagtgtgaagtcaaatgcatgccaacattccagttttttaagaagggacaaaaggtgggtgaattttctggagccaataaggaaaagcttgaagccaccattaatgaattagtctaatcatgttttctgaaaatataaccagccattggctatttaaaacttgtaatttttttaatttacaaaaatataaaatatgaagacataaacccagttgccatctgcgtgacaataaaacattaatgctaacacttttt

SEQ ID NO: 19671 - protein, 46 aa, Homo sapiens; identical to SEQ ID NO: 19657

SEQ ID NO: 19672 - DNA, 577 bp, Homo sapiens
gtggccggggcgcagcgacgggcgcggaggtccggccgggcgcgcgcgcccccgccacacgcacgccgggcgtgccagtttataaagggagagagcaagcagcgagtcttgaagctctgtttggtgctttggatccatttccatcggtccttacagccgctcgtcagactccagcagccaagatggtgaagcagatcgagagcaagactgcttttcaggaagccttggacgctgcaggtgataaacttgtagtagttgacttctcagccacgtggtgtgggccttgcaaaatgatcaagcctttctttcatgatgttgcttcagagtgtgaagtcaaatgcatgccaacattccagttttttaagaagggacaaaaggtgggtgaattttctggagccaataaggaaaagcttgaagccaccattaatgaattagtctaatcatgttttctgaaaatataaccagccattggctatttaaaacttgtaatttttttaatttacaaaaatataaaatatgaagacataaacccagttgccatctgcgtgacaataaaacattaatgctaacacttttt

SEQ ID NO: 19673 - protein, 85 aa, Homo sapiens; identical to SEQ ID NO: 19659

SEQ ID NO: 19674 - DNA, 660 bp, Homo sapiens
ctcgcaggctccaggggcggggcgtggccggggcgcagcgacgggcgcggaggtccggccgggcgcgcgcgcccccgccacacgcacgccgggcgtgccagtttataaagggagagagcaagcagcgagtcttgaagctctgtttggtgctttggatccatttccatcggtccttacagccgctcgtcagactccagcagccaagatggtgaagcagatcgagagcaagactgcttttcaggaagccttggacgctgcaggtgataaacttgtagtagttgacttctcagccacgtggtgtgggccttgcaaaatgatcaagcctttctttcattccctctctgaaaagtattccaacgtgatattccttgaagtagatgtggatgactgtcaggatgttgcttcagagtgtgaagtcaaatgcatgccaacattccagttttttaagaagggacaaaaggtgggtgaattttctggagccaataaggaaaagcttgaagccaccattaatgaattagtctaatcatgttttctgaaaatataaccagccattggctatttaaaacttgtaatttttttaatttacaaaaatataaaatatgaagacataaacccagttgccatctgcgtgacaataaaacattaatgctaacacttttt

SEQ ID NO: 19675 - protein, 105 aa, Homo sapiens; identical to SEQ ID NO: 2447

SEQ ID NO: 19676 - DNA, 490 bp, Homo sapiens
tccaactaaaccaacaggggattttcatcagcacttccctggtgtaatcatggtacagattattaaagacacgaatgaatttaaaacatttttgacagctgccggacacaaactcgcagtggttcaattttcttcgaaacggtgtggtccctgcaaaaggatgtttcctgttttccatgctatgtctgtgaaataccaaaatgtattttttgctaatgtggatgtgaacaattctccggagctggctgaaacttgtcacatcaaaacaatacccacatttcagatgttcaagaaaagccagaaggtaaccctattctcaagaatcaaaagaataatttgctgttatagaagtggattcatgagcaacctgtgtcttgcagatgatggaaatgagtaggatttaacttttcaatcaggaataaaattccttaaagcctcaacattttcgcagcacttgaatcaataaatgtttcacctttgtgcatttgtg

SEQ ID NO: 19677 - protein, 115 aa, Homo sapiens; identical to SEQ ID NO: 2449

SEQ ID NO: 19678 - DNA, 3198 bp, Homo sapiens
gtgtttgccaagatggccgcgcccgtgcgctattaccgaagggcgccgccatcgcggctgccggacccgctaaggccgccctccgggtagccgccatgtcggtctccagcggcgtccagattctgacaaagccagagaccgtggaccggaggagaagtgcggaaacgaccaaagaggccgggcgaccactggagatggctgtgtccgagcccgaggccagcgccgcggaatggaagcaactggatcctgctcagagcaacctgtataatgatgtgatgctggagaactactgcaaccaagcctcaatggggtgtcaagctcccaaaccagacatgatctccaagttggaaaaaggagaagcaccatggttggggaaggggaaaagacccagtcaaggttgtccaagtaaaatagcaagacccaagcaaaaagaaactgatggaaaagtccagaaagatgatgaccagcttgaaaatatccagaaatctcaaaacaaactcctcagggaagttgcagtcaagaagaaaactcaagctaagaagaatggcagtgactgtggttcactggggaaaaaaaataatttgcataaaaaacatgttccttcaaagaaaaggcttcttaaatttgagtcatgtggaaaaattttgaaacagaatttagatttacctgatcactcaagaaactgtgtaaaaaggaaatctgatgcagctaaagaacacaagaagtcattcaaccatagcttatctgatacaaggaaaggcaaaaagcaaactggaaagaaacatgagaaattatccagccatagctcatctgataagtgtaacaaaactggcaaaaaacatgacaaattatgctgtcatagttcatcccatattaaacaggacaaaattcaaactggagagaaacatgagaaatcacccagccttagctcatctactaagcatgaaaaacctcaagcttgtgtgaaaccctatgaatgtaatcaatgtggaaaggttctcagccataaacaaggactcattgaccatcagagagttcatactggggagaaaccatatgaatgtaatgaatgtgggatagcctttagccaaaagtcacaccttgttgtacatcagagaactcacaccggagaaaaaccatatgaatgtattcagtgtggcaaagcccatggtcataaacatgcactcactgaccatctaagaattcatactggagaaaagccctatgaatgtgctgaatgtgggaaaaccttcagacacagctcaaaccttattcaacatgtgagatctcacacaggtgagaagccatatgaatgtaaggaatgtgggaagtcttttaggtataactcatctcttaccgaacatgtgagaacacatacaggtgaaataccatatgaatgcaatgaatgtggaaaagcctttaagtatagctcatcccttactaaacacatgagaattcatacaggtgagaaaccctttgaatgtaatgaatgtgggaaagctttcagcaagaagtcacacctcattatacatcaaagaactcatactaaggagaaaccttataaatgtaatgagtgtggaaaagcctttggacatagctcatctcttacttaccatatgagaactcatacaggtgaaagtccctttgaatgtaatcaatgtgggaaaggctttaaacaaattgaaggccttactcaacatcagagagttcatactggagagaaaccgtatgagtgtaatgaatgtgggaaagcctttagccaaaagtctcacctcattgtacatcagagaactcatactggggagaaaccttatgaatgtaacgaatgtgaaaaagcctttaatgcaaaatcacagcttgttatacatcagcgatcccacactggagaaaaaccctatgaatgtaatgaatgtgggaaaactttcaaacaaaatgcatccctaaccaaacatgtgaaaactcattcagaagataaatctcatgagtgaagttaatgtgggaaatttgttaactaaatttaaggttttgttgaaccttggaaatatgctgattttaaagagtgttagaaagcctttagcaagatgtcacaccttgttgtacatgagaaactttgaaaatggatcttcatatagaatcagtggatggaaacaagggtttaaacttgatacaaaaccttttataaaaaatattgttttaactactcaattattataaatgatctacatgttcagattgaaattgaaagctttaaaaattgtgaattatttgaatattcaaagcaatggagaaacaagttatatatgctgacagttcctgtgtttcttcttgttttgtacttaagcaccatatattagagttgaatttgcatatctgtttattgccttatgtaaatgagtgtggccatctgtataagcctctttgacattttcacccagctctttcttaatgtctgtgttggcttctgcatcagcagaaatctttttaaaagggttgttatatatgtaaaaaatgttaacaggaaaatgagagaaaataaagcagctgaggatacaaatgtgctggtagggagcgatattcaagatatattgtgaagtgtgaaaaagtaggttgctgaaccatgtatatagtatgttcccctttgtgtacaaaagggtatgtttgtttaacctctgtctcttatctctgtatgtgtatgtatctttgtatgcatatatacatgtatctgtatgtgaatagactttgaaaaaatacagaataaacttcatggtggttgccattgggcagaggagtataggactggggtctaggataggagcaagacttccttgtatatttggatttttaaatcatgcacatgtattatttttataattaaaatattttaatatgcataaatcaacattatttaaggttgtcactgagcccctccacaacatgtgagatcaacatgtgagatctcagattttgacagagttaaaatctttgtatgcttattcatgaatgatgatgaatctaaagtatatagtatgaaacttgatgttgaattcataaagactttttctatcacacacaagttctttcattaacatagtgaattataacagcactgtttctacatttgccattttttgatgttgaattgtgattgcaggtgatgatgaattgtgattgcaggtgaatgaaagtgattttatgaat

SEQ ID NO: 19679 - protein, 630 aa, Homo sapiens; identical to SEQ ID NO: 2451

SEQ ID NO: 19680 - DNA, 416 bp, Homo sapiens
gtgaaactgcctgtgtcgaaatgcagtgtttcccaagacctggaggctctctccagctgtaagtggcaggtaagggactgttattctcctgtccctttcacagaggacaggaggaaagtgaggacaggtggtgtacatgcatcttttctgcagcaggcccagatcagctttgcacatggtgctgacctcaaattcagccctagaggggcctgtctctgccctgagtgagtattgaagtgcaggcttcttcccctttgttctgtccatttccaaaaatgtgaacacacacctccaacatgtttctgtgtatattattgtgtgcatagatactaccattgtgaaatattatgcagattaataatgcactatgccattgaaaatttcaaaagaaatgtgtaatgaacatttaaaattaa

SEQ ID NO: 19681 - protein, 32 aa, Homo sapiens
MHLFCSRPRSALHMVLTSNSALEGPVSALSEY

SEQ ID NO: 19682 - DNA, 6020 bp, Homo sapiens
accgggtgggaccggaccgcggtttgagtccaagcccagcggtgtttgcggcgggtccggggcctggaagcgcgggggcggcgccgagagtgagtaagaagttctggaacagcctcagttccaaaaaaatgagtcgctttgttgcggcattaaattttgcccctaactcatgtgtcccggcgtggcccgggagcagcgggcccttcctcttccaggctccctggccccggtctttgatgactcagagctcctgcggtcaccgggccgctctggagactcatcagagcagctcccccatcccgtcagctctgcggttacagcctcagttaatttccaaagtcgcccactttcaaaacacgatcttagggcgggacgatatgtacgcatcttcctgtggccagcagcagtgatggcaacgctgtaggcacctccttcccttaggaagaagccaaacatttcacgaagtccttctgtgcttttagacgaaactggaaaatggccttcattggaaaagccccagtcctcggggagcagatcccccatctctggcagtgcagtgtgcctgggagctgtctggaacattccgcaacggtcactcctctgccctgcattggccttgaccacatgacccagaggtgcagggagaagcctcccttggatgcttggagtgacttcagctgctgagagtgtctaaggagagccgggaacaccgcacgcttcctgcagatggcggggcagacctgtgtgcaagagtgcctgaaggggatctcccgtggcgctacctggtccagggaggtcacagagagctcctccaccctgagcacagggggtcccaccaaggacaaggacaagattcagcaccgtcgcacacagaacagctacctggagccacaggtcactttccaaaaagggagtttccaggccagaagccatccctgcagcattgtctttgtgctccaagagaagccctggcacacacttctgctcagatggaaccactgttccctcagtgtccttgtcagtaccagctggtgactttcctactcaaacccttccctcactctctgcctcattttctcaaggtgccgtgtttgcctgaaaggacattggcagccagcaggggcggcggctggtcctctagatgggcacgaatgccattggcaggcaatggggcagactccatggaaagatgcttctcttcctcaaggtatgcactcagcggggagacctcattgtcaagttcagagttacgctgcagactgcacagcacctcgcctgcttctagggcctgctccggtcagcccaggacccaccacagcaggaccccccatcctgtgctcacccggggcttgtccatggcactggaaactccttcctgttcctgatccccctctgggcgaggggtgggcagggacatgtggctcgtgccgaggtctaatactgtgttcccagcatggaagcaggtggggacacttcctgtggcatgcaggattccgtgtagaaagctgtgactgtcacccctcctccccactcagttttgttagtggacctttccctggcccttctctccttggccccctcttggcaggagagaggaggagaggatctcactttccccctgtaccagccacaccctcggtctgcggggttcccagcagctggccagggatgctccacacctggaggtcaagtaaccgtcccctcactctgggcatcggtgccctctctggggttggaacaggaaagaaagccaagacctgtatgtgggacttgagttgagactcaattctgtagagtcaggggtgaggaggagccaggcctcctgtgtgctctccataccccagagccgggtgcccagttccatgggtcctgatggacagaagggaagaacgggggggctgctgcaccgtgggtggtaatgcagtgggagccacctccagctgaatgcccagggactcctggggctgctggccccgggtcccagcagtgggtcctgtttcttctttactcttggaatgcaggatctgccacaccaaaacgtcccctccacatttggtgaaataggaagctccatggcatgtctccatctttcaaggtgactgagaggtttattttcataggagcctcagtggccttgtccgtacccacctctgcacgtggttgcagaaagtgaaggattgtcagggagcagggcagacatttggtttatctgtgtcattggtcaaagttttgtttttcctccagaagaaaaaggcttgtgaacatgccaccgtattcttcattccttcttttggaaatgtatgaagaacgggtggcattttggagttattggcctgtgaacagctggcccagaggaagggttagatgtgggtgggtgtggccgcctctgcccctccccagcgcaggtgtgcgtgggcagcccaggcaggcgctcaggaagggtgaggtggagccctgcacgctctgagcacaaagtcctgggatcccttaaacccaagcactgccttgacagcagccagcatggctgatagaagagacacagaagtccagctgatgccagacagagggcgtcactagagagccgtgctaggtgggggtcattcaagttgtcttggcgtatgcagacgttgcttctagagagtcagaagctctatatgcgtagtgttggagcagaatttcgggatagtgatggcaagcctcctcccaagccagctggggagtatggggagggggtggccggaggaacctggcatccccgggttaggaccacagaggtggctctgcctgcagctgggcctctgcctcatcctgactccccctgctttggccatggctcttcttgtccttcctcttctcagtgcaggaggaccctgaatcaaatgcctcatcctggtttgcattttaccctcggatgaagcttgtggcgaacccctggactctgtgtctcctgagtctctgcagacctcgggtcctggacccagagactcttctccctgggacaggaggcactggggtgggtggacaggggtggcctggggcacagtagctgacggggggacttcctagttttctgggcctttccaactctgagtgtgaccttcctattcttgatcacagcccccaacttcggagcctgctagagcctgcagaatgtggcttcatcctcttcctctgtgggaaaaggcggggcctggcagtcccgccaatcttgtatatttgctccccacctcggtggtgaatacattcttgggtggtgaataggttctctccttgccttcactctagaaaagtcccctgttttgtgatgtaggatgtggtcaatgactgactcgtccctttggaccatagacgcagctctgatttctggtgttcctgggctctgcacacagcaggagccactctgggctctgagaggtgcatcttctggctcactttcttcttgttggctcttctccctgcgtcttctgccactgccctgttctgggtgggaggctgtcacactgtggtggagggtcccctctcctgcctcccctctttgatccttttctgtgagggtctgctggggtcctgtgtgtcgtgcattgttgatagattcctgtcgtgcttgctgtcctccccattctaagggacctctgattgcctgtgagcagtttacagggtcctctcctggccccttcacccgaggaattcccgcaacgcatgagtttgtgaggggcggatcctgggaggatgtgacgtcaggtgagaagggagggcccgtcctagtccggtgggctcctctaacaaagtgcattagcctggggagttactgacgctcgaaatatgtcgtcaaagttctgaaggctgagaagtccgagatcaagatgcctgaggattcagtgcctggtgaggacccattccttagggcagtgcctctagctgtgtcctcatgtggccgaaggggacaagggaggttgctggagcctgtttgatgagagcactaccttccttcaggaggggattattcagaaagtctgtctggtttcagggcattcccaaaggccccacctgttcattctaccccattggtagaattcccattgggaattaggcttcaacatacaaatttgggagacactgacatttaggccatagcgcgtcaaaggcaaagtgaggctgagtgtggaaaccatcccagaatctggatgtggcccaggcagaaggaaactcaaagtgatggggtgaccgatggtccctggtctgtgcaggactcagcggtgcggatggccctgggcacggtggcagtggctgttggaggatgatagggaacatgttggtggggggagggtggagcccactatgagtggcaactccctgggggcacaggaaacaaagctagaggtggctcccctctcccctccctgcacacagtgtcacctctgtggtggccctgtcgtccgcctcagttcacaggtgttgctgtaacaactcctgaaattaccttcaaaaggaggctcgtgcaggtgcctgcaggagccaggaggccgaagtgcatcctgagtgtccggggacaggccagcctggcggggtccacggccccacagtcccaacgactgcctcagaaatgggcagagagcatgcctggttctagctggcaaggcccacatctcagagctgtggacagtcatgaagggtccgtgagcatggagagggggcaaaaatgacccatgaacctcaggccactgtgctgccatccagccaagtgcggtaccagcccttcgggcctcgagatcctctacccttctctgggccttgctgatttcctcctccagcccctctgtttgtgtacgcacatacacacatgcacgcacgcacacgcacacccagtgcaatttctctctgctccctgtactccccaaaattcaatgggttcctctttcctcctcagagatatagtcctgggccccatctcagcctgcagaggcctgaacgtttcccaggattgtcttctaattctcaggtccggctttaaaacaaaacctaaactaaaactaaaatgctttctgcaaagaataatacaccaacataaagtccgggtatcctaagcatgtggtgtgtatggtgtctgaaattgaatatgctgtgaaactgcctgtgtcgaaatgcagtgtttcccaagacctggaggctctctccagctgctgattgtgatcacctctcccgatcaccgctgagccctgcaggtcaccttctcctgacctattacaccactgattgcttatgctgggcacaattttatacccttgctgttgttcagtctaatcatccctataaccctatcggatcattcccatatgacagaggagaaaacctggggacacaggggctgtgtcctggccaaggccttgcttgcagcaaaaggcagagctggggtctagccaggagccccagcacagtcctgttcttcccccactaaactgagctgtgaaatagatcatggcagtttggaaaacgggctaactgtatgctgagggaggtggtgacggatacctacttcttttcatgggaaggtgaggtgtctccctgcccccctcaggtctagcctctctctgtagctcagaaccttgggaaagtgggaggctcagaggaggaaagagatttacttgcccaagggccgcagctgctaagtggcaggtaagggactgttattctcctgtccctttcacagaggacaggaggaaagtgaggacaggtggtgtacatgcatcttttctgcagcaggcccagatcagctttgcacatggtgctgacctcaaattcagccctagaggggcctgtctctgccctgagtgagtattgaagtgcaggcttcttcccctttgttctgtccatttccaaaaatgtgaacacacacctccaacatgtttctgtgtatattattgtgtgcatagatactaccattgtgaaatattatgcagattaataatgcactatgccattgaaaatttcaaaagaaatgtgtaatgaacatttaaaattaa

SEQ ID NO: 19683 - protein, 62 aa, Homo sapiens
MAFIGKAPVLGEQIPHLWQCSVPGSCLEHSATVTPLPCIGLDHMTQRCREKPPLDAWSDFSC

SEQ ID NO: 19684 - DNA, 6018 bp, Homo sapiens
agaccgggtgggaccggaccgcggtttgagtccaagcccagcggtgtttgcggcgggtccggggcctggaagcgcgggggcggcgccgagagtgagtaagaagttctggaacagcctcagttccaaaaaaatgagtcgctttgttgcggcattaaattttgcccctaactcatgtgtcccggcgtggcccgggagcagcgggcccttcctcttccaggctccctggccccggtctttgatgactcagagctcctgcggtcaccgggccgctctggagactcatcagagcagctcccccatcccgtcagctctgcggttacagcctcagttaatttccaaagtcgcccactttcaaaacacgatcttagggcgggacgatatgtacgcatcttcctgtggccagcagcagtgatggcaacgctgtaggcacctccttcccttaggaagaagccaaacatttcacgaagtccttctgtgcttttagacgaaactggaaaatggccttcattggaaaagccccagtcctcggggagcagatcccccatctctggcagtgcagtgtgcctgggagctgtctggaacattccgcaacggtcactcctctgccctgcattggccttgaccacatgacccagaggtgcagggagaagcctcccttggatgcttggagtgacttcagctgctgagagtgtctaaggagagccgggaacaccgcacgcttcctgcagatggcggggcagacctgtgtgcaagagtgcctgaaggggatctcccgtggcgctacctggtccagggaggtcacagagagctcctccaccctgagcacagggggtcccaccaaggacaaggacaagattcagcaccgtcgcacacagaacagctacctggagccacaggtcactttccaaaaagggagtttccaggccagaagccatccctgcagcattgtctttgtgctccaagagaagccctggcacacacttctgctcagatggaaccactgttccctcagtgtccttgtcagtaccagctggtgactttcctactcaaacccttccctcactctctgcctcattttctcaaggtgccgtgtttgcctgaaaggacattggcagccagcaggggcggcggctggtcctctagatgggcacgaatgccattggcaggcaatggggcagactccatggaaagatgcttctcttcctcaaggtatgcactcagcggggagacctcattgtcaagttcagagttacgctgcagactgcacagcacctcgcctgcttctagggcctgctccggtcagcccaggacccaccacagcaggaccccccatcctgtgctcacccggggcttgtccatggcactggaaactccttcctgttcctgatccccctctgggcgaggggtgggcagggacatgtggctcgtgccgaggtctaatactgtgttcccagcatggaagcaggtggggacacttcctgtggcatgcaggattccgtgtagaaagctgtgactgtcacccctcctccccactcagttttgttagtggacctttccctggcccttctctccttggccccctcttggcaggagagaggaggagaggatctcactttccccctgtaccagccacaccctcggtctgcggggttcccagcagctggccagggatgctccacacctggaggtcaagtaaccgtcccctcactctgggcatcggtgccctctctggggttggaacaggaaagaaagccaagacctgtatgtgggacttgagttgagactcaattctgtagagtcaggggtgaggaggagccaggcctcctgtgtgctctccataccccagagccgggtgcccagttccatgggtcctgatggacagaagggaagaacgggggggctgctgcaccgtgggtggtaatgcagtgggagccacctccagctgaatgcccagggactcctggggctgctggccccgggtcccagcagtgggtcctgtttcttctttactcttggaatgcaggatctgccacaccaaaacgtcccctccacatttggtgaaataggaagctccatggcatgtctccatctttcaaggtgactgagaggtttattttcataggagcctcagtggccttgtccgtacccacctctgcacgtggttgcagaaagtgaaggattgtcagggagcagggcagacatttggtttatctgtgtcattggtcaaagttttgtttttcctccagaagaaaaaggcttgtgaacatgccaccgtattcttcattccttcttttggaaatgtatgaagaacgggtggcattttggagttattggcctgtgaacagctggcccagaggaagggttagatgtgggtgggtgtggccgcctctgcccctccccagcgcaggtgtgcgtgggcagcccaggcaggcgctcaggaagggtgaggtggagccctgcacgctctgagcacaaagtcctgggatcccttaaacccaagcactgccttgacagcagccagcatggctgatagaagagacacagaagtccagctgatgccagacagagggcgtcactagagagccgtgctaggtgggggtcattcaagttgtcttggcgtatgcagacgttgcttctagagagtcagaagctctatatgcgtagtgttggagcagaatttcgggatagtgatggcaagcctcctcccaagccagctggggagtatggggagggggtggccggaggaacctggcatccccgggttaggaccacagaggtggctctgcctgcagctgggcctctgcctcatcctgactccccctgctttggccatggctcttcttgtccttcctcttctcagtgcaggaggaccctgaatcaaatgcctcatcctggtttgcattttaccctcggatgaagcttgtggcgaacccctggactctgtgtctcctgagtctctgcagacctcgggtcctggacccagagactcttctccctgggacaggaggcactggggtgggtggacaggggtggcctggggcacagtagctgacggggggacttcctagttttctgggcctttccaactctgagtgtgaccttcctattcttgatcacagcccccaacttcggagcctgctagagcctgcagaatgtggcttcatcctcttcctctgtgggaaaaggcggggcctggcagtcccgccaatcttgtatatttgctccccacctcggtggtgaatacattcttgggtggtgaataggttctctccttgccttcactctagaaaagtcccctgttttgtgatgtaggatgtggtcaatgactgactcgtccctttggaccatagacgcagctctgatttctggtgttcctgggctctgcacacagcaggagccactctgggctctgagaggtgcatcttctggctcactttcttcttgttggctcttctccctgcgtcttctgccactgccctgttctgggtgggaggctgtcacactgtggtggagggtcccctctcctgcctcccctctttgatccttttctgtgagggtctgctggggtcctgtgtgtcgtgcattgttgatagattcctgtcgtgcttgctgtcctccccattctaagggacctctgattgcctgtgagcagtttacagggtcctctcctggccccttcacccgaggaattcccgcaacgcatgagtttgtgaggggcggatcctgggaggatgtgacgtcaggtgagaagggagggcccgtcctagtccggtgggctcctctaacaaagtgcattagcctggggagttactgacgctcgaaatatgtcgtcaaagttctgaaggctgagaagtccgagatcaagatgcctgaggattcagtgcctggtgaggacccattccttagggcagtgcctctagctgtgtcctcatgtggccgaaggggacaagggaggttgctggagcctgtttgatgagagcactaccttccttcaggaggggattattcagaaagtctgtctggtttcagggcattcccaaaggccccacctgttcattctaccccattggtagaattcccattgggaattaggcttcaacatacaaatttgggagacactgacatttaggccatagcgcgtcaaaggcaaagtgaggctgagtgtggaaaccatcccagaatctggatgtggcccaggcagaaggaaactcaaagtgatggggtgaccgatggtccctggtctgtgcaggactcagcggtgcggatggccctgggcacggtggcagtggctgttggaggatgatagggaacatgttggtggggggagggtggagcccactatgagtggcaactccctgggggcacaggaaacaaagctagaggtggctcccctctcccctccctgcacacagtgtcacctctgtggtggccctgtcgtccgcctcagttcacaggtgttgctgtaacaactcctgaaattaccttcaaaaggaggctcgtgcaggtgcctgcaggagccaggaggccgaagtgcatcctgagtgtccggggacaggccagcctggcggggtccacggccccacagtcccaacgactgcctcagaaatgggcagagagcatgcctggttctagctggcaaggcccacatctcagagctgtggacagtcatgaagggtccgtgagcatggagagggggcaaaaatgacccatgaacctcaggccactgtgctgccatccagccaagtgcggtaccagcccttcgggcctcgagatcctctacccttctctgggccttgctgatttcctcctccagcccctctgtttgtgtacgcacatacacacatgcacgcacgcacacgcacacccagtgcaatttctctctgctccctgtactccccaaaattcaatgggttcctctttcctcctcagagatatagtcctgggccccatctcagcctgcagaggcctgaacgtttcccaggattgtcttctaattctcaggtccggctttaaaacaaaacctaaactaaaactaaaatgctttctgcaaagaataatacaccaacataaagtccgggtatcctaagcatgtggtgtgtatggtgtctgaaattgaatatgctgtgaaactgcctgtgtcgaaatgcagtgtttcccaagacctggaggctctctccagctgctgattgtgatcacctctcccgatcaccgctgagccctgcaggtcaccttctcctgacctattacaccactgattgcttatgctgggcacaattttatacccttgctgttgttcagtctaatcatccctataaccctatcggatcattcccatatgacagaggagaaaacctggggacacaggggctgtgtcctggccaaggccttgcttgcagcaaaaggcagagctggggtctagccaggagccccagcacagtcctgttcttcccccactaaactgagctgtgaaatagatcatggcggtctggaaaacgagctaattccgtgccgatggaggtgttgatggatgtccaccactctccacttgggaggaggccttaacatccccctcaggtctagcttctctctgtgactgagtaccttgggaaagtgggctcagaggaggaaagggacttacttgcccaagggccacagctgccaagtggcaggtaagggaccgttattctcctgtccctttcacagaggacaggaggaaagtgaggacaggtggggtacatgagtttagcctcttttctgcagcaggcccagatcagctttgcacacggttggtgctgacctcaaatgcagccctagaggggcctatctctgccctgagtattgaggtgcaggcttcttcccctttgttctgtccatttccaaaaatgtgaacacacacctcctacatgtttatattattgtgtgcatagatactaccattgtaacattttttgcggattaaaaatgcactattgtattgaaaatttcaaaggaaatgtgtaataaaacatttaaaattaa

SEQ ID NO: 19685 - protein, 62 aa, Homo sapiens; identical to SEQ ID NO: 19683

SEQ ID NO: 19686 - DNA, 5625 bp, Homo sapiens
agaccgggtgggaccggaccgcggtttgagtccaagcccagcggtgtttgcggcgggtccggggcctggaagcgcgggggcggcgccgagaacgaaactggaaaatggccttcattggaaaagccccagtcctcggggagcagatcccccatctctggcagtgcagtgtgcctgggagctgtctggaacattccgcaacggtcactcctctgccctgcattggccttgaccacatgacccagaggtgcagggagaagcctcccttggatgcttggagtgacttcagctgctgagagtgtctaaggagagccgggaacaccgcacgcttcctgcagatggcggggcagacctgtgtgcaagagtgcctgaaggggatctcccgtggcgctacctggtccagggaggtcacagagagctcctccaccctgagcacagggggtcccaccaaggacaaggacaagattcagcaccgtcgcacacagaacagctacctggagccacaggtcactttccaaaaagggagtttccaggccagaagccatccctgcagcattgtctttgtgctccaagagaagccctggcacacacttctgctcagatggaaccactgttccctcagtgtccttgtcagtaccagctggtgactttcctactcaaacccttccctcactctctgcctcattttctcaaggtgccgtgtttgcctgaaaggacattggcagccagcaggggcggcggctggtcctctagatgggcacgaatgccattggcaggcaatggggcagactccatggaaagatgcttctcttcctcaaggtatgcactcagcggggagacctcattgtcaagttcagagttacgctgcagactgcacagcacctcgcctgcttctagggcctgctccggtcagcccaggacccaccacagcaggaccccccatcctgtgctcacccggggcttgtccatggcactggaaactccttcctgttcctgatccccctctgggcgaggggtgggcagggacatgtggctcgtgccgaggtctaatactgtgttcccagcatggaagcaggtggggacacttcctgtggcatgcaggattccgtgtagaaagctgtgactgtcacccctcctccccactcagttttgttagtggacctttccctggcccttctctccttggccccctcttggcaggagagaggaggagaggatctcactttccccctgtaccagccacaccctcggtctgcggggttcccagcagctggccagggatgctccacacctggaggtcaagtaaccgtcccctcactctgggcatcggtgccctctctggggttggaacaggaaagaaagccaagacctgtatgtgggacttgagttgagactcaattctgtagagtcaggggtgaggaggagccaggcctcctgtgtgctctccataccccagagccgggtgcccagttccatgggtcctgatggacagaagggaagaacgggggggctgctgcaccgtgggtggtaatgcagtgggagccacctccagctgaatgcccagggactcctggggctgctggccccgggtcccagcagtgggtcctgtttcttctttactcttggaatgcaggatctgccacaccaaaacgtcccctccacatttggtgaaataggaagctccatggcatgtctccatctttcaaggtgactgagaggtttattttcataggagcctcagtggccttgtccgtacccacctctgcacgtggttgcagaaagtgaaggattgtcagggagcagggcagacatttggtttatctgtgtcattggtcaaagttttgtttttcctccagaagaaaaaggcttgtgaacatgccaccgtattcttcattccttcttttggaaatgtatgaagaacgggtggcattttggagttattggcctgtgaacagctggcccagaggaagggttagatgtgggtgggtgtggccgcctctgcccctccccagcgcaggtgtgcgtgggcagcccaggcaggcgctcaggaagggtgaggtggagccctgcacgctctgagcacaaagtcctgggatcccttaaacccaagcactgccttgacagcagccagcatggctgatagaagagacacagaagtccagctgatgccagacagagggcgtcactagagagccgtgctaggtgggggtcattcaagttgtcttggcgtatgcagacgttgcttctagagagtcagaagctctatatgcgtagtgttggagcagaatttcgggatagtgatggcaagcctcctcccaagccagctggggagtatggggagggggtggccggaggaacctggcatccccgggttaggaccacagaggtggctctgcctgcagctgggcctctgcctcatcctgactccccctgctttggccatggctcttcttgtccttcctcttctcagtgcaggaggaccctgaatcaaatgcctcatcctggtttgcattttaccctcggatgaagcttgtggcgaacccctggactctgtgtctcctgagtctctgcagacctcgggtcctggacccagagactcttctccctgggacaggaggcactggggtgggtggacaggggtggcctggggcacagtagctgacggggggacttcctagttttctgggcctttccaactctgagtgtgaccttcctattcttgatcacagcccccaacttcggagcctgctagagcctgcagaatgtggcttcatcctcttcctctgtgggaaaaggcggggcctggcagtcccgccaatcttgtatatttgctccccacctcggtggtgaatacattcttgggtggtgaataggttctctccttgccttcactctagaaaagtcccctgttttgtgatgtaggatgtggtcaatgactgactcgtccctttggaccatagacgcagctctgatttctggtgttcctgggctctgcacacagcaggagccactctgggctctgagaggtgcatcttctggctcactttcttcttgttggctcttctccctgcgtcttctgccactgccctgttctgggtgggaggctgtcacactgtggtggagggtcccctctcctgcctcccctctttgatccttttctgtgagggtctgctggggtcctgtgtgtcgtgcattgttgatagattcctgtcgtgcttgctgtcctccccattctaagggacctctgattgcctgtgagcagtttacagggtcctctcctggccccttcacccgaggaattcccgcaacgcatgagtttgtgaggggcggatcctgggaggatgtgacgtcaggtgagaagggagggcccgtcctagtccggtgggctcctctaacaaagtgcattagcctggggagttactgacgctcgaaatatgtcgtcaaagttctgaaggctgagaagtccgagatcaagatgcctgaggattcagtgcctggtgaggacccattccttagggcagtgcctctagctgtgtcctcatgtggccgaaggggacaagggaggttgctggagcctgtttgatgagagcactaccttccttcaggaggggattattcagaaagtctgtctggtttcagggcattcccaaaggccccacctgttcattctaccccattggtagaattcccattgggaattaggcttcaacatacaaatttgggagacactgacatttaggccatagcgcgtcaaaggcaaagtgaggctgagtgtggaaaccatcccagaatctggatgtggcccaggcagaaggaaactcaaagtgatggggtgaccgatggtccctggtctgtgcaggactcagcggtgcggatggccctgggcacggtggcagtggctgttggaggatgatagggaacatgttggtggggggagggtggagcccactatgagtggcaactccctgggggcacaggaaacaaagctagaggtggctcccctctcccctccctgcacacagtgtcacctctgtggtggccctgtcgtccgcctcagttcacaggtgttgctgtaacaactcctgaaattaccttcaaaaggaggctcgtgcaggtgcctgcaggagccaggaggccgaagtgcatcctgagtgtccggggacaggccagcctggcggggtccacggccccacagtcccaacgactgcctcagaaatgggcagagagcatgcctggttctagctggcaaggcccacatctcagagctgtggacagtcatgaagggtccgtgagcatggagagggggcaaaaatgacccatgaacctcaggccactgtgctgccatccagccaagtgcggtaccagcccttcgggcctcgagatcctctacccttctctgggccttgctgatttcctcctccagcccctctgtttgtgtacgcacatacacacatgcacgcacgcacacgcacacccagtgcaatttctctctgctccctgtactccccaaaattcaatgggttcctctttcctcctcagagatatagtcctgggccccatctcagcctgcagaggcctgaacgtttcccaggattgtcttctaattctcaggtccggctttaaaacaaaacctaaactaaaactaaaatgctttctgcaaagaataatacaccaacataaagtccgggtatcctaagcatgtggtgtgtatggtgtctgaaattgaatatgctgtgaaactgcctgtgtcgaaatgcagtgtttcccaagacctggaggctctctccagctgctgattgtgatcacctctcccgatcaccgctgagccctgcaggtcaccttctcctgacctattacaccactgattgcttatgctgggcacaattttatacccttgctgttgttcagtctaatcatccctataaccctatcggatcattcccatatgacagaggagaaaacctggggacacaggggctgtgtcctggccaaggccttgcttgcagcaaaaggcagagctggggtctagccaggagccccagcacagtcctgttcttcccccactaaactgagctgtgaaatagatcatggcggtctggaaaacgagctaattccgtgccgatggaggtgttgatggatgtccaccactctccacttgggaggaggccttaacatccccctcaggtctagcttctctctgtgactgagtaccttgggaaagtgggctcagaggaggaaagggacttacttgcccaagggccacagctgccaagtggcaggtaagggaccgttattctcctgtccctttcacagaggacaggaggaaagtgaggacaggtggggtacatgagtttagcctcttttctgcagcaggcccagatcagctttgcacacggttggtgctgacctcaaatgcagccctagaggggcctatctctgccctgagtattgaggtgcaggcttcttcccctttgttctgtccatttccaaaaatgtgaacacacacctcctacatgtttatattattgtgtgcatagatactaccattgtaacattttttgcggattaaaaatgcactattgtattgaaaatttcaaaggaaatgtgtaataaaacatttaaaattaa

SEQ ID NO: 19687 - protein, 62 aa, Homo sapiens; identical to SEQ ID NO: 19683

SEQ ID NO: 19688 - DNA, 496 bp, Homo sapiens
tcctgggccccatctcagcctgcagaggcctgaacgtttcccaggattgtcttctaattttctctctgtgactgagtaccttgggaaagtgggctcagaggaggaaagggacttacttgcccaagggccacagctgccaagtggcaggtaagggaccgttattctcctgtccctttcacagaggacaggaggaaagtgaggacaggtggggtacatgagtttagcctcttttctgcagcaggcccagatcagctttgcacacggttggtgctgacctcaaatgcagccctagaggggcctatctctgccctgagtattgaggtgcaggcttcttcccctttgttctgtccatttccaaaaatgtgaacacacacctcctacatgtttatattattgtgtgcatagatactaccattgtaacattttttgcggattaaaaatgcactattgtattgaaaatttcaaaggaaatgtgtaataaaacatttaaaattaa

SEQ ID NO: 19689 - protein, 49 aa, Homo sapiens [sequence omitted]

SEQ ID NO: 19690 - DNA, 1765 bp, Homo sapiens
gcggccagggtagctatcgcggcggcggcggcggcggcggttgaactgactcggagcgaggagacccgagcgagcagacgcggccctggcgcccgccctgcgcactcaccatggcgatgcatttcatcttctcagatacagcggtgcttctgtttgatttctggagtgtccacagtcctgctggcatggccctttcggtgttggtgctcctgcttctggctgtactgtatgaaggcatcaaggttggcaaagccaagctgctcaaccaggtactggtgaacctgccaacctccatcagccagcagaccatcgcagagacagacggggactctgcaggctcagattcattccctgttggcagaacccaccacaggtggtatttgtgtcactttggccagtctctaatccatgtcatccaggtggtcatcggctacttcatcatgctggccgtaatgtcctacaacacctggattttccttggtgtggtcttgggctctgctgtgggctactacctagcttacccacttctcagcacagcttagctggtgaggaacgtgcaggcactgaggctggagggacatggagccccctcttccagacactatacttccaactgccctttcttctgatggctattcctccaccttattcccagcccctggaaactttgagctgaagccagcacttgctccctggagttcggaagccattgcagcaaccttccttctcagccagcctacgtagggcccaggcatggtcttgtgtcttaagacagctgctgtgaccaaagggagaatggagataacaggggtggcagggttactgagcccatgacaatgcttctctgtgactcaaaccaggaatttccaaagatttcaagccagggagaagggttcttggtgatgcagggcatggaacctggacaccctcagctctcctgctttgtgccttatctacaggagcatcgcccattggacttcctgacctcttctgtctttgagggacagagaccaagctagatcctttttctcacctttctgcctttggaacacatgaagatcatctcgtctatggatcatgttgacaaactaagttttttttatttttcccattgaactcctagttggcaattttgcacattcatacaaaaaaatttttaatgaaatgatttcattgattcatgatggatggcagaaactgctgagacctatttccctttcttggggagagaataagtgacagctgattaaaggcagagacacaggactgctttcaggctcctggtttattctctgatagactgagctccttccaccagaaggcactgcctgcaggaagaagatgatctgatggccgtgggtgtctgggaagctcttcgtggcctcaatgccctcctttatcctcatctttcttctatgcagaacaaaaagctgcatctaataatgttcaatacttaatattctctatttattacttactgcttactcgtaatgatctagtggggaaacatgattcattcacttaaaatactgattaagccatgggcaggtactgactgaagatgcaatccaaccaaagccattacattttttgagttagatgggactctctggatagttgaacctcttcactttataaaaaaggaaagagagaaaatcactgctgtatactaaatacctcacagattagatgaaaagatggttgtaagctttgggaattaaaaacaaacaaatacattttagtaaatatatatttttaaatagtc

SEQ ID NO: 19691 - protein, 143 aa, Homo sapiens; identical to SEQ ID NO: 2457

SEQ ID NO: 19692 - DNA, 1172 bp, Homo sapiens
gggtagctatcgcggcggcggcggcggcggcggttgaactgactcggagcgaggagacccgagcgagcagacgcggccctggcgcccgccctgcgcactcaccatggcgatgcatttcatcttctcagatacagcggtgcttctgtttgatttctggagtgtccacagtcctgctggcatggccctttcggtgttggtgctcctgcttctggctgtactgtatgaaggcatcaaggttggcaaagccaagctgctcaaccaggtactggtgaacctgccaacctccatcagccagcagaccatcgcagagacagacggggactctgcaggctcagattcattccctgttggcagaacccaccacaggagcatcgcccattggacttcctgacctcttctgtctttgagggacagagaccaagctagatcctttttctcacctttctgcctttggaacacatgaagatcatctcgtctatggatcatgttgacaaactaagttttttttatttttcccattgaactcctagttggcaattttgcacattcatacaaaaaaatttttaatgaaatgatttcattgattcatgatggatggcagaaactgctgagacctatttccctttcttggggagagaataagtgacagctgattaaaggcagagacacaggactgctttcaggctcctggtttattctctgatagactgagctccttccaccagaaggcactgcctgcaggaagaagatgatctgatggccgtgggtgtctgggaagctcttcgtggcctcaatgccctcctttatcctcatctttcttctatgcagaacaaaaagctgcatctaataatgttcaatacttaatattctctatttattacttactgcttactcgtaatgatctagtggggaaacatgattcattcacttaaaatactgattaagccatgggcaggtactgactgaagatgcaatccaaccaaagccattacattttttgagttagatgggactctctggatagttgaacctcttcactttataaaaaaggaaagagagaaaatcactgctgtatactaaatacctcacagattagatgaaaagatggttgtaagctttgggaattaaaaacaaacaaatacattttagtaaatatatatttttaaatagtc

SEQ ID NO: 19693 - protein, 95 aa, Homo sapiens
MAMHFIFSDTAVLLFDFWSVHSPAGMALSVLVLLLLAVLYEGIKVGKAKLLNQVLVNLPTSISQQTIAETDGDSAGSDSFPVGRTHHRSIAHWTS

SEQ ID NO: 19694 - DNA, 1006 bp, Homo sapiens
ggcggcggttgaactgactcggagcgaggagacccgagcgagcagacgcggccctggcgcccgccctgcgcactcaccatggcgggttcacctgggctggagagaacgacagcttgcaagactcgttcgtctttgaagaagtcatatcattttcttcatcccatgaagaatgtcatagaatttaagatacaggaagctcagcctgggcaacatagctagaccccgtctctacaaaaattagccacaagtggtggcaggcgcctgtaatcccagctactcggaggctgaggcaggatgaggaggattgcttgagcccagaagttccaggctgcagtgagccatgaccttcggcctgggcaacagaacaagacgtcctcaaacaaacaaaacaaaaaaaaaaagatataggaagtgtatgtaggccatttagtgaaatgatcagccgtcctttaaaaagggaaatagatggaaagcacttgcaaaagttccccagccagtcagcctagcaactgggaccttcatctccttcccaacccttgtttacaaataaggaagcttttctcaaagtgtaagtaaccccaaatgaagaaatatagaagaaaacaagttccagggattgctccctccttcaccacagccccaccctgaaaaaagcacaaatcagttaaactttcagaggccaagattcatcccaagtaggaaaacaagattggggccctgccccttgcctatctgaccacaaagccctttaattgaaaactgtagcccagatcgcttctctcaagtcagggtgtgctgacttccatcttttcctctagcaaaaaggcaaaagtagaaagggttgagtgacaggtgagtcttcgtccctctggggcttcggactccgtgggtgtttccagctctgaacaaaccatacagttcatcttcccagctatctcctgcttctctggcttcagaaccatcctagccaactgctctctggccagggcaggtgtctctcaggcgg

SEQ ID NO: 19695 - protein, 46 aa, Homo sapiens
MAGSPGLERTTACKTRSSLKKSYHFLHPMKNVIEFKIQEAQPGQHS

SEQ ID NO: 19696 - DNA, 1759 bp, Homo sapiens
ggagacccgagcgagcagacgcggccctggcgcccgccctgcgcactcaccatggcgatgcatttcatcttctcagatacagcggtgcttctgtttgatttctggagtgtccacagtcctgctgggcaagaaactaaagcccagagacaggaagagagactcgtgcagggtcacacagcatggccctttcggtgttggtgctcctgcttctggctgtactgtatgaaggcatcaaggttggcaaagccaagctgctcaaccaggtactggtgaacctgccaacctccatcagccagcagaccatcgcagagacagacggggactctgcaggctcagattcattccctgttggcagaacccaccacaggtggtatttgtgtcactttggccagtctctaatccatgtcatccaggtggtcatcggctacttcatcatgctggccgtaatgtcctacaacacctggattttccttggtgtggtcttgggctctgctgtgggctactacctagcttacccacttctcagcacagcttagctggtgaggaacgtgcaggcactgaggctggagggacatggagccccctcttccagacactatacttccaactgccctttcttctgatggctattcctccaccttattcccagcccctggaaactttgagctgaagccagcacttgctccctggagttcggaagccattgcagcaaccttccttctcagccagcctacgtagggcccaggcatggtcttgtgtcttaagacagctgctgtgaccaaagggagaatggagataacaggggtggcagggttactgagcccatgacaatgcttctctgtgactcaaaccaggaatttccaaagatttcaagccagggagaagggttcttggtgatgcagggcatggaacctggacaccctcagctctcctgctttgtgccttatctacaggagcatcgcccattggacttcctgacctcttctgtctttgagggacagagaccaagctagatcctttttctcacctttctgcctttggaacacatgaagatcatctcgtctatggatcatgttgacaaactaagttttttttatttttcccattgaactcctagttggcaattttgcacattcatacaaaaaaatttttaatgaaatgatttcattgattcatgatggatggcagaaactgctgagacctatttccctttcttggggagagaataagtgacagctgattaaaggcagagacacaggactgctttcaggctcctggtttattctctgatagactgagctccttccaccagaaggcactgcctgcaggaagaagatgatctgatggccgtgggtgtctgggaagctcttcgtggcctcaatgccctcctttatcctcatctttcttctatgcagaacaaaaagctgcatctaataatgttcaatacttaatattctctatttattacttactgcttactcgtaatgatctagtggggaaacatgattcattcacttaaaatactgattaagccatgggcaggtactgactgaagatgcaatccaaccaaagccattacattttttgagttagatgggactctctggatagttgaacctcttcactttataaaaaaggaaagagagaaaatcactgctgtatactaaatacctcacagattagatgaaaagatggttgtaagctttgggaattaaaaacaaacaaatacattttagtaaatatatatttttaaatagtc

SEQ ID NO: 19697 - protein, 118 aa, Homo sapiens
MALSVLVLLLLAVLYEGIKVGKAKLLNQVLVNLPTSISQQTIAETDGDSAGSDSFPVGRTHHRWYLCHFGQSLIHVIQVVIGYFIMLAVMSYNTWIFLGVVLGSAVGYYLAYPLLSTA

SEQ ID NO: 19698 - DNA, 782 bp, Homo sapiens
ccgccctgcgcactcaccatggcgatgcatttcatcttctcagatacagcggtgcttctgtttgatttctggagtgtccacagtcctgctggcatggccctttcggtgttggtgctcctgcttctggctgtactgtatgaaggcatcaaggttggcaaagccaagctgctcaaccaggtactggtgaacctgccaacctccatcagccagcagaccatcgcagagacagacggggactctgcaggctcagattcattccctgttggcagaacccaccacaggtacaggcagtgggtatgggaaaggggcagaagcctcacattcaccctgagagacaggctggcccagacagcattagccccacttcacagagaggacagcgaggcccagggaaggaccaggacttgccaaagtggctacacatagccaagtgaactagagctcatgtctcctgatgcccaggccaaagcactctgtgaacagccagccacttgagaggctcagaaggctttctttagggaacagtgatcttcaggtgcaggcccctatctagcaaatgaggtggccacccaccctcccccaaatctcaccagttccatgggtcactaggctcccatatccaggaggggatctgcagctgtcctgaagcaatgtatcccacttggtgggaggaggatgacaagctctcctctcctcccttcccactcgaatcaggcaaccatttagggtccctgttctgccctctgtccagccccagcctcacctgtgcttaataagcctgc

SEQ ID NO: 19699 - protein, 135 aa, Homo sapiens
MAMHFIFSDTAVLLFDFWSVHSPAGMALSVLVLLLLAVLYEGIKVGKAKLLNQVLVNLPTSISQQTIAETDGDSAGSDSFPVGRTHHRYRQWVWERGRSLTFTLRDRLAQTALAPLHREDSEAQGRTRTCQSGYT

SEQ ID NO: 19700 - DNA, 3400 bp, Homo sapiens
gtgaagagagattggggtgggaagaaaactgatctttctctttttttgaaatggagtctctgtcgcccaggctggaatgcagtggcgcgatcttggctcactgcaatctccacctcccaggttcaagcaattctcttgcctcagcctaccgagtagctgggactacaggcaggcaccacaatgcccagctaatttttctgtatttttagtgtggtggctcatgcctgtaatcccagcactttgggaggccgaggcgagtggatcacctgaggttaggagttcaagaccagcctgaccaacatggtcaaaccccgtctctactaaaaatacaaaaaaattagccaggcgtggtggggggtgtctgtaatcccagctacttgggaggctgaggcaagataattgcttgaatcctgaggcaagataattgcttgaatccaggaggtggaggttgcagtgagccaagattgcgccactgcactccagcctgggcaacagagcgagactccatctaaaaaaaaaaagtacaatgaatagctgtgtggaaaagatgcatggggcaaggcatgtaggagggggttcagagcctccaggccctccctgggcttgccaccttccaggtacccccatgtgttcacagcagctggaagcttttcaaatcctgtccttttaaaaaaaattattcatatataatagttgtacatgttttggggtacacgtgatattttgatacctatatacaatatgtaatgatccaatcagggtgactggggtgtttatcacctcaaacatttatctttgtgttgggaacattacaattctattttgaaatatacaataaattatggttaactataaatttccctactgtactgtcgaatacaacaacttattccttctatctaaactgcattcttttgggtttctatggagtcttcatatggaggaatgattgatgacctcattggccactggtgatcaattcaaccttcagtccctgtctccttccagaggtagggagtggggctgaaagtgccaacctccaagcacaagtttggctcccctggcaaccagcccccatccaggagcctcagccatcagtcatctcattagcatataaaaagacaccacttgacagcgtttccaagggttctagaagtcgtgtgccaggaaaccagggcagaaacaggatatatatctcttattatgtcgcagagtccagtaaaatactttagctggaccacttattatccctcttagtgaaacaaaagtagtaattaacagttaattttacacagcagctctaataagcacttgatagttttggtaaaataatttattgggtttttcccctattataaaagtaatatatataaaagaaaccttagaaagttaggcaagaacataaaaaccacctgtatcctactttgctgagataactattactcttgtgctatttatctttccttccagacattttttgcatacttacatataaataggaccttgcagtactcatcacttaacaagaagtcacgacagatttgtgcagcctgctgggggagtgggtggggtaatggtacgtggcttcttcaccctcagcccctggatttttcaggtggcttctcttcctgatctcaaagccacactccagctaagaaaagtctggtgaagacagtgaagaagttcggaactcagcaagggtggggaagaaggtgcaggatagaggtggatggagtggattccatgaacaggtggaggtgctggaagggaaacagtgctggcctggccaggtctccacaactctgcctcctttgacaggcatggccctttcggtgttggtgctcctgcttctggctgtactgtatgaaggcatcaaggttggcaaagccaagctgctcaaccaggtactggtgaacctgccaacctccatcagccagcagaccatcgcagagacagacggggactctgcaggctcagattcattccctgttggcagaacccaccacaggtggtatttgtgtcactttggccagtctctaatccatgtcatccaggtggtcatcggctacttcatcatgctggccgtaatgtcctacaacacctggattttccttggtgtggtcttgggctctgctgtgggctactacctagcttacccacttctcagcacagcttagctggtgaggaacgtgcaggcactgaggctggagggacatggagccccctcttccagacactatacttccaactgccctttcttctgatggctattcctccaccttattcccagcccctggaaactttgagctgaagccagcacttgctccctggagttcggaagccattgcagcaaccttccttctcagccagcctacgtagggcccaggcatggtcttgtgtcttaagacagctgctgtgaccaaagggagaatggagataacaggggtggcagggttactgagcccatgacaatgcttctctgtgactcaaaccaggaatttccaaagatttcaagccagggagaagggttcttggtgatgcagggcatggaacctggacaccctcagctctcctgctttgtgccttatctacaggagcatcgcccattggacttcctgacctcttctgtctttgagggacagagaccaagctagatcctttttctcacctttctgcctttggaacacatgaagatcatctcgtctatggatcatgttgacaaactaagttttttttatttttcccattgaactcctagttggcaattttgcacattcatacaaaaaaatttttaatgaaatgatttcattgattcatgatggatggcagaaactgctgagacctatttccctttcttggggagagaataagtgacagctgattaaaggcagagacacaggactgctttcaggctcctggtttattctctgatagactgagctccttccaccagaaggcactgcctgcaggaagaagatgatctgatggccgtgggtgtctgggaagctcttcgtggcctcaatgccctcctttatcctcatctttcttctatgcagaacaaaaagctgcatctaataatgttcaatacttaatattctctatttattacttactgcttactcgtaatgatctagtggggaaacatgattcattcacttaaaatactgattaagccatgggcaggtactgactgaagatgcaatccaaccaaagccattacattttttgagttagatgggactctctggatagttgaacctcttcactttataaaaaaggaaagagagaaaatcactgctgtatactaaatacctcacagattagatgaaaagatggttgtaagctttgggaattaaaaacaaacaaatacattttagtaaatatatatttttaaatagtc

SEQ ID NO: 19701 - protein, 118 aa, Homo sapiens; identical to SEQ ID NO: 19697

SEQ ID NO: 19702 - DNA, 782 bp, Homo sapiens
ccaaggaaaatccaggtgttgtaggacattacggccagcatgatgaagtagccgatgaccacctggatgacatggattagagactggccaaagtgacacaaataccacctagataaaaaggagaagcaagttaatcctggtaatgagctggtaatgaggaagctgggagtagatatcagggagtagaaagctgttgagttacgtgacccgattgatttataacttgtatgcttaacccaggagtgatttctttctgcccctcccacccccgcccccagaaaaaactcgagatttatttttaaagagacctggccaggccagcactgtttcccttccagcacctccacctgttcatggaatccactccatccacctctatcctgcaccttcttccccacccttgctgagttccgaacttcttcactgtcttcaccagacttttcttagctggagtgtggctttgagatcaggaagagaagccacctgaaaaatccaggggctgagggtgaagaagccacgtaccattaccccacccactcccccagcaggctgcacaaatctgtcgtgacttcttgttaagtgatgagtactgcaaggtcctatttatatgtaagtatgcaaaaaatgtctggaaggaaagataaatagcacaagagtaatagttatctcagcaaagtaggatacaggtggtttttatgttcttgcctaactttctaaggtttcttttatatatattacttttataataggggaaaaacccaataaattattttaccaaaact

SEQ ID NO: 19703 - protein, 83 aa, Homo sapiens
PRSDFFLPLPPPPPEKTRDLFLKRPGQASTVSLPAPPPVHGIHSIHLYPAPSSPPLLSSELLHCLHQTFLSWSVALRSGREAT

SEQ ID NO: 19704 - DNA, 463 bp, Homo sapiens
tcctgactttttcatctactgtctttcttctcagagggtgggttggccaccttctgagccccacccccgccagacctggtgaagaggatcataaccctgtcttcaagaacactgggatttcagcagcaagttggaagaaggactggtaggttcccctccaagccagtcacctgtaagagtcctgtcctctgccagactttttaatctcttcattaactctcagactgacctgggagccctcctctacctgaatccagtgctcaactgtgccccggcaacaagacctgggctgaggtctccctggtagaactaagggagattacaccatctaaatcccagtgcagtcaacagcctggcctatagtcctgggacatgtatcttcttctttgccttaaatctgatacaagaggtcaatgactttgaaaataaaactaaaataaatgtctataatgaaacttgaccc

SEQ ID NO: 19705 - protein, 48 aa, Homo sapiens
LTFSSTVFLLRGWVGHLLSPTPARPGEEDHNPVFKNTGISAASWKKDW

SEQ ID NO: 19706 - DNA, 4444 bp, Homo sapiens
atggaagaactggacaaatggccggttgcatacacggggaaactgaggcaccgagcaccccggcccaagagcccagtctactttcggtccagagaccgtgctggagttcgccctgccggaaagcagcacgccgccgcggcattttacgacgtcggcggtgacaggccctgggactctgggaatacccagcttcctccccgcaacccggtgaaagccaacgcaatgttcggtgcgggggacgaggacgacaccgatttcctctcgccgagcggcggtgccagattggcctcactttttggactggatcaggcagctgctggccatggaaatgaatttttccagtacacagccccaaaacagcctaagaaaggccagggaacggcagcaacaggaaatcaggcaacaccaaaaacagcaccagccaccatgagcactcccacaatactggtcgcaacagcagtccatgcatatcgatacacaaatggtcaatatgtaaagcagggcaaatttggtgctgcagttctggggaaccacacagccagagagtataggattcttctttatatcagtcaacaacagccagttacggttgctaggattcatgtgaactttgagctaatggttcggcccaataactatagcaccttttatgatgaccagagacagaactggtccatcatgtttgagtcggaaaaggctgctgtggagttcaataagcaggtgtgcattgctaagtgcaacagtacctcttccctggatgcagtgctctcccaggacctcattgtggcagacggccctgctgtagaagttggagattctttggaagtggcctataccggctggctctttcagaatcatgtgctgggccaggttttcgactccactgctaacaaagataagttgcttcgcttgaagttaggatcaggaaaagtcatcaagggctgggaggatggaatgctgggcatgaaaaaaggaggaaagcgattgcttattgtccctccagcctgtgctgttggctcagaaggggtaataggctggactcaagcaacggactcgatcctggtgttcgaggtggaggttaggcgggtgaagtttgccagagattctggctctgatggtcacagtgttagttcccgcgattctgcagctccgtctcccatccctggtgctgacaacctctctgctgatcctgttgtgtcaccacccacatcaatacctttcaaatcaggggagccagctcttcgtaccaaatctaactccctcagtgaacaacttgcaataaatacaagtcccgatgcagtcaaagccaagttgatctctcggatggctaaaatgggccagcccatgctgcccatccttccaccacagctggattccaatgattcagaaatcgaagatgtgaacactctgcaaggaggtgggcagcctgtggtgactccgtccgtccagccctctcttcatccggcccatccagcgttaccacagatgacctcacaggcacctcagccatctgttactgggctccaggcaccttctgctgccttaatgcaagtgtcatctctcgattcccactcagctgtatctggaaatgcccaatcctttcagccctatgcaggtatgcaagcctacgcttatccccaggcatctgccgtcacctcccagctgcagcccgttcggcctttgtacccagcaccgctctctcagcctccccatttccaaggatcaggtgatatggcttcatttctcatgactgaagcccggcaacataacactgaaattcgaatggcagtcagcaaagtggctgataaaatggatcatctcatgactaaggttgaagagttacagaaacatagtgctggcaattccatgcttattcctagcatgtcagttacaatggaaacaagcatgattatgagcaacatccagcgaatcattcaggaaaatgaaagattgaagcaagagatccttgaaaagagcaatcggatagaagaacagaatgacaagattagtgaactaattgaacgaaatcagaggtatgttgagcagagtaacctgatgatggagaagaggaacaactcacttcagacagccacagaaaacacacaggcaagagtattgcatgctgaacaagagaaggccaaggtgacagaggagttagcagcggccactgcacaggtctctcatctgcagctgaaaatgactgctcaccaaaaaaaggaaacagagctgcagatgcagctgacagaaagcctgaaggagacagatcttctcaggggccagctcaccaaagtgcaggcaaagctctcagagctccaagaaacctctgagcaagcacagtccaaattcaaaagtgaaaagcagaaccggaaacaactggaactcaaggtgacatccctggaggaggaactgactgaccttcgagttgagaaggagtccttggaaaagaacctctcagaaaggaaaaagaagtcagctcaagagcgttctcaggccgaggaggagatagatgaaattcgcaagtcataccaggaggaattggacaaacttcgacagctcttgaaaaagactcgagtgtccacagaccaagcagctgcagagcagctgtctttagtacaggctgagctacagacccagtgggaagcaaaatgtgaacatttgttggcctccgccaaggatgagcacctgcagcagtaccaggaggtgtgcgcacagagagatgcctaccagcagaagctggtacaacttcaggaaaagtgtttagccctccaggcccaaatcacagctctcaccaagcaaaatgaacagcacatcaaggaactagagaagaacaagtcccagatgtctggggttgaagctgctgcatctgacccctcagagaaggtcaagaagatcatgaaccaggtgttccagtccttacggagagagtttgagctggaggaatcttacaatggcaggaccattctgggaaccatcatgaatacgatcaagatggtgactcttcagctgttaaaccaacaggagcaagagaaggaagagagcagcagtgaagaagaagaagaaaaagcagaagagcggccacgaagaccttcccaggagcagtcagcctcagccagttctgggcagcctcaagcacccctgaatagggagaggccagagtcccccatggtgccctcagagcaggtggtcgaggaagctgtcccgttgcctcctcaggccctcaccacttcccaggatggacacagaaggaaaggggactcagaagctgaggcactctcagagataaaagatggttcccttccacccgaactgtcttgcatcccatcccacagagttctagggcccccgacttcaattccacctgagcccctaggccctgtatccatggactctgagtgtgaggagtcacttgctgccagcccaatggcagctaagcccgacaacccatcaggaaaggtctgtgtcagggaagtagcaccagatggcccactacaagaaagctccacaagactgtccctgacttcagaccccgaggagggggacccactggccttagggcctgaaagcccaggagagcctcagcctccacagctcaagaaagatgatgtcactagctccaccggtccccacaaggagctgtcaagcacagaggcaggttccacagttgcaggagcagccctcagacccagccatcattcccagcgttccagtctctctggggatgaagaggatgaactgtttaaaggggcaactctgaaagctctgaggcccaaagcacagcctgaggaggaggatgaagacgaggtgagcatgaagggacgcccgcccccaacgcccctttttggagatgatgatgatgacgatgacattgactggctgggatgaagacccaggaaactggtgcaaaggtttctctgcaacccttccctaagcatgattttgcacagccaaccctgggtctaggcgaaccacagggtgaggtcaaggtgagcattctgggaacaatatttgggctcagagggtgggttggccaccttctgagccccacccccgccagacctggtgaagaggatcataaccctgtcttcaagaacactgggatttcagcagcaagttggaagaaggactggtaggttcccctccaagccagtcacctgtaagagtcctgtcctctgccagactttttaatctcttcattaactctcagactgacctgggagccctcctctacctgaatccagtgctcaactgtgccccggcaacaagacctgggctgaggtctccctggtagaactaagggagattacaccatctaaatcccagtgcagtcaacagcctggcctatagtcctgggacatgtatcttcttctttgccttaaatctgatacaagaggtcaatgactttgaaaataaaactaaaataaatgtctataatgaaacttgaccc

SEQ ID NO: 19707 - protein, 1293 aa, Homo sapiens
MEELDKWPVAYTGKLRHRAPRPKSPVYFRSRDRAGVRPAGKQHAAAAFYDVGGDRPWDSGNTQLPPRNPVKANAMFGAGDEDDTDFLSPSGGARLASLFGLDQAAAGHGNEFFQYTAPKQPKKGQGTAATGNQATPKTAPATMSTPTILVATAVHAYRYTNGQYVKQGKFGAAVLGNHTAREYRILLYISQQQPVTVARIHVNFELMVRPNNYSTFYDDQRQNWSIMFESEKAAVEFNKQVCIAKCNSTSSLDAVLSQDLIVADGPAVEVGDSLEVAYTGWLFQNHVLGQVFDSTANKDKLLRLKLGSGKVIKGWEDGMLGMKKGGKRLLIVPPACAVGSEGVIGWTQATDSILVFEVEVRRVKFARDSGSDGHSVSSRDSAAPSPIPGADNLSADPVVSPPTSIPFKSGEPALRTKSNSLSEQLAINTSPDAVKAKLISRMAKMGQPMLPILPPQLDSNDSEIEDVNTLQGGGQPVVTPSVQPSLHPAHPALPQMTSQAPQPSVTGLQAPSAALMQVSSLDSHSAVSGNAQSFQPYAGMQAYAYPQASAVTSQLQPVRPLYPAPLSQPPHFQGSGDMASFLMTEARQHNTEIRMAVSKVADKMDHLMTKVEELQKHSAGNSMLIPSMSVTMETSMIMSNIQRIIQENERLKQEILEKSNRIEEQNDKISELIERNQRYVEQSNLMMEKRNNSLQTATENTQARVLHAEQEKAKVTEELAAATAQVSHLQLKMTAHQKKETELQMQLTESLKETDLLRGQLTKVQAKLSELQETSEQAQSKFKSEKQNRKQLELKVTSLEEELTDLRVEKESLEKNLSERKKKSAQERSQAEEEIDEIRKSYQEELDKLRQLLKKTRVSTDQAAAEQLSLVQAELQTQWEAKCEHLLASAKDEHLQQYQEVCAQRDAYQQKLVQLQEKCLALQAQITALTKQNEQHIKELEKNKSQMSGVEAAASDPSEKVKKIMNQVFQSLRREFELEESYNGRTILGTIMNTIKMVTLQLLNQQEQEKEESSSEEEEEKAEERPRRPSQEQSASASSGQPQAPLNRERPESPMVPSEQVVEEAVPLPPQALTTSQDGHRRKGDSEAEALSEIKDGSLPPELSCIPSHRVLGPPTSIPPEPLGPVSMDSECEESLAASPMAAKPDNPSGKVCVREVAPDGPLQESSTRLSLTSDPEEGDPLALGPESPGEPQPPQLKKDDVTSSTGPHKELSSTEAGSTVAGAALRPSHHSQRSSLSGDEEDELFKGATLKALRPKAQPEEEDEDEVSMKGRPPPTPLFGDDDDDDDIDWLG

SEQ ID NO: 19708 - DNA, 2832 bp, Homo sapiens
gacgtcggcggtgacaggccctgggactctgggaatacccagcttcctccccgcaacccggtgaaagccaacgcaatgttcggtgcgggggacgaggacgacaccgatttcctctcgccgagcggcggtgccagattggcctcactttttggactggatcaggcagctgctggccatggaaatgaatttttccagtacacagccccaaaacagcctaagaaaggccagggaacggcagcaacaggaaatcaggcaacaccaaaaacagcaccagccaccatgagcactcccacaatactggtcgcaacagcagtccatgcatatcgatacacaaatggtcaatatgtaaagcagggcaaatttggtgctgcagttctggggaaccacacagccagagagtataggattcttctttatatcagtcaacaacagccagttacggttgctaggattcatgtgaactttgagctaatggttcggcccaataactatagcaccttttatgatgaccagagacagaactggtccatcatgtttgagtcggaaaaggctgctgtggagttcaataagcaggtgtgcattgctaagtgcaacagtacctcttccctggatgcagtgctctcccaggacctcattgtggcagacggccctgctgtagaagttggagattctttggaagtggcctataccggctggctctttcagaatcatgtgctgggccaggttttcgactccactgctaacaaagataagttgcttcgcttgaagttaggatcaggaaaagtcatcaagggctgggaggatggaatgctgggcatgaaaaaaggaggaaagcgattgcttattgtccctccagcctgtgctgttggctcagaaggggtaataggctggactcaagcaacggactcgatcctggtgttcgaggtggaggttaggcgggtgaagtttgccagagattctggctctgatggtcacagtgttagttcccgcgattctgcagctccgtctcccatccctggtgctgacaacctctctgctgatcctgttgtgtcaccacccacatcaatacctttcaaatcaggggagccagctcttcgtaccaaatctaactccctcagtgaacaacttgcaataaatacaagtcccgatgcagtcaaagccaagttgatctctcggatggctaaaatgggccagcccatgctgcccatccttccaccacagctggattccaatgattcagaaatcgaagatgtgaacactctgcaaggaggtgggcagcctgtggtgactccgtccgtccagccctctcttcatccggcccatccagcgttaccacagatgacctcacaggcacctcagccatctgttactgggctccaggcaccttctgctgccttaatgcaagtgtcatctctcgattcccactcagctgtatctggaaatgcccaatcctttcaggtaacattttataaccgtattaattatatcctataatttgctgtggttctagtcagtctcttttcttcttcctgtacatttcatacagtagcagttccccaaagtcagagtttgtaatttttttcccttccttggttaccactttctcatctctaaaccaggcaaaggataacctacgttccagtgtcataaagattaaatgcaagaacaagtagagcccctagtacaacgtagtaaagatgcaatcaatgtttgtttccttttcttttcacacatatccagttgaagcgtgtatattcgcgttcttctgtattcttttctactaaaagttggcaggctaacattctgcagtatattcagcagaatggtatggtttaaaagtggaaccatgtggaaaatgtagcttgactctgctatctagtaaacttttcttaaagaaggcctttttcctgttatcacagaaaacaatggcagcagcctgtttgccaggggtagcagaccctttcttctgcctcaacacacttggtggataaggcatactgtcactgggaacagctgctcactccttgtgatgcttaatggaggtgtgggaatgatggtggataggctatgcctcattaacatggggagtctcgaaactggaaaaagtcccactgttgccctctttctccccatccctcctctcctccatggagaattactatgctgtagactaagaattttttttaagtggatgcgtagttatatctatccctggaaatgagctagacttccttatttcaaggaagaattaccatcctcattaaaataaaagctgctgtttattaagcgcttactatctgtcaggcctgtaacttactagcttttcagaactttacctatctcacttcatttagtccacagaacagccctatgaagtgatattattatcttcctcttacagttgaggtgaccgagactcaaaggaacatgagagctcttggtctcgtggattagcttcagaatctagcaggggagaggcatccttggaaattggcagatttggtttggaatctcagtgagcacttcttctttaaactcaatggaagctaagcagagtttattaatctaaaaacttcttagacaataggcctgataatggggaatgaatccctgcttaattatctcaccagatgactgggtagtgacctaagatacactttcttcagtttctgggtaggattttagtgactggtttcccctgggatacatagataactctcctgctgcagtccttaccaactgccaaacccagatctcacccatctctagcttcagtaagtttgagtctcctcccagctcatccactttattccaccaaagaaaaatgtgaac

SEQ ID NO: 19709 - protein, 472 aa, Homo sapiens
MFGAGDEDDTDFLSPSGGARLASLFGLDQAAAGHGNEFFQYTAPKQPKKGQGTAATGNQATPKTAPATMSTPTILVATAVHAYRYTNGQYVKQGKFGAAVLGNHTAREYRILLYISQQQPVTVARIHVNFELMVRPNNYSTFYDDQRQNWSIMFESEKAAVEFNKQVCIAKCNSTSSLDAVLSQDLIVADGPAVEVGDSLEVAYTGWLFQNHVLGQVFDSTANKDKLLRLKLGSGKVIKGWEDGMLGMKKGGKRLLIVPPACAVGSEGVIGWTQATDSILVFEVEVRRVKFARDSGSDGHSVSSRDSAAPSPIPGADNLSADPVVSPPTSIPFKSGEPALRTKSNSLSEQLAINTSPDAVKAKLISRMAKMGQPMLPILPPQLDSNDSEIEDVNTLQGGGQPVVTPSVQPSLHPAHPALPQMTSQAPQPSVTGLQAPSAALMQVSSLDSHSAVSGNAQSFQVTFYNRINYIL

SEQ ID NO: 19710 - DNA, 839 bp, Homo sapiens
cggtgaaagccaacgcaatgttcggtgcgggggacgaggacgacaccgatttcctctcgccgagcggcggtgccagattggcctcactttttggactggatcaggcagctgctggccatggaaatgaatttttccagtacacagccccaaaacagcctaagaaaggccagggaacggcagcaacaggaaatcaggcaacaccaaaaacagcaccagccaccatgagcactcccacaatactggtcgcaacagcagtccatgcatatcgatacacaaatggtcaatatgtaaagcagggcaaatttggtgctgcagttctggggaaccacacagccagagaggtgagagtgctcccacatctcatgtatattcagatgtcccaaataataccaatgagctggcttttatctggcttgcccgatgtcttgtttatcagaagataaggatgattatttgtattgaatgttaatttataacatcaagcatatagtaaatgatcacattttgcttactattgtgcgttaaaacaaatccaaccattcaaaattgttaaatttgacctttgtgatatgatcctagcttaagaatttgggcatttttttgtttgtttgttgttcaattgtggggtgcgtgtgtacacacacatacacaaatacacacatatatatacacatacatatgtatatataagataaaatttgccatttaaccatttttaagtgcataatccagtgccattaattgcattcacagtattgattgagcaaccatcactactatccatttcccaaacagaaagtgtaaccattaagcaataactctacttcttcctttttccc

SEQ ID NO: 19711 - protein, 141 aa, Homo sapiens
MFGAGDEDDTDFLSPSGGARLASLFGLDQAAAGHGNEFFQYTAPKQPKKGQGTAATGNQATPKTAPATMSTPTILVATAVHAYRYTNGQYVKQGKFGAAVLGNHTAREVRVLPHLMYIQMSQIIPMSWLLSGLPDVLFIRR

SEQ ID NO: 19712 - DNA, 575 bp, Homo sapiens
cagcttcctccccgcaacccggtgaaagccaacgcaatgttcggtgcgggggacgaggacgacaccgatttcctctcgccgagcggcggtgccagattggcctcactttttggactggatcaggcagctgctggccatggaaatgaatttttccagtacacagccccaaaacagcctaagaaaggccagggaacggcagcaacaggaaatcaggcaacaccaaaaacagcaccagccaccatgagcactcccacaatactggtcgcaacagcagtccatgcatatcgatagtaagtcgctgagaaggaacaccctctgaagtttggtggaagggcgtgcagttaagctactttttctcgaaaaacctctgtttgttgcaaaacggttatttagcccttccacggacaaaatatcagtagaacttttaacatctgaattggagatttctgtggtaaaacttgaaaagccattatcttgtctactgtctttagggagtgcttgtaccctcaacagctgtcaaatgctcaaagaaagcctctccactgagatagcatgaatgatagatatttatattt

SEQ ID NO: 19713 - protein, 84 aa, Homo sapiens
MFGAGDEDDTDFLSPSGGARLASLFGLDQAAAGHGNEFFQYTAPKQPKKGQGTAATGNQATPKTAPATMSTPTILVATAVHAYR

SEQ ID NO: 19714 - DNA, 1824 bp, Homo sapiens
gggcgggaaatcctcggcctcggtggcggtggtggacacgtcgagccgggtagaagtggaggggccgttcgaagagtcgtgagggggtgacgggttaagattcggagagagaggtgctagtggctggacttgacctggaaagaatcttctgctgactctcaacttttcctggaaaaaatggatcattcccaccatatggggatgagctatatggactccaacagtaccatgcaaccttctcaccatcacccaaccacttcagcctcacactcccatggtggaggagacagcagcatgatgatgatgcctatgaccttctactttggctttaagaatgtggaactactgttttccggtttggtgatcaatacagctggagaaatggctggagcttttgtggcagtgtttttactagcaatgttctatgaaggactcaagatagcccgagagagcctgctgcgtaagtcacaagtcagcattcgctacaattccatgcctgtcccaggaccaaatggaaccatccttatggagacacacaaaactgttgggcaacagatgctgagctttcctcacctcctgcaaacagtgctgcacatcatccaggtggtcataagctacttcctcatgctcatcttcatgacctacaacgggtacctctgcattgcagtagcagcaggggccggtacaggatacttcctcttcagctggaagaaggcagtggtagtggatatcacagagcattgccattgacatcaaactctatggcgtggccttatcgattgcagtgggaagttgttgaagacttgaagacgtgattcctgctccaatcatcccttcttgctcctctttgtgcacgtacacacacacacacacacacacacacacacacccctgctcaacagaggtttagtttacagtctctgaactaaagtagtaacctcccaaattgttttttctaataagctgagattcccatttctcttaaggagaagccacccatgagatgtcttttccttctccatcatcttagagccaagttatatgttcttgtctaatccatgtagctttttgttcaatgacttgatcatctgcttcctttttgaatttttaacagatagtaagtaaatttggtggttttttcccctgggtcagtgatggaaaggggttaacttcagccaggattgatggcagctgagggaaattcttgcccaactaaacccagaactcaaacttaacattagaaaataaggtccagggccggacacagtggcccatgcctgtaatcccagcactttggggggccaaggcaggctggatcacctgaggacaggagttcgagaccagtctggccaacatggggaaaccccgtctctactaaaaatacaaaaattagccgggcatggtggtgggcgcctgtaatcccagctactcagaaggctgaggcaggagaatcacttgaacctaggaggcggaggttgcagtgagccaagatggcgccattgcactccagcctgggtgacaagagtgaaactccatctcaaaaaaaaagaaaagaaggtccagcttttggattcaatgagtgggaaatacattgtgcctttctctagatgtgatacgttataccaaaatctttgtagtgtgcagagcggtggtttgagactaaatacaggcttagaacttgcagagtgtgtattcttggatggctgatgcatcgacttgcattcccacttaacactttgattagcatgaacttgccaatcaaaaaatgacaatcaatttgagaaaatagaaatagatatttttaaataaaaccattcacagttt

SEQ ID NO: 19715 - protein, 190 aa, Homo sapiens; identical to SEQ ID NO: 2461

SEQ ID NO: 19716 - DNA, 4768 bp, Homo sapiens
gggcgggaaatcctcggcctcggtggcggtggtggacacgtcgagccgggtagaagtggaggggccgttcgaagagtcgtgagggggtgacgggttaagattcggagagagaggtgctagtggctggacttgacctggaaagaatcttctgctgactctcaacttttcctggaaaaaatggatcattcccaccatatggggatgagctatatggactccaacagtaccatgcaaccttctcaccatcacccaaccacttcagcctcacactcccatggtggaggagacagcagcatgatgatgatgcctatgaccttctactttggctttaagaatgtggaactactgttttccggtttggtgatcaatacagctggagaaatggctggagcttttgtggcagtgtttttactagcaatgttctatgaaggactcaagatagcccgagagagcctgctgcgtaagtcacaagtcagcattcgctacaattccatgcctgtcccaggaccaaatggaaccatccttatggagacacacaaaactgttgggcaacagatgctgagctttcctcacctcctgcaaacagtgctgcacatcatccaggtggtcataagctacttcctcatgctcatcttcatgacctacaacgggtacctctgcattgcagtagcagcaggggccggtacaggatacttcctcttcagctggaagaaggcagtggtagtggatatcacagagcattgccattgacatcaaactctatggcgtggccttatcgattgcagtgggaagttgttgaagacttgaagacgtgattcctgctccaatcatcccttcttgctcctctttgtgcacgtacacacacacacacacacacacacacacacacccctgctcaacagaggtttagtttacagtctctgaactaaagtagtaacctcccaaattgttttttctaataagctgagattcccatttctcttaaggagaagccacccatgagatgtcttttccttctccatcatcttagagccaagttatatgttcttgtctaatccatgtagctttttgttcaatgacttgatcatctgcttcctttttgaatttttaacagatagtaagtaaatttggtggttttttcccctgggtcagtgatggaaaggggttaacttcagccaggattgatggcagctgagggaaattcttgcccaactaaacccagaactcaaacttaacattagaaaataaggtccagggccggacacagtggcccatgcctgtaatcccagcactttggggggccaaggcaggctggatcacctgaggacaggagttcgagaccagtctggccaacatggggaaaccccgtctctactaaaaatacaaaaattagccgggcatggtggtgggcgcctgtaatcccagctactcagaaggctgaggcaggagaatcacttgaacctaggaggcggaggttgcagtgagccaagatggcgccattgcactccagcctgggtgacaagagtgaaactccatctcaaaaaaaaagaaaagaaggtccagcttttggattcaatgagtgggaaatacattgtgcctttctctagatgtgatacgttataccaaaatctttgtagtgtgcagagcggtggtttgagactaaatacaggcttagaacttgcagagtgtgtattcttggatggctgatgcatcgacttgcattcccacttaacactttgattagcatgaacttgccaatcaaaaaatgacaatcaatttgagaaaatagaaatagatatttttaaataaaaccattcacagtttactttgtcttgataccttggtttgtcccagctgaagtgaagcaagagagtttgaattaatttttccattataatgttttcgcatgtctgcctctaaaactgtgattttcaagctttagcgtgcatcagaatcacctgtagggcttgttaaaacactaattgctgggcctcaacccaaaagcccccaaagtggcacttctgagttcctgctgatgttacaagggaccacacttttgagaatctgtgctttaagctaaggaaatattgcctggtgggttggctgcctggtattgggcatggaaatttgaattgctgattggtagatggtgtgtctggacttaactcacgtagtaaatactgctgatcaatacctaatcattccacatttattgagctccacctgtgtgtatgtgtacccaagcacacatgtgtgaagggctatagccaaagtatttttactagcctgtatgaaatcactagtccttatttttaaaggtctatggtttcttggaagtagtttgattgttgagagagacctttgatctgcagtgtaaatctaccagtcatgggccagaagggcaaaagcccagctttctctttggaaagactcaggctgtggtttgttgatggccaggttttcctcaggctccaacaactgtgcttataccaagcagatcctcatcctccatataatcatctttgttattcgtgggggtttaattacattacaagtggccaaaacccctgttctcagtgaagaaccacattggatttgtattctgttcagttgtagtctacactgcagtcttattcctggttcaaactacctctttaaattgatttgtcttgtgctggtctgttaaatcctgccctccttggtgctagatccagttgtgcctcagggcagaggaaacaaaacacagctatcctgttggcctgtgttgtggttttgaagtttgtactttctctgtgggtgccagttaaatattggagagcaaggaatgtggacttgtatggctttgaaccaagagagggttatgagcctactggattgaggttaaaatccaagaaccaacatttagagctttgtgcttttctctcattccatcactttgtaatgatgatacttaacatgagcagggtgaatgacaggtactgacgaagtccaacacaaaggtataatacagcctgttgtctaaagccaaggagtcataaaaccatgagaaataaataggaatcaatagttagtagtgacattggtgctctctagaaatctcagcatgagctgctatagaataccctcccagcaacaaaacctaatcagtaaggccagctagacccaatggctcatgcctgtaatcccaacactttgggaggccaaggtgggaggatggcttgtgtccagaagttcgagaccagcctggacaacatagtgagatcctatctctataaaaaatcaaaaattagccaggcatggtggtgcatacctatagtcctggctatttgggaggctgaggcaggaggattgctttagccctggaggtcgaggctgcagtaagccatgattgcgccactgcactcagcccgggtgacaaagcaagaccctgtctcagaaaaaaagaaaattcaaggccagttaagacaaaatgctatgactttgaaattcacagaaagaaataacagtttagattaggtcttcaggtattcaggatagagataatctcctgaaaaacctgaatttcagagattcttagactggctgccaaaggatgaagctagtgaaggagaaaaagcttaaattccatcttgagctcttggattgtgataatacaatgatttcattaacttttcatttctgtatacctgttcatttggaatttaatgcttgacttctttgttcattttggatctaaacttctcttttcttccttccccattcacatctattagaagactgcatcaccatttctttggcccccttactctgttgtcctttcccttttctttcagtttttttaatcgcatgtctagtatattaagtctccatagccctcctgatgcagtagacagtgctatgctgtggatataataccaaccagaaattggcatttataaacctgttaagagactttaagcatgcttcaagaggcagttgacccactggaatttctataaggctggtacccttcccagagttacagaatcttaggtgccgtctctagtctgtgagggaggaactcccagcatccccattgcccacaaatggaatcctcactgtatccactaggagattagaaattaaggtttcttcactacttctatggtagggttgtctgaaattccctttcaggctgtgggtactggtcttgggttctagtcataaggggttccttataaggagcaggcggaggggagtacactttcatgtgatttaattttgatcctgccctctccagctgctccttcaaaagatacatcaaaagatagaaactctgggctgggcacagtggctcacacactttgggaggccaagcgggggtgcagatcacctgaggtcaggagtttgagaccagcctggccaatgtggtgaaaccccatctctactaaaaatacaaaaattagctgggcgtggtggtgcatgcctgtaatcccagctactcgggaggctgaggcaggagaatcgcttgaacccaggaggcggaggttgcagtgagccaagatggcgccattgcactccagcctgggcgacaagagcaaaactccgtctcaaaaaaaaaaaaaagatacaaagtctgcatttgatataatgccttaattactgggtctacaattaatgttgactgttttagattgtaagctcctggagagcagtattgctgtagtaggaatgttttaacagtgtcatatgaaaaagaacaaaataaatattttgattttgtgattct

SEQ ID NO: 19717 - protein, 190 aa, Homo sapiens; identical to SEQ ID NO: 2461

SEQ ID NO: 19718 - DNA, 5140 bp, Homo sapiens
gggcgggaaatcctcggcctcggtggcggtggtggacacgtcgagccgggtagaagtggaggggccgttcgaagagtcgtgagggggtgacgggttaagattcggagagagaggtgctagtggctggacttgacctggaaagaatcttctgctgactctcaacttttcctggaaaaaatggatcattcccaccatatggggatgagctatatggactccaacagtaccatgcaaccttctcaccatcacccaaccacttcagcctcacactcccatggtggaggagacagcagcatgatgatgatgcctatgaccttctactttggctttaagaatgtggaactactgttttccggtttggtgatcaatacagctggagaaatggctggagcttttgtggcagtgtttttactagcaatgttctatgaaggactcaagatagcccgagagagcctgctgcgtaagtcacaagtcagcattcgctacaattccatgcctgtcccaggaccaaatggaaccatccttatggagacacacaaaactgttgggcaacagatgctgagctttcctcacctcctgcaaacagtgctgcacatcatccaggtggtcataagctacttcctcatgctcatcttcatgacctacaacgggtacctctgcattgcagtagcagcaggggccggtacaggatacttcctcttcagctggaagaaggcagtggtagtggatatcacagagcattgccattgacatcaaactctatggcgtggccttatcgattgcagtgggaagttgttgaagacttgaagacgtgattcctgctccaatcatcccttcttgctcctctttgtgcacgtacacacacacacacacacacacacacacacacccctgctcaacagaggtttagtttacagtctctgaactaaagtagtaacctcccaaattgttttttctaataagctgagattcccatttctcttaaggagaagccacccatgagatgtcttttccttctccatcatcttagagccaagttatatgttcttgtctaatccatgtagctttttgttcaatgacttgatcatctgcttcctttttgaatttttaacagatagtaagtaaatttggtggttttttcccctgggtcagtgatggaaaggggttaacttcagccaggattgatggcagctgagggaaattcttgcccaactaaacccagaactcaaacttaacattagaaaataaggtccagggccggacacagtggcccatgcctgtaatcccagcactttggggggccaaggcaggctggatcacctgaggacaggagttcgagaccagtctggccaacatggggaaaccccgtctctactaaaaatacaaaaattagccgggcatggtggtgggcgcctgtaatcccagctactcagaaggctgaggcaggagaatcacttgaacctaggaggcggaggttgcagtgagccaagatggcgccattgcactccagcctgggtgacaagagtgaaactccatctcaaaaaaaaagaaaagaaggtccagcttttggattcaatgagtgggaaatacattgtgcctttctctagatgtgatacgttataccaaaatctttgtagtgtgcagagcggtggtttgagactaaatacaggcttagaacttgcagagtgtgtattcttggatggctgatgcatcgacttgcattcccacttaacactttgattagcatgaacttgccaatcaaaaaatgacaatcaatttgagaaaatagaaatagatatttttaaataaaaccattcacagtttactttgtcttgataccttggtttgtcccagctgaagtgaagcaagagagtttgaattaatttttccattataatgttttcgcatgtctgcctctaaaactgtgattttcaagctttagcgtgcatcagaatcacctgtagggcttgttaaaacactaattgctgggcctcaacccaaaagcccccaaagtggcacttctgagttcctgctgatgttacaagggaccacacttttgagaatctgtgctttaagctaaggaaatattgcctggtgggttggctgcctggtattgggcatggaaatttgaattgctgattggtagatggtgtgtctggacttaactcacgtagtaaatactgctgatcaatacctaatcattccacatttattgagctccacctgtgtgtatgtgtacccaagcacacatgtgtgaagggctatagccaaagtatttttactagcctgtatgaaatcactagtccttatttttaaaggtctatggtttcttggaagtagtttgattgttgagagagacctttgatctgcagtgtaaatctaccagtcatgggccagaagggcaaaagcccagctttctctttggaaagactcaggctgtggtttgttgatggccaggttttcctcaggctccaacaactgtgcttataccaagcagatcctcatcctccatataatcatctttgttattcgtgggggtttaattacattacaagtggccaaaacccctgttctcagtgaagaaccacattggatttgtattctgttcagttgtagtctacactgcagtcttattcctggttcaaactacctctttaaattgatttgtcttgtgctggtctgttaaatcctgccctccttggtgctagatccagttgtgcctcagggcagaggaaacaaaacacagctatcctgttggcctgtgttgtggttttgaagtttgtactttctctgtgggtgccagttaaatattggagagcaaggaatgtggacttgtatggctttgaaccaagagagggttatgagcctactggattgaggttaaaatccaagaaccaacatttagagctttgtgcttttctctcattccatcactttgtaatgatgatacttaacatgagcagggtgaatgacaggtactgacgaagtccaacacaaaggtataatacagcctgttgtctaaagccaaggagtcataaaaccatgagaaataaataggaatcaatagttagtagtgacattggtgctctctagaaatctcagcatgagctgctatagaataccctcccagcaacaaaacctaatcagtaaggccagctagacccaatggctcatgcctgtaatcccaacactttgggaggccaaggtgggaggatggcttgtgtccagaagttcgagaccagcctggacaacatagtgagatcctatctctataaaaaatcaaaaattagccaggcatggtggtgcatacctatagtcctggctatttgggaggctgaggcaggaggattgctttagccctggaggtcgaggctgcagtaagccatgattgcgccactgcactcagcccgggtgacaaagcaagaccctgtctcagaaaaaaagaaaattcaaggccagttaagacaaaatgctatgactttgaaattcacagaaagaaataacagtttagattaggtcttcaggtattcaggatagagataatctcctgaaaaacctgaatttcagagattcttagactggctgccaaaggatgaagctagtgaaggagaaaaagcttaaattccatcttgagctcttggattgtgataatacaatgatttcattaacttttcatttctgtatacctgttcatttggaatttaatgcttgacttctttgttcattttggatctaaacttctcttttcttccttccccattcacatctattagaagactgcatcaccatttctttggcccccttactctgttgtcctttcccttttctttcagtttttttaatcgcatgtctagtatattaagtctccatagccctcctgatgcagtagacagtgctatgctgtggatataataccaaccagaaattggcatttataaacctgttaagagactttaagcatgcttcaagaggcagttgacccactggaatttctataaggctggtacccttcccagagttacagaatcttaggtgccgtctctagtctgtgagggaggaactcccagcatccccattgcccacaaatggaatcctcactgtatccactaggagattagaaattaaggtttcttcactacttctatggtagggttgtctgaaattccctttcaggctgtgggtactggtcttgggttctagtcataaggggttccttataaggagcaggcggaggggagtacactttcatgtgatttaattttgatcctgccctctccagctgctccttcaaaagatacatcaaaagatagaaactctgggctgggcacagtggctcacacactttgggaggccaagcgggggtgcagatcacctgaggtcaggagtttgagaccagcctggccaatgtggtgaaaccccatctctactaaaaatacaaaaattagctgggcgtggtggtgcatgcctgtaatcccagctactcgggaggctgaggcaggagaatcgcttgaacccaggaggcggaggttgcagtgagccaagatggcgccattgcactccagcctgggcgacaagagcaaaactccgtctcaaaaaaaaaaaaaagatacaaagtctgcatttgatataatgccttaattactgggtctacaattaatgttgactgttttagattgtaagctcctggagagcagtattgctgtagtaggaatgttttaacagtgtcatatgaaaaagaacaaaataaatattttgattttgtgattctatgcaagtctttctgcccagagtgataatgcaataagctagtcttttcatagtctgcatagagtctggccattaccatcagtttttaagatgtccatattgtggccgggcgcggtggctcacgcctggtaatcccagcactttgggaggctgaggcaggtggatcatgaggtcaggagatcgagaccatcctggctaacacggtgaaacccgtctctactaaaaaaaatattaaaaaattagccaggcctggtggtgggcgcctgtagtcccagctacttgggaggctgaggcaggagaatggtgtgaacccggaagtcagaggttgcagtgagccaagattgcacctgggcaacacagcgagactccgtct

SEQ ID NO: 19719 - protein, 190 aa, Homo sapiens; identical to SEQ ID NO: 2461

SEQ ID NO: 19720 - DNA, 742 bp, Homo sapiens
ctcggcctcggtggcggtggtggacacgtcgagccgggtagaagtggaggggccgttcgaagagtcgtgagggggtgacgggttaagattcggagagagaggtgctagtggctggacttgacctggaaagaatcttctgctgactctcaacttttcctggaaaaaatggatcattcccaccatatggggatgagctatatggactccaacagtaccatgcaaccttctcaccatcacccaaccacttcagcctcacactcccatggtggaggagacagcagcatgatgatgatgcctatgaccttctactttggctttaagaatgtggaactactgttttccggtttggtgatcaatacagctggagaaatggctggagcttttgtggcagtgtttttactagcaatgttctatgaaggactcaagatagcccgagagagcctgctgcgtaagtcacaagtcagcattcgctacaattccatgcctgtcccaggaccaaatggaaccatccttatggagacacacaaaactgttgggtaagaactgaacagatccagatgaagtcctaaagaactcgatcagttaagcagcaaagcgcagctgtgtgatcagcagcagccctcttcttgagttaggagttctgtatgaccttgatcaaaactgtccttggaggtttgggtttgtaggtcatgagcaggccaaaggaggaatgagagggagtcttctgcaaatatgaatgttt

SEQ ID NO: 19721 - protein, 124 aa, Homo sapiens
MDHSHHMGMSYMDSNSTMQPSHHHPTTSASHSHGGGDSSMMMMPMTFYFGFKNVELLFSGLVINTAGEMAGAFVAVFLLAMFYEGLKIARESLLRKSQVSIRYNSMPVPGPNGTILMETHKTVG

SEQ ID NO: 19722 - DNA, 625 bp, Homo sapiens
ctcggcctcggtggcggtggtggacacgtcgagccgggtagaagtggaggggccgttcgaagagtcgtgagggggtgacgggttaagattcggagagagaggtgctagtggctggacttgacctggaaagaatcttctgctgactctcaacttttcctggaaaaaatggatcattcccaccatatggggatgagctatatggactccaacagtaccatgcaaccttctcaccatcacccaaccacttcagcctcacactcccatggtggaggagacagcagcatgatgatgatgcctatgaccttctactttggctttaagaatagtgaaactccatctcaaaaaaaaagaaaagaaggtccagcttttggattcaatgagtgggaaatacattgtgcctttctctagatgtgatacgttataccaaaatctttgtagtgtgcagagcggtggtttgagactaaatacaggcttagaacttgcagagtgtgtattcttggatggctgatgcatcgacttgcattcccacttaacactttgattagcatgaacttgccaatcaaaaaatgacaatcaatttgagaaaatagaaatagatatttttaaataaaaccattcacagttt

SEQ ID NO: 19723 - protein, 80 aa, Homo sapiens
MDHSHHMGMSYMDSNSTMQPSHHHPTTSASHSHGGGDSSMMMMPMTFYFGFKNSETPSQKKRKEGPAFGFNEWEIHCAFL

SEQ ID NO: 19724 - DNA, 1275 bp, Homo sapiens
ctcggcctcggtggcggtggtggacacgtcgagccgggtagaagtggaggggccgttcgaagagtcgtgagggggtgacgggttaagattcggagagagaggtgctagtggctggacttgacctggaaagaatcttctgctgactctcaacttttcctggaaaaaatggatcattcccaccatatggggatgagctatatggactccaacagtaccatgcaaccttctcaccatcacccaaccacttcagcctcacactcccatggtggaggagacagcagcatgatgatgatgcctatgaccttctactttggctttaagaatgtggaactactgttttccggtttggtgatcaatacagctggagaaatggctggagcttttgtggcagtgtttttactagcaatgttctatgaaggactcaagatagcccgagagagcctgctgcgtaagtcacaagtcagcattcgctacaattccatgcctgtcccaggaccaaatggaaccatccttatggagacacacaaaactgttgggcaacagatgctgagctttcctcacctcctgcaaacatgctgggattacaggcatgagccaccacacctgtccctctccccctcgtattactcagacttaaactaccccaaaaaggctaaagtcctgctaagagtctccgtagaactgatgattcaagaggctcttatgatcacagctggtgattccctgtgttgaattagtgaaaacaggccaggcacagtaatcccagcactttgagaggactgcttaatgtcaggagctcaagcccagcttgggcaacacagatgcctgtctctacataaaacaataaaaatttttaaaaaaaatttttttttaatgcccagaacaatagggcatgattcaaaattatcctccgagctgcctctctggttctttctgggaaaaacacttaggcaagttgagaaaggaaggaaagttggaataatggcaaaactgttagaagcattcctctttcctccattgcctgtcctcccaacattatacccaaactagttacaaagccattctgtaaagagatcgggtacctacaatttcttcagatttacacaatatccactagaatttaatttctacaagggcagggatctttgttgagtggcacatggtagacactcaataaatacttattgaatagatgggttaagtgaaagtggcagggatcaactagagtgtcctgtgcttagggtcttttaataaagatggaaagaatgatgttaa

SEQ ID NO: 19725 - protein, 188 aa, Homo sapiens
MDHSHHMGMSYMDSNSTMQPSHHHPTTSASHSHGGGDSSMMMMPMTFYFGFKNVELLFSGLVINTAGEMAGAFVAVFLLAMFYEGLKIARESLLRKSQVSIRYNSMPVPGPNGTILMETHKTVGQQMLSFPHLLQTCWDYRHEPPHLSLSPSYYSDLNYPKKAKVLLRVSVELMIQEALMITAGDSLC

SEQ ID NO: 19726 - DNA, 476 bp, Homo sapiens
gtagaagtggaggggccgttcgaagagtcgtgagggggtgacgggttaagattcggagagagaggtgctagtggctggacttgacctggaaaggatcttgctttgttgcccaggctggagtgcaggagcacaatctcagctcactgcaacctctgtctcccaggctcaagcaatcttcccatctcagcctttcgagtagccgggactacaggcatgcaccaccacgcccagctaattttttgtatttttgatagagtcggggctttgccatgttgcccaggctggtctcaaactcctgagcttaagcagtctgcccaccttggcctcttagagtgctgggattacaggcatgagccaccatgtccagcctcatttgcattcttgtactgcattttcattaaatcattcaagttccttttatcttgtgtaacatatttaattgcattttcctactgaataaaaaaaagggaacagtt

SEQ ID NO: 19727 - protein, 80 aa, Homo sapiens
MHHHAQLIFCIFDRVGALPCCPGWSQTPELKQSAHLGLLECWDYRHEPPCPASFAFLYCIFIKSFKFLLSCVTYLIAFSY

SEQ ID NO: 19728 - DNA, 1608 bp, Homo sapiens
gaagtggaggggccgttcgaagagtcgtgagggggtgacgggttaagattcggagagagaggtgctagtggctggacttgacctggaaagcctatgaccttctactttggctttaagaatgtggaactactgttttccggtttggtgatcaatacagctggagaaatggctggagcttttgtggcagtgtttttactagcaatgttctatgaaggactcaagatagcccgagagagcctgctgcgtaagtcacaagtcagcattcgctacaattccatgcctgtcccaggaccaaatggaaccatccttatggagacacacaaaactgttgggcaacagatgctgagctttcctcacctcctgcaaacagtgctgcacatcatccaggtggtcataagctacttcctcatgctcatcttcatgacctacaacgggtacctctgcattgcagtagcagcaggggccggtacaggatacttcctcttcagctggaagaaggcagtggtagtggatatcacagagcattgccattgacatcaaactctatggcgtggccttatcgattgcagtgggaagttgttgaagacttgaagacgtgattcctgctccaatcatcccttcttgctcctctttgtgcacgtacacacacacacacacacacacacacacacacccctgctcaacagaggtttagtttacagtctctgaactaaagtagtaacctcccaaattgttttttctaataagctgagattcccatttctcttaaggagaagccacccatgagatgtcttttccttctccatcatcttagagccaagttatatgttcttgtctaatccatgtagctttttgttcaatgacttgatcatctgcttcctttttgaatttttaacagatagtaagtaaatttggtggttttttcccctgggtcagtgatggaaaggggttaacttcagccaggattgatggcagctgagggaaattcttgcccaactaaacccagaactcaaacttaacattagaaaataaggtccagggccggacacagtggcccatgcctgtaatcccagcactttggggggccaaggcaggctggatcacctgaggacaggagttcgagaccagtctggccaacatggggaaaccccgtctctactaaaaatacaaaaattagccgggcatggtggtgggcgcctgtaatcccagctactcagaaggctgaggcaggagaatcacttgaacctaggaggcggaggttgcagtgagccaagatggcgccattgcactccagcctgggtgacaagagtgaaactccatctcaaaaaaaaagaaaagaaggtccagcttttggattcaatgagtgggaaatacattgtgcctttctctagatgtgatacgttataccaaaatctttgtagtgtgcagagcggtggtttgagactaaatacaggcttagaacttgcagagtgtgtattcttggatggctgatgcatcgacttgcattcccacttaacactttgattagcatgaacttgccaatcaaaaaatgacaatcaatttgagaaaatagaaatagatatttttaaataaaaccattcacagttt

SEQ ID NO: 19729 - protein, 146 aa, Homo sapiens
MTFYFGFKNVELLFSGLVINTAGEMAGAFVAVFLLAMFYEGLKIARESLLRKSQVSIRYNSMPVPGPNGTILMETHKTVGQQMLSFPHLLQTVLHIIQVVISYFLMLIFMTYNGYLCIAVAAGAGTGYFLFSWKKAVVVDITEHCH

SEQ ID NO: 19730 - DNA, 4552 bp, Homo sapiens
gaagtggaggggccgttcgaagagtcgtgagggggtgacgggttaagattcggagagagaggtgctagtggctggacttgacctggaaagcctatgaccttctactttggctttaagaatgtggaactactgttttccggtttggtgatcaatacagctggagaaatggctggagcttttgtggcagtgtttttactagcaatgttctatgaaggactcaagatagcccgagagagcctgctgcgtaagtcacaagtcagcattcgctacaattccatgcctgtcccaggaccaaatggaaccatccttatggagacacacaaaactgttgggcaacagatgctgagctttcctcacctcctgcaaacagtgctgcacatcatccaggtggtcataagctacttcctcatgctcatcttcatgacctacaacgggtacctctgcattgcagtagcagcaggggccggtacaggatacttcctcttcagctggaagaaggcagtggtagtggatatcacagagcattgccattgacatcaaactctatggcgtggccttatcgattgcagtgggaagttgttgaagacttgaagacgtgattcctgctccaatcatcccttcttgctcctctttgtgcacgtacacacacacacacacacacacacacacacacccctgctcaacagaggtttagtttacagtctctgaactaaagtagtaacctcccaaattgttttttctaataagctgagattcccatttctcttaaggagaagccacccatgagatgtcttttccttctccatcatcttagagccaagttatatgttcttgtctaatccatgtagctttttgttcaatgacttgatcatctgcttcctttttgaatttttaacagatagtaagtaaatttggtggttttttcccctgggtcagtgatggaaaggggttaacttcagccaggattgatggcagctgagggaaattcttgcccaactaaacccagaactcaaacttaacattagaaaataaggtccagggccggacacagtggcccatgcctgtaatcccagcactttggggggccaaggcaggctggatcacctgaggacaggagttcgagaccagtctggccaacatggggaaaccccgtctctactaaaaatacaaaaattagccgggcatggtggtgggcgcctgtaatcccagctactcagaaggctgaggcaggagaatcacttgaacctaggaggcggaggttgcagtgagccaagatggcgccattgcactccagcctgggtgacaagagtgaaactccatctcaaaaaaaaagaaaagaaggtccagcttttggattcaatgagtgggaaatacattgtgcctttctctagatgtgatacgttataccaaaatctttgtagtgtgcagagcggtggtttgagactaaatacaggcttagaacttgcagagtgtgtattcttggatggctgatgcatcgacttgcattcccacttaacactttgattagcatgaacttgccaatcaaaaaatgacaatcaatttgagaaaatagaaatagatatttttaaataaaaccattcacagtttactttgtcttgataccttggtttgtcccagctgaagtgaagcaagagagtttgaattaatttttccattataatgttttcgcatgtctgcctctaaaactgtgattttcaagctttagcgtgcatcagaatcacctgtagggcttgttaaaacactaattgctgggcctcaacccaaaagcccccaaagtggcacttctgagttcctgctgatgttacaagggaccacacttttgagaatctgtgctttaagctaaggaaatattgcctggtgggttggctgcctggtattgggcatggaaatttgaattgctgattggtagatggtgtgtctggacttaactcacgtagtaaatactgctgatcaatacctaatcattccacatttattgagctccacctgtgtgtatgtgtacccaagcacacatgtgtgaagggctatagccaaagtatttttactagcctgtatgaaatcactagtccttatttttaaaggtctatggtttcttggaagtagtttgattgttgagagagacctttgatctgcagtgtaaatctaccagtcatgggccagaagggcaaaagcccagctttctctttggaaagactcaggctgtggtttgttgatggccaggttttcctcaggctccaacaactgtgcttataccaagcagatcctcatcctccatataatcatctttgttattcgtgggggtttaattacattacaagtggccaaaacccctgttctcagtgaagaaccacattggatttgtattctgttcagttgtagtctacactgcagtcttattcctggttcaaactacctctttaaattgatttgtcttgtgctggtctgttaaatcctgccctccttggtgctagatccagttgtgcctcagggcagaggaaacaaaacacagctatcctgttggcctgtgttgtggttttgaagtttgtactttctctgtgggtgccagttaaatattggagagcaaggaatgtggacttgtatggctttgaaccaagagagggttatgagcctactggattgaggttaaaatccaagaaccaacatttagagctttgtgcttttctctcattccatcactttgtaatgatgatacttaacatgagcagggtgaatgacaggtactgacgaagtccaacacaaaggtataatacagcctgttgtctaaagccaaggagtcataaaaccatgagaaataaataggaatcaatagttagtagtgacattggtgctctctagaaatctcagcatgagctgctatagaataccctcccagcaacaaaacctaatcagtaaggccagctagacccaatggctcatgcctgtaatcccaacactttgggaggccaaggtgggaggatggcttgtgtccagaagttcgagaccagcctggacaacatagtgagatcctatctctataaaaaatcaaaaattagccaggcatggtggtgcatacctatagtcctggctatttgggaggctgaggcaggaggattgctttagccctggaggtcgaggctgcagtaagccatgattgcgccactgcactcagcccgggtgacaaagcaagaccctgtctcagaaaaaaagaaaattcaaggccagttaagacaaaatgctatgactttgaaattcacagaaagaaataacagtttagattaggtcttcaggtattcaggatagagataatctcctgaaaaacctgaatttcagagattcttagactggctgccaaaggatgaagctagtgaaggagaaaaagcttaaattccatcttgagctcttggattgtgataatacaatgatttcattaacttttcatttctgtatacctgttcatttggaatttaatgcttgacttctttgttcattttggatctaaacttctcttttcttccttccccattcacatctattagaagactgcatcaccatttctttggcccccttactctgttgtcctttcccttttctttcagtttttttaatcgcatgtctagtatattaagtctccatagccctcctgatgcagtagacagtgctatgctgtggatataataccaaccagaaattggcatttataaacctgttaagagactttaagcatgcttcaagaggcagttgacccactggaatttctataaggctggtacccttcccagagttacagaatcttaggtgccgtctctagtctgtgagggaggaactcccagcatccccattgcccacaaatggaatcctcactgtatccactaggagattagaaattaaggtttcttcactacttctatggtagggttgtctgaaattccctttcaggctgtgggtactggtcttgggttctagtcataaggggttccttataaggagcaggcggaggggagtacactttcatgtgatttaattttgatcctgccctctccagctgctccttcaaaagatacatcaaaagatagaaactctgggctgggcacagtggctcacacactttgggaggccaagcgggggtgcagatcacctgaggtcaggagtttgagaccagcctggccaatgtggtgaaaccccatctctactaaaaatacaaaaattagctgggcgtggtggtgcatgcctgtaatcccagctactcgggaggctgaggcaggagaatcgcttgaacccaggaggcggaggttgcagtgagccaagatggcgccattgcactccagcctgggcgacaagagcaaaactccgtctcaaaaaaaaaaaaaagatacaaagtctgcatttgatataatgccttaattactgggtctacaattaatgttgactgttttagattgtaagctcctggagagcagtattgctgtagtaggaatgttttaacagtgtcatatgaaaaagaacaaaataaatattttgattttgtgattct

SEQ ID NO: 19731 - protein, 146 aa, Homo sapiens; identical to SEQ ID NO: 19729

SEQ ID NO: 19732 - DNA, 4924 bp, Homo sapiens
gaagtggaggggccgttcgaagagtcgtgagggggtgacgggttaagattcggagagagaggtgctagtggctggacttgacctggaaagcctatgaccttctactttggctttaagaatgtggaactactgttttccggtttggtgatcaatacagctggagaaatggctggagcttttgtggcagtgtttttactagcaatgttctatgaaggactcaagatagcccgagagagcctgctgcgtaagtcacaagtcagcattcgctacaattccatgcctgtcccaggaccaaatggaaccatccttatggagacacacaaaactgttgggcaacagatgctgagctttcctcacctcctgcaaacagtgctgcacatcatccaggtggtcataagctacttcctcatgctcatcttcatgacctacaacgggtacctctgcattgcagtagcagcaggggccggtacaggatacttcctcttcagctggaagaaggcagtggtagtggatatcacagagcattgccattgacatcaaactctatggcgtggccttatcgattgcagtgggaagttgttgaagacttgaagacgtgattcctgctccaatcatcccttcttgctcctctttgtgcacgtacacacacacacacacacacacacacacacacccctgctcaacagaggtttagtttacagtctctgaactaaagtagtaacctcccaaattgttttttctaataagctgagattcccatttctcttaaggagaagccacccatgagatgtcttttccttctccatcatcttagagccaagttatatgttcttgtctaatccatgtagctttttgttcaatgacttgatcatctgcttcctttttgaatttttaacagatagtaagtaaatttggtggttttttcccctgggtcagtgatggaaaggggttaacttcagccaggattgatggcagctgagggaaattcttgcccaactaaacccagaactcaaacttaacattagaaaataaggtccagggccggacacagtggcccatgcctgtaatcccagcactttggggggccaaggcaggctggatcacctgaggacaggagttcgagaccagtctggccaacatggggaaaccccgtctctactaaaaatacaaaaattagccgggcatggtggtgggcgcctgtaatcccagctactcagaaggctgaggcaggagaatcacttgaacctaggaggcggaggttgcagtgagccaagatggcgccattgcactccagcctgggtgacaagagtgaaactccatctcaaaaaaaaagaaaagaaggtccagcttttggattcaatgagtgggaaatacattgtgcctttctctagatgtgatacgttataccaaaatctttgtagtgtgcagagcggtggtttgagactaaatacaggcttagaacttgcagagtgtgtattcttggatggctgatgcatcgacttgcattcccacttaacactttgattagcatgaacttgccaatcaaaaaatgacaatcaatttgagaaaatagaaatagatatttttaaataaaaccattcacagtttactttgtcttgataccttggtttgtcccagctgaagtgaagcaagagagtttgaattaatttttccattataatgttttcgcatgtctgcctctaaaactgtgattttcaagctttagcgtgcatcagaatcacctgtagggcttgttaaaacactaattgctgggcctcaacccaaaagcccccaaagtggcacttctgagttcctgctgatgttacaagggaccacacttttgagaatctgtgctttaagctaaggaaatattgcctggtgggttggctgcctggtattgggcatggaaatttgaattgctgattggtagatggtgtgtctggacttaactcacgtagtaaatactgctgatcaatacctaatcattccacatttattgagctccacctgtgtgtatgtgtacccaagcacacatgtgtgaagggctatagccaaagtatttttactagcctgtatgaaatcactagtccttatttttaaaggtctatggtttcttggaagtagtttgattgttgagagagacctttgatctgcagtgtaaatctaccagtcatgggccagaagggcaaaagcccagctttctctttggaaagactcaggctgtggtttgttgatggccaggttttcctcaggctccaacaactgtgcttataccaagcagatcctcatcctccatataatcatctttgttattcgtgggggtttaattacattacaagtggccaaaacccctgttctcagtgaagaaccacattggatttgtattctgttcagttgtagtctacactgcagtcttattcctggttcaaactacctctttaaattgatttgtcttgtgctggtctgttaaatcctgccctccttggtgctagatccagttgtgcctcagggcagaggaaacaaaacacagctatcctgttggcctgtgttgtggttttgaagtttgtactttctctgtgggtgccagttaaatattggagagcaaggaatgtggacttgtatggctttgaaccaagagagggttatgagcctactggattgaggttaaaatccaagaaccaacatttagagctttgtgcttttctctcattccatcactttgtaatgatgatacttaacatgagcagggtgaatgacaggtactgacgaagtccaacacaaaggtataatacagcctgttgtctaaagccaaggagtcataaaaccatgagaaataaataggaatcaatagttagtagtgacattggtgctctctagaaatctcagcatgagctgctatagaataccctcccagcaacaaaacctaatcagtaaggccagctagacccaatggctcatgcctgtaatcccaacactttgggaggccaaggtgggaggatggcttgtgtccagaagttcgagaccagcctggacaacatagtgagatcctatctctataaaaaatcaaaaattagccaggcatggtggtgcatacctatagtcctggctatttgggaggctgaggcaggaggattgctttagccctggaggtcgaggctgcagtaagccatgattgcgccactgcactcagcccgggtgacaaagcaagaccctgtctcagaaaaaaagaaaattcaaggccagttaagacaaaatgctatgactttgaaattcacagaaagaaataacagtttagattaggtcttcaggtattcaggatagagataatctcctgaaaaacctgaatttcagagattcttagactggctgccaaaggatgaagctagtgaaggagaaaaagcttaaattccatcttgagctcttggattgtgataatacaatgatttcattaacttttcatttctgtatacctgttcatttggaatttaatgcttgacttctttgttcattttggatctaaacttctcttttcttccttccccattcacatctattagaagactgcatcaccatttctttggcccccttactctgttgtcctttcccttttctttcagtttttttaatcgcatgtctagtatattaagtctccatagccctcctgatgcagtagacagtgctatgctgtggatataataccaaccagaaattggcatttataaacctgttaagagactttaagcatgcttcaagaggcagttgacccactggaatttctataaggctggtacccttcccagagttacagaatcttaggtgccgtctctagtctgtgagggaggaactcccagcatccccattgcccacaaatggaatcctcactgtatccactaggagattagaaattaaggtttcttcactacttctatggtagggttgtctgaaattccctttcaggctgtgggtactggtcttgggttctagtcataaggggttccttataaggagcaggcggaggggagtacactttcatgtgatttaattttgatcctgccctctccagctgctccttcaaaagatacatcaaaagatagaaactctgggctgggcacagtggctcacacactttgggaggccaagcgggggtgcagatcacctgaggtcaggagtttgagaccagcctggccaatgtggtgaaaccccatctctactaaaaatacaaaaattagctgggcgtggtggtgcatgcctgtaatcccagctactcgggaggctgaggcaggagaatcgcttgaacccaggaggcggaggttgcagtgagccaagatggcgccattgcactccagcctgggcgacaagagcaaaactccgtctcaaaaaaaaaaaaaagatacaaagtctgcatttgatataatgccttaattactgggtctacaattaatgttgactgttttagattgtaagctcctggagagcagtattgctgtagtaggaatgttttaacagtgtcatatgaaaaagaacaaaataaatattttgattttgtgattctatgcaagtctttctgcccagagtgataatgcaataagctagtcttttcatagtctgcatagagtctggccattaccatcagtttttaagatgtccatattgtggccgggcgcggtggctcacgcctggtaatcccagcactttgggaggctgaggcaggtggatcatgaggtcaggagatcgagaccatcctggctaacacggtgaaacccgtctctactaaaaaaaatattaaaaaattagccaggcctggtggtgggcgcctgtagtcccagctacttgggaggctgaggcaggagaatggtgtgaacccggaagtcagaggttgcagtgagccaagattgcacctgggcaacacagcgagactccgtct

SEQ ID NO: 19733 - protein, 146 aa, Homo sapiens; identical to SEQ ID NO: 19729

SEQ ID NO: 19734 - DNA, 750 bp, Homo sapiens
aatttagccgtcttgctaattccctaacttctgaccataaattcatatgtatttttgttaaacatattagattttacagactgtgtctgtcttgcaggtgatggggcaggtacagggaaaacttttttgataatcttcagaggttgactgtgaaacactcttgactataaggaggttttgaaagctgtttggaaaaatatcataccatacttattaaatgggggagaggggaaagcaacagaagtgctgagctcttcaacagtcaatatagcatttactgtttcctatatttaatagcattcagaacaatagaaacaagttggcacatagccaacttcaggtacctaactgaagataaatgttccctagaaactgaatagtttaaagccttcctgagaaagaaactccttttattaactattttatgtgaactaaattccacataaactcctgcttaattttttaaaatagtcaattcctagaccatttctcatcttccttaatgatccaagaagatggccaggcatggtggctcacgcctgtaatcccatgctgagattacaggcgtgagccaccacacccggccacagtaattctaatctttctaccctagttataagctcaacttggtaaataaaatattttaggtagattttatcatagattaaaggttaggaaaattttcgcaacctactcatctgacaaagggctaatatccagaatctacaatgaactcaaacaaatttacaa

SEQ ID NO: 19735 - protein, 69 aa, Homo sapiens
GGFESCLEKYHTILIKWGRGESNRSAELFNSQYSIYCFLYLIAFRTIETSWHIANFRYLTEDKCSLETE

SEQ ID NO: 19736 - DNA, 1175 bp, Homo sapiens
gatataataccaaccagaaattggcatttataaacctgttaagagactttaagcatgcttcaagaggcagttgacccactggaatttctataaggctggtacccttcccagagttacagaatcttaggtgccgtctctagtctgtgagggaggaactcccagcatccccattgcccacaaatggaatcctcactgtatccactaggagattagaaattaaggtttcttcactacttctatggtagggttgtctgaaattccctttcaggctgtgggtactggtcttgggttctagtcataaggggttccttataaggagcaggcggaggggagtacactttcatgtgatttaattttgatcctgccctctccagctgctccttcaaaagatacatcaaaagatagaaactctgggctgggcacagtggctcacacactttgggaggccaagcgggggtgcagatcacctgaggtcaggagtttgagaccagcctggccaatgtggtgaaaccccatctctactaaaaatacaaaaattagctgggcgtggtggtgcatgcctgtaatcccagctactcgggaggctgaggcaggagaatcgcttgaacccaggaggcggaggttgcagtgagccaagatggcgccattgcactccagcctgggcgacaagagcaaaactccgtctcaaaaaaaaaaaaaagatacaaagtctgcatttgatataatgccttaattactgggtctacaattaatgttgactgttttagattgtaagctcctggagagcagtattgctgtagtaggaatgttttaacagtgtcatataaaaagaaagggcttttctggcaaagggaacactgtgtataggcactgagattaaagataacccagcagtgaaagtggagagataagcaaggaccagctcacaaggagctcatatgccatgctagggaatttggaatttattctgtagaccactgaagaatttaagtcttattaatggacatctaataccatgtagcaaggccacagttaaaaatacatatggggcccctactatgaactagatggtaagaactcaatggtgaagcaaacagacatgatttctgcaatcaacgtccctaatgtaaatgattttacaataaaaaaaattgtaaattataataaatgctatg

SEQ ID NO: 19737 - protein, 31 aa, Homo sapiens
MAPLHSSLGDKSKTPSQKKKKDTKSAFDIMP

SEQ ID NO: 19738 - DNA, 1265 bp, Homo sapiens
tcatgtctggctaatttttgtatttttagtagagatgagtttttgccatgttggccaggctagtcttgaactcctgagctcaggtgatccgcccgtctcggcctcccaaagtgctgggattgggaaaggtgtgagccactgtgcccggccataatacctgtttgaattaggcacctagcacaaaataggtattcgagccttagtattttttttattatctacaattgttgttactccagctttcagaatgaaaagtaacactcttcttgataaggttaataggttagtatttttctttttttgttgttgtttttgtttttgagacggagttttgcccttgttgcccagactcgagtgcaatggtgcaatctcagctcactgcaacctctgcctcctgggttcaagcacctccacctcagcctcccgagtagctaggattgcaggcatgcaccaccacgcccggctaattttgtatttttagtagagacagggtttctccatgttggtcaggctggtctcaaactctggacctcaggttatctgcccacctcagcctcccgaagtgctgggattacaggcatgagccaccacacctgtccctctccccctcgtattactcagacttaaactaccccaaaaaggctaaagtcctgctaagagtctccgtagaactgatgattcaagaggctcttatgatcacagctggtgattccctgtgttgaattagtgaaaacaggccaggcacagtaatcccagcactttgagaggactgcttaatgtcaggagctcaagcccagcttgggcaacacagatgcctgtctctacataaaacaataaaaatttttaaaaaaaatttttttttaatgcccagaacaatagggcatgattcaaaattatcctccgagctgcctctctggttctttctgggaaaaacacttaggcaagttgagaaaggaaggaaagttggaataatggcaaaactgttagaagcattcctctttcctccattgcctgtcctcccaacattatacccaaactagttacaaagccattctgtaaagagatcgggtacctacaatttcttcagatttacacaatatccactagaatttaatttctacaagggcagggatctttgttgagtggcacatggtagacactcaataaatacttattgaatagatgggttaagtgaaagtggcagggatcaactagagtgtcctgtgcttagggtcttttaataaagatggaaagaatgatgttaa

SEQ ID NO: 19739 - protein, 87 aa, Homo sapiens [sequence omitted]

SEQ ID NO: 19740 - DNA, 528 bp, Homo sapiens
ttgatccctgccactttcacttaacccatctattcaataagtatttattgagtgtctaccatgtgccactcaacaaagatccctgcccttgtagaaattaaattctagtggatattgtgtaaatctgaagaaattgtaggtacccgatctctttacagaatggctttgtaactagtttgggtataatgttgggaggacaggcaatggaggaaagaggaatgcttctaacagttttgccattattccaactttccttcctttctcaacttgcctaagtgtttttcccagaaagaaccagagaggcagctcggaggataattttgaatcatgccctattgttctgggcattaaaaaaaaattttttttaaaaatttttattgttttatgtagagacaggcatctgtgttgcccaagctgggcttgagctcctgacattaagcagtcctctcaaagtgctgaggcaggaggattgcttgagtccaggagttagaccagcctgggcaacacagggaaaccctgactctataa

SEQ ID NO: 19741 - protein, 52 aa, Homo sapiens
KFLLFYVETGICVAQAGLELLTLSSPLKVLRQEDCLSPGVRPAWATQGNPDS

SEQ ID NO: 19742 - DNA, 974 bp, Homo sapiens
gtagtaggaaatggcgtcgtggcattgaggggcatccctcctagaacctccaggaaaagctcgcggaagacgaggttctgcggagagagaggctccaagcagtctgggaagtgtagtccagttggcttagcagtagtttcgttgggggggagccgaggttccgggaaggggctaggccggcttgaaaagagctggaacacaagaagtgtttgtttaatgaatgacgtacacatttaagatctgtttggacgcggaggataatcctgtgaattgctaatagttcactgggtttggcccttagtgttgacttcagtatgctgagacggaaaccaacacgcctagagctaaagcttgatgacattgaagagtttgagaacattcgaaaggacctggagtgcattctgcatccagtatcaagaatgatcttcagaaattttcaaatcctgtcattcccgtttaaaactcctcagtagttttctgcacttataacaaaatctgaattcttcaccatggcctacaagattttacccgtaagaaacagaaggaagatgtggaagttgtaggaggcagtgatggagaaggagccattgggcttagcagtgatcccaagagccgggaacaaatgatcaatgatcggattggttataaaccccaacccaagcccaataatcgttcatctcaatttggaagtcttgaattttagagatggattatcttgcatgccagagcgctggaatggaataaaatgatggcagaagtacaaaccagatttagagaattgagtgcttgcagtcaagcagaatgtacctcctgcagagacaaatcttctgcatgagattactgatgcttcacttgcactctaagctggaatccaaactctggtttgtctcttgaaaatttgactctataaaactgatctgattttctgtttttaaaaataaatatatttttggaaaaatgtgaggcatccttaa

SEQ ID NO: 19743 - protein, 52 aa, Homo sapiens
MLRRKPTRLELKLDDIEEFENIRKDLECILHPVSRMIFRNFQILSFPFKTPQ

SEQ ID NO: 19744 - DNA, 953 bp, Homo sapiens
gtagtaggaaatggcgtcgtggcattgaggggcatccctcctagaacctccaggaaaagctcgcggaagacgaggttctgcggagagagaggctccaagcagtctgggaagtgtagtccagttggcttagcagtagtttcgttgggggggagccgaggttccgggaaggggctaggccggcttgaaaagagctggaacacaagaagtgtttgtttaatgaatgacgtacacatttaagatctgtttggacgcggaggataatcctgtgaattgctaatagttcactgggtttggcccttagtgttgacttcagtatgctgagacggaaaccaacacgcctagagctaaagcttgatgacattgaagagtttgagaacattcgaaaggacctggagtgcattctgcatccagtatcaagaatgatcttcagaaattttcaaatcctgtcattcccgtttaaaactcctcagtagttttctgcacttataacaaaatctgaattcttcaccatggcctacaagattttacccgtaagaaacagaaggaagatgtggaagttgtaggaggcagtgatggagaaggagccattgggcttagcagtgatcccaagagccgggaacaaatgatcaatgatcggattggttataaaccccaacccaagcccaataatcgttcatctcaatttggaagtcttgaattttagagatggattatcttgcatgccagagcgctggaatggaataaaatgatggcagaagtacaaaccagatttagagaattgagtgcttgcagtcaagcagaatgtacctcctgcagagacaaatcttctgcatgagattactgatgcttcacttgcactctaagctggaatccaaactctggtttgtctcttgaaaatttgactctataaaactgatctgattttctgtttttaaaaataaatatatttttgg

SEQ ID NO: 19745 - protein, 52 aa, Homo sapiens; identical to SEQ ID NO: 19743

SEQ ID NO: 19746 - DNA, 1325 bp, Homo sapiens
cagagttcagccccgagccgcgcgagtcgactcacctacctcttttcaagccggcctagccccttcccggaacctcggctcccccccaacgaaactactgctaagccaactggactacacttcccagactgcttggagcctctctctccgcagaacctcgtcttccgcgagcttttcctggaggttctaggagggatgcccctcaatgccacgacgccatttcctactacgacttccatcatgctccgcgccgctccgggggcggtgacccctcttggcccacgtcttgtcagtgacgcacttcctgtcagtgacgcacttcccctctgctgggcgcgcggtggacggtctgaaagggagtgttcgggtttcgctggggcctcgcggctccagagcccagcatggcttcctcgcgagcctcttccacggcaaccaaaactaaagcacccgacgacttagttgctccggtcgtgaagaaaccacacatctattatggaagtttggaagagaaggagagggagcgtctggccaaaggagagtctgggattttggggaaagacggacttaaagcagggatcgaagctggaaatattaatataacctctggagaagtgtttgaaattgaagagcatatcagcgagcgacaggcagaagtattggctgagtttgagagaaggaagcgagcccggcagatcaatgtttccacagatgactcagaggtcaaagcttgccttagagccttgggggaacccatcacactttttggagagggtcctgctgaaagaagagaaaggttaagaaatatcctctcagttgtcggtactgatgccttgaaaaagaccaaaaaggatgatgagaagtctaaaaagtccaaagaagaggtagaacatgtctttaacttcacagtataaacatgaaggaaatgaggggataggtctctcgttttctgctttcaatggtttgttttgctgagatgttgggggaaatgtttttgaaggctctaccattcaagaagagttgctggcagtagttttggttcctttgtaagtatgaatggagctaagtgagttttccagtcaggaaagaatcatggcattcctggtataaccatgtagttacatatcatagaaaaaaattcagtagaaagtcctctgcctgatttcatcctattaccgaatgaattcaccttccttctgggcagttaaaatggagaaatgacagttataagaggagtagaatgcttcagatttgacctttctgctcttaatttgcctttcagtatcagcaaacctggtatcatgaaggaccaaatagcttgaaggtgg

SEQ ID NO: 19747 - protein, 169 aa, Homo sapiens
MASSRASSTATKTKAPDDLVAPVVKKPHIYYGSLEEKERERLAKGESGILGKDGLKAGIEAGNINITSGEVFEIEEHISERQAEVLAEFERRKRARQINVSTDDSEVKACLRALGEPITLFGEGPAERRERLRNILSVVGTDALKKTKKDDEKSKKSKEEVEHVFNFTV

SEQ ID NO: 19748 - DNA, 1167 bp, Homo sapiens
cagagttcagccccgagccgcgcgagtcgactcacctacctcttttcaagccggcctagccccttcccggaacctcggctcccccccaacgaaactactgctaagccaactggactacacttcccagactgcttggagcctctctctccgcagaacctcgtcttccgcgagcttttcctggaggttctaggagggatgcccctcaatgccacgacgccatttcctactacgacttccatcatgctccgcgccgctccgggggcggtgacccctcttggcccacgtcttgtcagtgacgcacttcctgtcagtgacgcacttcccctctgctgggcgcgcggtggacggtctgaaagggagtgttcgggtttcgctggggcctcgcggctccagagcccagcatggcttcctcgcgagcctcttccacggcaaccaaaactaaagcacccgacgacttagttgctccggtcgtgaagaaaccacacatctattatggaagtttggaagagaaggagagggagcgtctggccaaaggagagtctgggattttggggaaagacggacttaaagcagggatcgaagctggaaatattaatataacctctggagaagtgtttgaaattgaagagcatatcagcgagcgacaggcagaagtattggctgagtttgagagaaggaagcgagcccggcagatcaatgtttccacagatgactcagaggtcaaagcttgccttagagccttgggggaacccatcacactttttggagagggtcctgctgaaagaagagaaaggttaagaaatatcctctcagttgtcggtactgatgccttgaaaaagaccaaaaaggatgatgagaagtctaaaaagtccaaagaagagtatcagcaaacctggtatcatgaaggaccaaatagcttgaaggtggcaagactatggattgctaattattcgttgcccagggcaatgaaacgcttggaagaggcccgactccataaggagattcctgagacaacaaggacctcccagatgcaagagctgcacaagtctctccgggtaagatgctcccagcaattgtcccacatcttaaaggttcttcatgtttatttgatttttctactttggctcacctctgggaaggtagaggcaactagagtgattcctccct

SEQ ID NO: 19749 - protein, 254 aa, Homo sapiens
MASSRASSTATKTKAPDDLVAPVVKKPHIYYGSLEEKERERLAKGESGILGKDGLKAGIEAGNINITSGEVFEIEEHISERQAEVLAEFERRKRARQINVSTDDSEVKACLRALGEPITLFGEGPAERRERLRNILSVVGTDALKKTKKDDEKSKKSKEEYQQTWYHEGPNSLKVARLWIANYSLPRAMKRLEEARLHKEIPETTRTSQMQELHKSLRVRCSQQLSHILKVLHVYLIFLLWLTSGKVEATRVIP

SEQ ID NO: 19750 - DNA, 3095 bp, Homo sapiens
cagagttcagccccgagccgcgcgagtcgactcacctacctcttttcaagccggcctagccccttcccggaacctcggctcccccccaacgaaactactgctaagccaactggactacacttcccagactgcttggagcctctctctccgcagaacctcgtcttccgcgagcttttcctggaggttctaggagggatgcccctcaatgccacgacgccatttcctactacgacttccatcatgctccgcgccgctccgggggcggtgacccctcttggcccacgtcttgtcagtgacgcacttcctgtcagtgacgcacttcccctctgctgggcgcgcggtggacggtctgaaagggagtgttcgggtttcgctggggcctcgcggctccagagcccagcatggcttcctcgcgagcctcttccacggcaaccaaaactaaagcacccgacgacttagttgctccggtcgtgaagaaaccacacatctattatggaagtttggaagagaaggagagggagcgtctggccaaaggagagtctgggattttggggaaagacggacttaaagcagggatcgaagctggaaatattaatataacctctggagaagtgtttgaaattgaagagcatatcagcgagcgacaggcagaagtattggctgagtttgagagaaggaagcgagcccggcagatcaatgtttccacagatgactcagaggtcaaagcttgccttagagccttgggggaacccatcacactttttggagagggtcctgctgaaagaagagaaaggttaagaaatatcctctcagttgtcggtactgatgccttgaaaaagaccaaaaaggatgatgagaagtctaaaaagtccaaagaagagtatcagcaaacctggtatcatgaaggaccaaatagcttgaaggtggcaagactatggattgctaattattcgttgcccagggcaatgaaacgcttggaagaggcccgactccataaggagattcctgagacaacaaggacctcccagatgcaagagctgcacaagtctctccggtctttgaataatttttgcagtcagattggggatgatcggcctatctcctactgtcactttagtcccaattccaagatgctggccacagcttgttggagtgggctttgcaagctctggtctgttcctgattgcaacctccttcacactcttcgagggcataacacaaatgtaggagcaattgtattccatcccaaatccactgtctccttggacccaaaagatgtcaacctggcctcttgtgcggctgatggctctgtgaagctttggagtctcgacagtgatgaaccagtggcagatattgaaggccatacagtgcgtgtggcgcgggtaatgtggcatccttcaggacgtttcctgggcaccacctgctatgaccgttcatggcgcttatgggatttggaggctcaagaggagatcctgcatcaggaaggccatagcatgggtgtgtatgacattgccttccatcaagatggctctttggctggcactgggggactggatgcatttggtcgagtttgggacctacgcacaggacgttgtatcatgttcttagaaggccacctgaaagaaatctatggaataaatttctcccccaatggctatcacattgcaaccggcagtggtgacaacacctgcaaagtgtgggacctccgacagcggcgttgcgtctacaccatccctgctcatcagaacttagtgactggtgtcaagtttgagcctatccatgggaacttcttgcttactggtgcctatgataacacagccaagatctggacgcacccaggctggtccccgctgaagactctggctggccacgaaggcaaagtgatgggcctagatatttcttccgatgggcagctcatagccacttgctcatatgacaggaccttcaagctgtggatggctgaatagatgacaatgggaaaaggacttgaacctcaagctctctctaaggagctgttttcctcaaacgagaagaattgaagtgtttagttctatcatgttttctgccaattaccatgcatagaccctcagtagaattggatttccatgtcagcccccactccaggaaggcagcccaatccctaggtgatggggaacccctctcacggttgaaaatttattacctttttacgccctgccacgaactgtgtagacattgtttttattaatcttttgtttggccgggcgtggtggctcacgcctgtaatcctagcactttgggaggccgaggtgggtagatcgcttgagctcaggagttcaagacgagcctgggcaacatggcaaatgccgtctctgcaaaaaaatactaaaattagctggtcgcggtggcttctgcctgtgattccggctacttgggaggctgaggtgggagggattgcttaagcctgggaggcagaggttgcagtgagccgagattgcgccattgcactctagcctgtgtgacagagcaagaccctgtctcaaaaaaaaaaaaaatttgttcgaatgccttatagccttcctcacagcacccaggattgtgactgactctgcatttttaattcttgaaacttggctttccataacatggtacatgcttcaggactacatatgacccagagagcaaggtggctgaactatagtctggaagccctcaggtaaagaggcacatctcaccactcattggttaaacaatgcatcatagcgagcacttttcctttccctggagaatgggatgtgaagcagtagaccgcagccacgccgatggttatacagtgaagaagacttcacctcttcctattgagtttgcttggaatgctgacagcatcaggcaactctgaactgaacatttgctttgtcagaaaatatctttttttttactttgaagtttggcaaccttcatgttaccccaaagcaaaaccattgtgtcaggagtcaaacaaatgtttagaaagcaaacatgacgtctctattgtacaacctcctttctcttggctgtttaaaggatgtacttcgtgtattaaagggtactttatgttgaagtaacgaaaaaaccct

SEQ ID NO: 19751 - protein, 521 aa, Homo sapiens
MASSRASSTATKTKAPDDLVAPVVKKPHIYYGSLEEKERERLAKGESGILGKDGLKAGIEAGNINITSGEVFEIEEHISERQAEVLAEFERRKRARQINVSTDDSEVKACLRALGEPITLFGEGPAERRERLRNILSVVGTDALKKTKKDDEKSKKSKEEYQQTWYHEGPNSLKVARLWIANYSLPRAMKRLEEARLHKEIPETTRTSQMQELHKSLRSLNNFCSQIGDDRPISYCHFSPNSKMLATACWSGLCKLWSVPDCNLLHTLRGHNTNVGAIVFHPKSTVSLDPKDVNLASCAADGSVKLWSLDSDEPVADIEGHTVRVARVMWHPSGRFLGTTCYDRSWRLWDLEAQEEILHQEGHSMGVYDIAFHQDGSLAGTGGLDAFGRVWDLRTGRCIMFLEGHLKEIYGINFSPNGYHIATGSGDNTCKVWDLRQRRCVYTIPAHQNLVTGVKFEPIHGNFLLTGAYDNTAKIWTHPGWSPLKTLAGHEGKVMGLDISSDGQLIATCSYDRTFKLWMAE

SEQ ID NO: 19752 - DNA, 3211 bp, Homo sapiens
cagagttcagccccgagccgcgcgagtcgactcacctacctcttttcaagccggcctagccccttcccggaacctcggctcccccccaacgaaactactgctaagccaactggactacacttcccagactgcttggagcctctctctccgcagaacctcgtcttccgcgagcttttcctggaggttctaggagggatgcccctcaatgccacgacgccatttcctactacgacttccatcatgctccgcgccgctccgggggcggtgacccctcttggcccacgtcttgtcagtgacgcacttcctgtcagtgacgcacttcccctctgctgggcgcgcggtggacggtctgaaagggagtgttcgggtttcgctggggcctcgcggctccagagcccagcatggcttcctcgcgagcctcttccacggcaaccaaaactaaagcacccgacgacttagttgctccggtcgtgaagaaaccacacatctattatggaagtttggaagagaaggagagggagcgtctggccaaaggagagtctgggattttggggaaagacggacttaaagcagggatcgaagctggaaatattaatataacctctggagaagtgtttgaaattgaagagcatatcagcgagcgacaggcagaagtattggctgagtttgagagaaggaagcgagcccggcagatcaatgtttccacagatgactcagaggtcaaagcttgccttagagccttgggggaacccatcacactttttggagagggtcctgctgaaagaagagaaaggttaagaaatatcctctcagttgtcggtactgatgccttgaaaaagaccaaaaaggatgatgagaagtctaaaaagtccaaagaagagtatcagcaaacctggtatcatgaaggaccaaatagcttgaaggtggcaagactatggattgctaattattcgttgcccagggcaatgaaacgcttggaagaggcccgactccataaggagattcctgagacaacaaggacctcccagatgcaagagctgcacaagtctctccggtctttgaataatttttgcagtcagattggggatgatcggcctatctcctactgtcactttagtcccaattccaagatgctggccacagcttgttggagtgggctttgcaagctctggtctgttcctgattgcaacctccttcacactcttcgagggcataacacaaatgtaggagcaattgtattccatcccaaatccactgtctccttggacccaaaagatgtcaacctggcctcttgtgcggctgatggctctgtgaagctttggagtctcgacagtgatgaaccagtggcagatattgaaggccatacagtgcgtgtggcgcgggtaatgtggcatccttcaggacgtttcctgggcaccacctgctatgaccgttcatggcgcttatgggatttggaggctcaagaggagatcctgcatcaggaaggccatagcatgggtgtgtatgacattgccttccatcaagatggctctttggctggcactgggggactggatgcatttggtcgagtttgggacctacgcacaggacgttgtatcatgttcttagaaggccacctgaaagaaatctatggaataaatttctcccccaatggctatcacattgcaaccggcagtggtgacaacacctgcaaagtgtgggacctccgacagcggcgttgcgtctacaccatccctgctcatcagaacttagtgactggtgtcaagtttgagcctatccatgggaacttcttgcttactggtgcctatgataacacagccaagatctggacgcacccaggctggtccccgctgaagactctggctggccacgaaggcaaagtgatgggcctagatatttcttccgatgggcagctcatagccacttgctcatatgacaggaccttcaagctgtggatggctgaatagatgacaatgggaaaaggacttgaacctcaagctctctctaaggagctgttttcctcaaacgagaagaattgaagtgtttagttctatcatgttttctgccaattaccatgcatagaccctcagtagaattggatttccatgtcagcccccactccaggaaggcagcccaatccctaggtgatggggaacccctctcacggttgaaaatttattacctttttacgccctgccacgaactgtgtagacattgtttttattaatcttttgtttggccgggcgtggtggctcacgcctgtaatcctagcactttgggaggccgaggtgggtagatcgcttgagctcaggagttcaagacgagcctgggcaacatggcaaatgccgtctctgcaaaaaaatactaaaattagctggtcgcggtggcttctgcctgtgattccggctacttgggaggctgaggtgggagggattgcttaagcctgggaggcagaggttgcagtgagccgagattgcgccattgcactctagcctgtgtgacagagcaagaccctgtctcaaaaaaaaaaaaaatttgttcgaatgccttatagccttcctcacagcacccaggattgtgactgactctgcatttttaattcttgaaacttggctttccataacatggtacatgcttcaggactacatatgacccagagagcaaggtggctgaactatagtctggaagccctcaggtaaagaggcacatctcaccactcattggttaaacaatgcatcatagcgagcacttttcctttccctggagaatgggatgtgaagcagtagaccgcagccacgccgatggttatacagtgaagaagacttcacctcttcctattgagtttgcttggaatgctgacagcatcaggcaactctgaactgaacatttgctttgtcagaaaatatctttttttttactttgaagtttggcaaccttcatgttaccccaaagcaaaaccattgtgtcaggagtcaaacaaatgtttagaaagcaaacatgacgtctctattgtacaacctcctttctcttggctgtttaaaggatgtacttcgtgtattaaagggtactttatgttgaagtaacgaaaaaaccctaatgggtgttcctaaacctaaaccttttctttattccacatttgctacggtaaaatcctgttacaaaactaccctataaagaattattttctatagttaagcattttctgaatcct

SEQ ID NO: 19753 - protein, 521 aa, Homo sapiens; identical to SEQ ID NO: 19751

SEQ ID NO: 19754 - DNA, 3493 bp, Homo sapiens
cagagttcagccccgagccgcgcgagtcgactcacctacctcttttcaagccggcctagccccttcccggaacctcggctcccccccaacgaaactactgctaagccaactggactacacttcccagactgcttggagcctctctctccgcagaacctcgtcttccgcgagcttttcctggaggttctaggagggatgcccctcaatgccacgacgccatttcctactacgacttccatcatgctccgcgccgctccgggggcggtgacccctcttggcccacgtcttgtcagtgacgcacttcctgtcagtgacgcacttcccctctgctgggcgcgcggtggacggtctgaaagggagtgttcgggtttcgctggggcctcgcggctccagagcccagcatggcttcctcgcgagcctcttccacggcaaccaaaactaaagcacccgacgacttagttgctccggtcgtgaagaaaccacacatctattatggaagtttggaagagaaggagagggagcgtctggccaaaggagagtctgggattttggggaaagacggacttaaagcagggatcgaagctggaaatattaatataacctctggagaagtgtttgaaattgaagagcatatcagcgagcgacaggcagaagtattggctgagtttgagagaaggaagcgagcccggcagatcaatgtttccacagatgactcagaggtcaaagcttgccttagagccttgggggaacccatcacactttttggagagggtcctgctgaaagaagagaaaggttaagaaatatcctctcagttgtcggtactgatgccttgaaaaagaccaaaaaggatgatgagaagtctaaaaagtccaaagaagagtatcagcaaacctggtatcatgaaggaccaaatagcttgaaggtggcaagactatggattgctaattattcgttgcccagggcaatgaaacgcttggaagaggcccgactccataaggagattcctgagacaacaaggacctcccagatgcaagagctgcacaagtctctccggtctttgaataatttttgcagtcagattggggatgatcggcctatctcctactgtcactttagtcccaattccaagatgctggccacagcttgttggagtgggctttgcaagctctggtctgttcctgattgcaacctccttcacactcttcgagggcataacacaaatgtaggagcaattgtattccatcccaaatccactgtctccttggacccaaaagatgtcaacctggcctcttgtgcggctgatggctctgtgaagctttggagtctcgacagtgatgaaccagtggcagatattgaaggccatacagtgcgtgtggcgcgggtaatgtggcatccttcaggacgtttcctgggcaccacctgctatgaccgttcatggcgcttatgggatttggaggctcaagaggagatcctgcatcaggaaggccatagcatgggtgtgtatgacattgccttccatcaagatggctctttggctggcactgggggactggatgcatttggtcgagtttgggacctacgcacaggacgttgtatcatgttcttagaaggccacctgaaagaaatctatggaataaatttctcccccaatggctatcacattgcaaccggcagtggtgacaacacctgcaaagtgtgggacctccgacagcggcgttgcgtctacaccatccctgctcatcagaacttagtgactggtgtcaagtttgagcctatccatgggaacttcttgcttactggtgcctatgataacacagccaagatctggacgcacccaggctggtccccgctgaagactctggctggccacgaaggcaaagtgatgggcctagatatttcttccgatgggcagctcatagccacttgctcatatgacaggaccttcaagctgtggatggctgaatagatgacaatgggaaaaggacttgaacctcaagctctctctaaggagctgttttcctcaaacgagaagaattgaagtgtttagttctatcatgttttctgccaattaccatgcatagaccctcagtagaattggatttccatgtcagcccccactccaggaaggcagcccaatccctaggtgatggggaacccctctcacggttgaaaatttattacctttttacgccctgccacgaactgtgtagacattgtttttattaatcttttgtttggccgggcgtggtggctcacgcctgtaatcctagcactttgggaggccgaggtgggtagatcgcttgagctcaggagttcaagacgagcctgggcaacatggcaaatgccgtctctgcaaaaaaatactaaaattagctggtcgcggtggcttctgcctgtgattccggctacttgggaggctgaggtgggagggattgcttaagcctgggaggcagaggttgcagtgagccgagattgcgccattgcactctagcctgtgtgacagagcaagaccctgtctcaaaaaaaaaaaaaatttgttcgaatgccttatagccttcctcacagcacccaggattgtgactgactctgcatttttaattcttgaaacttggctttccataacatggtacatgcttcaggactacatatgacccagagagcaaggtggctgaactatagtctggaagccctcaggtaaagaggcacatctcaccactcattggttaaacaatgcatcatagcgagcacttttcctttccctggagaatgggatgtgaagcagtagaccgcagccacgccgatggttatacagtgaagaagacttcacctcttcctattgagtttgcttggaatgctgacagcatcaggcaactctgaactgaacatttgctttgtcagaaaatatctttttttttactttgaagtttggcaaccttcatgttaccccaaagcaaaaccattgtgtcaggagtcaaacaaatgtttagaaagcaaacatgacgtctctattgtacaacctcctttctcttggctgtttaaaggatgtacttcgtgtattaaagggtactttatgttgaagtaacgaaaaaaccctaatgggtgttcctaaacctaaaccttttctttattccacatttgctacggtaaaatcctgttacaaaactaccctataaagaattattttctatagttaagcattttctgaatcctagccattggtccatagaggtctcttttttttggtttgggatataatggatgatctcaaatatggattactctgatttatgtctccttagcaccttgttaacaattttttttaaaatagaaggctgtttgcattttgggccagactgccagtaagccaggcctggactcaattacaattcttaacttgtctgtcatgcacctcttttcacctcaactatacagcctctgaactctcaaattacacagtaaattcaaaaaaatatataggaatttggaagaaga

SEQ ID NO: 19755 - protein, 521 aa, Homo sapiens; identical to SEQ ID NO: 19751

SEQ ID NO: 19756 - DNA, 1199 bp, Homo sapiens
tggaaggggaagaggctctggaagggctgatctggggactggggcagggaagcttctgcaaggcttccaggacgtctcccgcgaagcctccccgtgtgtggctgaggatggctgagcagcagggccgggagcttgaggctgagtgccccgtctgctggaaccccttcaacaacacgttccatacccccaaaatgctggattgctgccactccttctgcgtggaatgtctggcccacctcagccttgtgactccagcccggcgccgcctgctgtgcccactctgtcgccagcccacagtgctggcctcagggcagcctgtcactgacttgcccacggacactgccatgctcgccctgctccgcctggagccccaccatgtcatcctggaaggccatcagctgtgcctcaaggaccagcccaagagccgctacttcctgcgccagcctcaagtctacacgctggaccttggcccccagcctgggggccagactgggccgcccccagacacggcctctgccaccgtgtctacgcccatcctcatccccagccaccactctttgagggagtgtttccgcaaccctcagttccgcatctttgcctacctgatggccgtcatcctcagtgtcactctgttgctcatattctccatcttttggaccaagcagttcctttggggtgtggggtgagtgctgttcccagacaagaaaccaaacctttttcggttgctgctgggtatggtgactacggagcctcatttggtattgtcttcctttgtagtgttgtttattttacaatccagggattgttcaggccatgtgtttgcttctgggaacaattttaaaaaaaaacaaaaaaacgaaaagcttgaaggactgggagatgtggagcgacctccgggtgtgagtgtggcgtcatggaagggcagagaagcggttctgaccacagagctccacagcaagttgtgccaaagggctgcacagtggtatccaggaacctgactagcccaaatagcaagttgcatttctcactggagctgcttcaaaatcagtgcatatttttttgagttgctcttttactatgggttgctaaaaaaaaaaaaaaaattgggaagtgagcttcaattctgtgggtaaatgtgtgtttgtttctctttgaatgtcttgccactggttgcagtaaaagtgttctgtattcattaa

SEQ ID NO: 19757 - protein, 192 aa, Homo sapiens
MAEQQGRELEAECPVCWNPFNNTFHTPKMLDCCHSFCVECLAHLSLVTPARRRLLCPLCRQPTVLASGQPVTDLPTDTAMLALLRLEPHHVILEGHQLCLKDQPKSRYFLRQPQVYTLDLGPQPGGQTGPPPDTASATVSTPILIPSHHSLRECFRNPQFRIFAYLMAVILSVTLLLIFSIFWTKQFLWGVG

SEQ ID NO: 19758 - DNA, 1210 bp, Homo sapiens
cgattcaggggagggagcaactggagcctcaggccctccagagtagtctgcctgaccaccctggagcccacagaagcccaggacgtctcccgcgaagcctccccgtgtgtggctgaggatggctgagcagcagggccgggagcttgaggctgagtgccccgtctgctggaaccccttcaacaacacgttccatacccccaaaatgctggattgctgccactccttctgcgtggaatgtctggcccacctcagccttgtgactccagcccggcgccgcctgctgtgcccactctgtcgccagcccacagtgctggcctcagggcagcctgtcactgacttgcccacggacactgccatgctcgccctgctccgcctggagccccaccatgtcatcctggaaggccatcagctgtgcctcaaggaccagcccaagagccgctacttcctgcgccagcctcaagtctacacgctggaccttggcccccagcctgggggccagactgggccgcccccagacacggcctctgccaccgtgtctacgcccatcctcatccccagccaccactctttgagggagtgtttccgcaaccctcagttccgcatctttgcctacctgatggccgtcatcctcagtgtcactctgttgctcatattctccatcttttggaccaagcagttcctttggggtgtggggtgagtgctgttcccagacaagaaaccaaacctttttcggttgctgctgggtatggtgactacggagcctcatttggtattgtcttcctttgtagtgttgtttattttacaatccagggattgttcaggccatgtgtttgcttctgggaacaattttaaaaaaaaacaaaaaaacgaaaagcttgaaggactgggagatgtggagcgacctccgggtgtgagtgtggcgtcatggaagggcagagaagcggttctgaccacagagctccacagcaagttgtgccaaagggctgcacagtggtatccaggaacctgactagcccaaatagcaagttgcatttctcactggagctgcttcaaaatcagtgcatatttttttgagttgctcttttactatgggttgctaaaaaaaaaaaaaaaattgggaagtgagcttcaattctgtgggtaaatgtgtgtttgtttctctttgaatgtcttgccactggttgcagtaaaagtgttctgtattcattaa

SEQ ID NO: 19759 - protein, 192 aa, Homo sapiens; identical to SEQ ID NO: 19757

SEQ ID NO: 19760 - DNA, 2296 bp, Homo sapiens
cgaggggatggcaggagatcaatcggacccagaacagaggcctgcaaggatgagcgcacttgatcccctcagagaaaaagccagagtgactcacaggagaaagacaaagcaaccaaagcttccagggtgtacaggaggtccaaagtcaccagaaggaagaagaaaacctgaaacagcgagagctggccaaacgctgctaagacctatgcaaataagacccacccacgctacctggaaatcgggcctgggaagtcagaaaacaaagcacatgcgtgcagggctgcacgaacggaggcggaggaggcggctccgagggagcagctgatcctgaaacagcagtggatccctgggagagcagcacagataaagatccaggcaataatgatgcttcctcctcttggacagccttttacagttctggccatggaacttcagagaaggtaggtctgatttggggggaaacaggagatcttgacgtgtagtaatacaagcttactggatggagtaaagttagaattttcaggtaagagaattaaaaaaaaaaaaaaaacttataatcttgcccccagagataaccactgctaatatctggttgtttatctctccagacattttttccattgcacacacacttttggaaattggattatatggtaatatggttttgttgctggttctttttcgcttaatgacattatatcctaggtatatatccatattaatagttttaccacatcatattaaaggctgcataatatctcttcctatggatggagcagaatctacttaatcaatgtcctattactggatgatgacgtagttctccatacgtcaccgttaaaccagcgcctggatgggcatctctttactcacatctttgcagaagtccttgatggtttccgtggaatcgattcccagtgggggaaatgatgagtcaaggttacatacagtttacggcctctgcagatcaactcttcaaattattcgaatgacccatatgagaaacagagaaaagccaagtatttctggttgaaacggagaagctgggctggagtgcgcctccctccaactccccgctttaactccctaaggttggtgggatggccagctctaagatctcagaaggctgaccagctgtgtgctaagaacaaagcagaaggcagcgaggacgtctcccgcgaagcctccccgtgtgtggctgaggatggctgagcagcagggccgggagcttgaggctgagtgccccgtctgctggaaccccttcaacaacacgttccatacccccaaaatgctggattgctgccactccttctgcgtggaatgtctggcccacctcagccttgtgactccagcccggcgccgcctgctgtgcccactctgtcgccagcccacagtgctggcctcagggcagcctgtcactgacttgcccacggacactgccatgctcgccctgctccgcctggagccccaccatgtcatcctggaaggccatcagctgtgcctcaaggaccagcccaagagccgctacttcctgcgccagcctcaagtctacacgctggaccttggcccccagcctgggggccagactgggccgcccccagacacggcctctgccaccgtgtctacgcccatcctcatccccagccaccactctttgagggagtgtttccgcaaccctcagttccgcatctttgcctacctgatggccgtcatcctcagtgtcactctgttgctcatattctccatcttttggaccaagcagttcctttggggtgtggggtgagtgctgttcccagacaagaaaccaaacctttttcggttgctgctgggtatggtgactacggagcctcatttggtattgtcttcctttgtagtgttgtttattttacaatccagggattgttcaggccatgtgtttgcttctgggaacaattttaaaaaaaaacaaaaaaacgaaaagcttgaaggactgggagatgtggagcgacctccgggtgtgagtgtggcgtcatggaagggcagagaagcggttctgaccacagagctccacagcaagttgtgccaaagggctgcacagtggtatccaggaacctgactagcccaaatagcaagttgcatttctcactggagctgcttcaaaatcagtgcatatttttttgagttgctcttttactatgggttgctaaaaaaaaaaaaaaaattgggaagtgagcttcaattctgtgggtaaatgtgtgtttgtttctctttgaatgtcttgccactggttgcagtaaaagtgttctgtattcattaa

SEQ ID NO: 19761 - protein, 105 aa, Homo sapiens
MAGDQSDPEQRPARMSALDPLREKARVTHRRKTKQPKLPGCTGGPKSPEGRRKPETARAGQTLLRPMQIRPTHATWKSGLGSQKTKHMRAGLHERRRRRRLRGSS

SEQ ID NO: 19762 - DNA, 647 bp, Homo sapiens
agggttcacttgcagacagcagagtctgccccggctagttacacagaggaggattgattaccggctttcagtgactcccagcatcactgcgggggcggggggtgctgaagaaattgaagacactccaggctgcctcccaaagccacacagcagaaaggggccaccaagaagctgagattctgtcgtcaccggagagccgcctgcctgcaggccagccctgcatgtgactgttgctgctgcgtgcacacccgctcagtgctgcccttcatcccacttcccctccccagcacaggaaggcgccccagagagaggctggaatacacactgtgtgagccagtctgcagactctgccagatgcctatggagacatccttgtgaaattagaatagctcttctcagtttatttatggaatcttcttgaagatcaaagatgcagcaccgctgttggttttggtttcccctattataacggagtctgaatgaaaggtggaacaaccctaagatcataatgctgttgatttaatgttggaagctcctccaaggaagggaccatgccatgcatttatttacattttacacaaaggctgtcaaatggggccatcctagtgcctgcgtgatagggcagctgtccttgaaatgaagtgatc

SEQ ID NO: 19763 - protein, 34 aa, Homo sapiens
LLLLRAHPLSAALHPTSPPQHRKAPQREAGIHTV

SEQ ID NO: 19764 - DNA, 401 bp, Homo sapiens
gagagtttaactggctaagaccaggccagtacatgagcgcaggcccaagatccgaaagggaaagtcctgaacgcccccttccccctgtcttttcggcggggctttgggagtttgcagggtgttctgagtgtttgggcctcagggattctcacctccgggagattccaggagctgtagggggtggaatgcgagtaggaggagagttgcagatggatatcgtggcctgctgatggttttggagcccaggtccagacatttcttgattgaagtagacattcaagaagtgtgaaatgcacagtcagaaaatctgggacttctctttttccttgtcagaatcaggattgaaaaatgattcagcggggaatagcttctttacagtgagagcccgtgttattgatttt

SEQ ID NO: 19765 - protein, 65 aa, Homo sapiens
MSAGPRSERESPERPLPPVFSAGLWEFAGCSECLGLRDSHLREIPGAVGGGMRVGGELQMDIVAC

SEQ ID NO: 19766 - DNA, 601 bp, Homo sapiens
tgcagaggagataagcaagtcctggggagaacatggacgtttggcagccagcgagaaagaaaggaggggaaggcctggagattggggtgacagcccttattggtgtcactgaaacgtgtgtggttaatctcagtccttgggatccacataaaaccacgtgaatgtgcttctcatctaataaattatatatgaaggatgctgaaagcagggccttggagagagatgtgtgtacccgtgttcacagttcacagcagcattcctccagttaccaagaggtggaagcaacccaaagtccatcgatggaaaaatggtaagcagatatagtatgaatagatacagacagtgggatattattctgctttagaaaggaaggaaattctgatacataccaccgcatggatgcaccttgaggacattatgctgagtgaaatgagccagtcacaaaagacaaatattgcatgattctatgtatgtgaggtccctagagtagtaatagagacagaaagtgcaatggtggtggccagtgatttcaaggagagcggaaaggagagttactgtttaatgggtgcagagtttccattttaaatgacaaaaagttcta

SEQ ID NO: 19767 - protein, 42 aa, Homo sapiens
MDVWQPARKKGGEGLEIGVTALIGVTETCVVNLSPWDPHKTT

SEQ ID NO: 19768 - DNA, 1040 bp, Homo sapiens
ggcagtaaaatgacatccacgtgttcctgtcggacgcagcggcttcgggaacaagttagcgctgggggactatctgggctcgtctctctctgcttcgtgaacccaccacaccagggcctgtctgctgtgctatttatttgccttccgtcttcccaacctcagctgcctgtattcatgccagaggtgcaaaggctgccagccagtgctgctgacagatgctttcagactgtagagctcagagaaagggagcggcagctagaggtagccagggagctggccaggctccccggggccttcctattatgtaaatcccagctggacagacagccctggagccaggtggccctgtcccctgtggagcacttggagcagtgatctgttgttccaggtgtaagtctcgacatgcactccagctggagtgacagagccaaactccgtcaaaaaaaaacaaaacaaaacaaaaaaaagacatgggagagatggtgtttttcctctccaccacctggggatacgatgagaagatggccacctgcaagccaggaagacggccctcaccagacaccatgtctgctggcaccttgatcttggacctcccagcctccagaactgtgagaaataaatgtgttttgtttaagctactcaagtctgtggtattcttgttaaggcagcccaagctgactaagacaccaaatcattcaaaacgttaattctttttctgttctttaagcttcccagaatgtacacaaacaatgctgttattaaaatttaaaggactcttggaactgtaggacatgatccagctaaaataaataacaaataacacagctaagcaaatacttataaatgtagctttaaatatttattttagttttaaataattagtggggtacgagacagttcacattcaagagacattttacttagacaaaaaatttataagagaacgatgcataaaaacaaacaacatattggtctgtttatttttctaagggaaaatggaattggagctgttgagaataaaacttgaagaatctaactgc

SEQ ID NO: 19769 - protein, 59 aa, Homo sapiens
MHSSWSDRAKLRQKKTKQNKKKTWERWCFSSPPPGDTMRRWPPASQEDGPHQTPCLLAP

SEQ ID NO: 19770 - DNA, 3049 bp, Homo sapiens
tacacaggacaactccatgtggttgattttactggcatgtcttggtgacgaagagttggccaagtgaatgatgcatcttttacttggagctctccagcctttgtcatagttcccagaccttttttccttgtggtcatccaggaggtgatcaattacatgtgcacagtgctaggacgggaggcagagccggctcagagcaggtccaccagcccacctatagcaggaagcgtgtcggtgcttaggaaatctaggacttccagcttccctcatgtcagatagaaaaaaagtcaggaaaccagctcgtggacaggggctttggttccaaaacttggacaaacctgatgccttaaggaaaaggttaagatgagaggggacttccagagtcaatgaacgtcacccttcagcggacggataccgggagcgcttgggcgaaacagcagagaaagaaagactgtggtcggggaagtggaatgcttcgatgcaggccagagttcaaggctctggggctggcctcacaagaggcttcttccacggggcttgacaccagagcagcccccgcgtgaaatgagaaggcatgcttagcactgggaggaaaagctgagttaagaaaattctttatcatgtttgccttccctggggaaacattcaggcagtaaaatgacatccacgtgttcctgtcggacgcagcggcttcgggaacaagttagcgctgggggactatctgggctcgtctctctctgcttcgtgaacccaccacaccagggcctgtctgctgtgctatttatttgccttccgtcttcccaacctcagctgcctgtattcatgccagaggtgcaaaggctgccagccagtgctgctgacagatgctttcagactgtagagctcagagaaagggagcggcagctagaggtagccagggagctggccaggctccccggggccttcctattatgtaaatcccagctggacagacagccctggagccaggtggccctgtcccctgtggagcacttggagcagtgatctgttgttccaggtgtaagtctcgacactgcagaaatgaggacgttattaggaaagaccagttcctactgcctgtgttgctactttaagagctgagaaaaacattccaatgagctatccatagctaacttgcttgctcagaaaaacataagtaacaaagttgagctttcatttttaaaaattatattttactttagaaaaatatcaccttttttcttcctcttctttacgtgtagatcttttttttttttttcaaatggggtcagtacctgaaagcccgaaaccccataccaagcttatagttaggacctttgcatttgataaaaaaaaaatatagtattttctgttgtccagaaaatcttcccagatagggaaactgaggcagagagtgccgtggagtggtttttgccaagtcatacaacatacttaatgcagggctacactgaacctccagaatcattttgtttgctttgaccctgtttcaccatctgggcaatcatttattttccttgagcatttataaaccagggcgagggttgttccaaaatgagtaattgaatgagatgaagaaatatgtcataattagaggagataaatctccttgttatcacaatagttaatgtgtcatgatcactgactaactgggaccttgaacaagtcagcatctctgcctttcaaaatgaaggaacattgttctctatcctcccctgacccccgacggccccatgctaggtgcaccatcttcctccatttgactttttaatgctttacaacttcaggctaaagggaggggatgttgggaggagaaaccatcacaagattccctcggtgccacagctgtgctgaggaggccggggactgggaatcggagtgggcacctctgtgtttctctagggagtaacattcaacatttaattgaatcgtgtgtcctgataggtggattaggaacaggattcattcctttaactttaacttttggctaaacgacatgccttggattgagtgtatatgtcttccccaaattcatatgttgaagcttaaatcctgaatgtgatggttcttggaattgggacctttggaaggttattgggtcttgagggcagagccctcacgaatgggattaaggcccttataagaagagacatggggccaggtgcagtggctcacacctgtaatcccaacattttgggaggccgagaagggtggatcatgaggtcaggagatggagaccatcctggccaacatggtgaaacctcgtctctactaaaaatacaaaaattagctgggcgtggtggtgcgtgcctgtagttccagctacttgggaggctgaggcaggagaatcgcttgaaccaggcagtcggaacttgtagtgagccaagatcacgccactgcactccagctggagtgacagagccaaactccgtcaaaaaaaaacaaaacaaaacaaaaaaaagacatgggagagatggtgtttttcctctccaccacctggggatacgatgagaagatggccacctgcaagccaggaagacggccctcaccagacaccatgtctgctggcaccttgatcttggacctcccagcctccagaactgtgagaaataaatgtgttttgtttaagctactcaagtctgtggtattcttgttaaggcagcccaagctgactaagacaccaaatcattcaaaacgttaattctttttctgttctttaagcttcccagaatgtacacaaacaatgctgttattaaaatttaaaggactcttggaactgtaggacatgatccagctaaaataaataacaaataacacagctaagcaaatacttataaatgtagctttaaatatttattttagttttaaataattagtggggtacgagacagttcacattcaagagacattttacttagacaaaaaatttataagagaacgatgcataaaaacaaacaacatattggtctgtttatttttctaagggaaaatggaattggagctgttgagaataaaacttgaagaatctaactgc

SEQ ID NO: 19771 - protein, 121 aa, Homo sapiens [sequence omitted]

SEQ ID NO: 19772 - DNA, 2646 bp, Homo sapiens
tacacaggacaactccatgtggttgattttactggcatgtcttggtgacgaagagttggccaagtgaatgatgcatcttttacttggagctctccagcctttgtcatagttcccagaccttttttccttgtggtcatccaggaggtgatcaattacatgtgcacagtgctaggacgggaggcagagccggctcagagcaggtccaccagcccacctatagcaggaagcgtgtcggtgcttaggaaatctaggacttccagcttccctcatgtcagatagaaaaaaagtcaggaaaccagctcgtggacaggggctttggttccaaaacttggacaaacctgatgccttaaggaaaaggttaagatgagaggggacttccagagtcaatgaacgtcacccttcagcggacggataccgggagcgcttgggcgaaacagcagagaaagaaagactgtggtcggggaagtggaatgcttcgatgcaggccagagttcaaggctctggggctggcctcacaagaggcttcttccacggggcttgacaccagagcagcccccgcgtgaaatgagaaggcatgcttagcactgggaggaaaagctgagttaagaaaattctttatcatgtttgccttccctggggaaacattcaggcagtaaaatgacatccacgtgttcctgtcggacgcagcggcttcgggaacaagttagcgctgggggactatctgggctcgtctctctctgcttcgtgaacccaccacaccagggcctgtctgctgtgctatttatttgccttccgtcttcccaacctcagctgcctgtattcatgccagaggtgcaaaggctgccagccagtgctgctgacagatgctttcagactgtagagctcagagaaagggagcggcagctagaggtagccagggagctggccaggctccccggggccttcctattatgtaaatcccagctggacagacagccctggagccaggtggccctgtcccctgtggagcacttggagcagtgatctgttgttccaggtgtaagtctcgacactgcagaaatgaggacgttattaggaaagaccagttcctactgcctgtgttgctactttaagagctgagaaaaacattccaatgagctatccatagctaacttgcttgctcagaaaaacataagtaacaaagttgagctttcatttttaaaaattatattttactttagaaaaatatcaccttttttcttcctcttctttacgtgtagatcttttttttttttttcaaatggggtcagtacctgaaagcccgaaaccccataccaagcttatagttaggacctttgcatttgataaaaaaaaaatatagtattttctgttgtccagaaaatcttcccagatagggaaactgaggcagagagtgccgtggagtggtttttgccaagtcatacaacatacttaatgcagggctacactgaacctccagaatcattttgtttgctttgaccctgtttcaccatctgggcaatcatttattttccttgagcatttataaaccagggcgagggttgttccaaaatgagtaattgaatgagatgaagaaatatgtcataattagaggagataaatctccttgttatcacaatagttaatgtgtcatgatcactgactaactgggaccttgaacaagtcagcatctctgcctttcaaaatgaaggaacattgttctctatcctcccctgacccccgacggccccatgctaggtgcaccatcttcctccatttgactttttaatgctttacaacttcaggctaaagggaggggatgttgggaggagaaaccatcacaagattccctcggtgccacagctgtgctgaggaggccggggactgggaatcggagtgggcacctctgtgtttctctagggagtaacattcaacatttaattgaatcgtgtgtcctgataggtggattaggaacaggattcattcctttaactttaacttttggctaaacgacatgccttggattgagtgtatatgtcttccccaaattcatatgttgaagcttaaatcctgaatgtgatggttcttggaattgggacctttggaaggttattgggtcttgagggcagagccctcacgaatgggattaaggcccttataagaagagacatggggccaggtgcagtggctcacacctgtaatcccaacattttgggaggccgagaagggtggatcatgaggtcaggagatggagaccatcctggccaacatggtgaaacctcgtctctactaaaaatacaaaaattagctgggcgtggtggtgcgtgcctgtagttccagctacttgggaggctgaggcaggagaatcgcttgaaccaggcagtcggaacttgtagtgagccaagatcacgccactgcactccagctggagtgacagagccaaactccgtcaaaaaaaaacaaaacaaaacaaaaaaaagacatgggagagatggtgtttttcctctccaccacctggggatacgatgagaagatggccacctgcaagccaggaagacggccctcaccagacaccatgtctgctggcaccttgatcttggacctcccagcctccagaactgtgagaaataaatgtgttttgtttaagct

SEQ ID NO: 19773 - protein, 121 aa, Homo sapiens [sequence omitted]

SEQ ID NO: 19774 - DNA, 2222 bp, Homo sapiens
ctgggcgctgcaaagcgtgtcccgccgggtccccgagcgtcccgcgccctcgccccgccatgctcctgctgctggggctgtgcctggggctgtccctgtgtgtggggtcgcaggaagaggcgcagagctggggccactcttcggagcagggaaaaccaaacctttgatgacagaattctcagtgaagtctaccatcatttcccgttatgccttcactacggtttcctgcagaatgctgaacagagcttctgaagaccaggacattgagttccagatgcagattccagctgcagctttcatcaccaacttcactatgcttattggagacaaggtgtatcagggcgaaattacagagagagaaaagaagagtggtgatagggtaaaagagaaaaggaataaaaccacagaagaaaatggagagaaggggactgaaatattcagagcttctgcagtgattcccagcaaggacaaagccgcctttttcctgagttatgaggagcttctgcagaggcgcctgggcaagtacgagcacagcatcagcgtgcggccccagcagctgtccgggaggctgagcgtggacgtgaatatcctggagagcgcgggcatcgcatccctggaggtgctgccgcttcacaacagcaggcagaggggcagtgggcgcggggaagatgattctgggcctcccccatctactgtcattaaccaaaatgaaacatttgccaacataatttttaaacctactgtagtacaacaagccaggattgcccagaatggaattttgggagactttatcattagatatgacgtcaatagagaacagagcattggggacatccaggttctaaatggctattttgtgcactactttgctcctaaagaccttcctcctttacccaagaatgtggtattcgtgcttgacagcagtgcttctatggtgggaaccaaactccggcagaccaaggatgccctcttcacaattctccatgacctccgaccccaggaccgtttcagtatcattggattttccaaccggatcaaagtatggaaggaccacttgatatcagtcactccagacagcatcagggatgggaaagtgtacattcaccatatgtcacccactggaggcacagacatcaacggggccctgcagagggccatcaggctcctcaacaagtacgtggcccacagtggcattggagaccggagcgtgtccctcatcgtcttcctgacggatgggaagcccacggtcggggagacgcacaccctcaagatcctcaacaacacccgagaggccgcccgaggccaagtctgcatcttcaccattggcatcggcaacgacgtggacttcaggctgctggagaaactgtcgctggagaactgtggcctcacacggcgcgtgcacgaggaggaggacgcaggctcgcagctcatcgggttctacgatgaaatcaggaccccgctcctctctgacatccgcatcgattatccccccagctcagtggtgcaggccaccaagaccctgttccccaactacttcaacggctcggagatcatcattgcggggaagctggtggacaggaagctggatcacctgcacgtggaggtcaccgccagcaacagtaagaaattcatcatcctgaagacagatgtgcctgtgcggcctcagaaggcagggaaagatgtcacaggaagccccaggcctggaggcgatggagagggggacaccaaccacatcgagcgtctctggagctacctcaccacaaaggagctgctgagctcctggctgcaaagtgacgatgaaccggagaaggagcggctgcggcagcgggcccaggccctggctgtgagctaccgcttcctcactcccttcacctccatgaagctgagggggccggtcccacgcatggatggcctggaggaggcccacggcatgtcggctgccatgggacccgaaccggtggtgcagagcgtgcgaggagctggcacgcagccaggacctttgctcaagaaagccaaactccgtcaaaaaaaaacaaaacaaaacaaaaaaaagacatgggagagatggtgtttttcctctccaccacctggggatacgatgagaagatggccacctgcaagccaggaagacggccctcaccagacaccatgtctgctggcaccttgatcttggacctcccagcctccagaactgtgagaaataaatgtgttttgtttaagct

SEQ ID NO: 19775 - protein, 666 aa, Homo sapiens
MTEFSVKSTIISRYAFTTVSCRMLNRASEDQDIEFQMQIPAAAFITNFTMLIGDKVYQGEITEREKKSGDRVKEKRNKTTEENGEKGTEIFRASAVIPSKDKAAFFLSYEELLQRRLGKYEHSISVRPQQLSGRLSVDVNILESAGIASLEVLPLHNSRQRGSGRGEDDSGPPPSTVINQNETFANIIFKPTVVQQARIAQNGILGDFIIRYDVNREQSIGDIQVLNGYFVHYFAPKDLPPLPKNVVFVLDSSASMVGTKLRQTKDALFTILHDLRPQDRFSIIGFSNRIKVWKDHLISVTPDSIRDGKVYIHHMSPTGGTDINGALQRAIRLLNKYVAHSGIGDRSVSLIVFLTDGKPTVGETHTLKILNNTREAARGQVCIFTIGIGNDVDFRLLEKLSLENCGLTRRVHEEEDAGSQLIGFYDEIRTPLLSDIRIDYPPSSVVQATKTLFPNYFNGSEIIIAGKLVDRKLDHLHVEVTASNSKKFIILKTDVPVRPQKAGKDVTGSPRPGGDGEGDTNHIERLWSYLTTKELLSSWLQSDDEPEKERLRQRAQALAVSYRFLTPFTSMKLRGPVPRMDGLEEAHGMSAAMGPEPVVQSVRGAGTQPGPLLKKAKLRQKKTKQNKKKTWERWCFSSPPPGDTMRRWPPASQEDGPHQTPCLLAP

SEQ ID NO: 19776 - DNA, 4136 bp, Homo sapiens
cgagagcgtcccgcagtggctggagccctgggcgctgcaaagcgtgtcccgccgggtccccgagcgtcccgcgccctcgccccgccatgctcctgctgctggggctgtgcctggggctgtccctgtgtgtggggtcgcaggaagaggcgcagagctggggccactcttcggagcaggatggactcagggtcccgaggcaagtcagactgttgcagaggctgaaaaccaaacctttgatgacagaattctcagtgaagtctaccatcatttcccgttatgccttcactacggtttcctgcagaatgctgaacagagcttctgaagaccaggacattgagttccagatgcagattccagctgcagctttcatcaccaacttcactatgcttattggagacaaggtgtatcagggcgaaattacagagagagaaaagaagagtggtgatagggtaaaagagaaaaggaataaaaccacagaagaaaatggagagaaggggactgaaatattcagagcttctgcagtgattcccagcaaggacaaagccgcctttttcctgagttatgaggagcttctgcagaggcgcctgggcaagtacgagcacagcatcagcgtgcggccccagcagctgtccgggaggctgagcgtggacgtgaatatcctggagagcgcgggcatcgcatccctggaggtgctgccgcttcacaacagcaggcagaggggcagtgggcgcggggaagatgattctgggcctcccccatctactgtcattaaccaaaatgaaacatttgccaacataatttttaaacctactgtagtacaacaagccaggattgcccagaatggaattttgggagactttatcattagatatgacgtcaatagagaacagagcattggggacatccaggttctaaatggctattttgtgcactactttgctcctaaagaccttcctcctttacccaagaatgtggtattcgtgcttgacagcagtgcttctatggtgggaaccaaactccggcagaccaaggatgccctcttcacaattctccatgacctccgaccccaggaccgtttcagtatcattggattttccaaccggatcaaagtatggaaggaccacttgatatcagtcactccagacagcatcagggatgggaaagtgtacattcaccatatgtcacccactggaggcacagacatcaacggggccctgcagagggccatcaggctcctcaacaagtacgtggcccacagtggcattggagaccggagcgtgtccctcatcgtcttcctgacggatgggaagcccacggtcggggagacgcacaccctcaagatcctcaacaacacccgagaggccgcccgaggccaagtctgcatcttcaccattggcatcggcaacgacgtggacttcaggctgctggagaaactgtcgctggagaactgtggcctcacacggcgcgtgcacgaggaggaggacgcaggctcgcagctcatcgggttctacgatgaaatcaggaccccgctcctctctgacatccgcatcgattatccccccagctcagtggtgcaggccaccaagaccctgttccccaactacttcaacggctcggagatcatcattgcggggaagctggtggacaggaagctggatcacctgcacgtggaggtcaccgccagcaacagtaagaaattcatcatcctgaagacagatgtgcctgtgcggcctcagaaggcagggaaagatgtcacaggaagccccaggcctggaggcgatggagagggggacaccaaccacatcgagcgtctctggagctacctcaccacaaaggagctgctgagctcctggctgcaaagtgacgatgaaccggagaaggagcggctgcggcagcgggcccaggccctggctgtgagctaccgcttcctcactcccttcacctccatgaagctgagggggccggtcccacgcatggatggcctggaggaggcccacggcatgtcggctgccatgggacccgaaccggtggtgcagagcgtgcgaggagctggcacgcagccaggacctttgctcaagaagccataccagccaagaattaaaatctctaaaacatcagtggatggtgatccccactttgttgtggatttccccctgagcagactcaccgtgtgcttcaacattgatgggcagcccggggacatcctcaggctggtctctgatcacagggactctggtgtcacagtgaacggagagttaattggggcacccgcccctccaaatggccacaagaaacagcgcacttacttgcgcactatcaccatcctcatcaacaagccagagagatcttatctcgagatcacaccgagcagagtcatcttggatggtggggacagactggtgctcccctgcaaccagagtgtggtggtggggagctgggggctggaggtgtccgtgtctgccaacgccaatgtcaccgtcaccatccagggctccatagcctttgtcatcctcatccacctctacaaaaagccggcgcccttccagcgacaccacctgggtttctacattgccaacagcgagggcctttccagcaactgccacggactgctgggtcagttcctgaatcaggatgccagactcacagaagaccctgcagggcccagccagaacctcactcaccctctgctccttcaggtgggagaggggcctgaggccgtcctaacagtgaaaggccaccaagtcccagtggtctggaagcaaaggaagatttacaacggggaagagcagatagactgctggtttgccaggaacaatgccgccaaactgattgacggggagtacaaggattacctggcattccatccatttgacacagggatggacacttggccggggaatgtccagggagctctgaagctggcagccttaaagatgcaagtgcatgaaggacagtgatgtggggaggccgtggggcagctcttttcatggcttgtacacgcctcagctcctggcaattagctggactccatgacccacccctggtgcagcatagatccgacgtctgtctgggcgaagggtaggggtgggtaggggcgggaagcctgagtgcaaatgtcatttccctctactgcctcttcctgcctctccccaccctgcccacatccacagaggggagagaagggtcatagctaaatgcaacaaagtctgtatcttgtcccaacctgcttttctgttctgttagcatatcataaagtaagcctttctggtgaaggaaggttgctatgaaactttttttcttggtggaaatggacaagtttaggcactctgctttttgccttacactaatgcttagaaagctgtcttttcagtggtgttgcagcccccagatgtgtggccaacctctgctgcaaaggaatctcttgctgagtccaggccaccaatcaggcaaatagcccatacatttgatcgttgtaaaccatgaagtcttttcttgcaagacgtttttcttctgctgtggtatcttgcccttaaaaattagttttcattaaaaagaaatttgattgaaaatagaaacatctacagctcagatactgatctctttctaatgggctttgtaaaccacttgactttgctaatggctattctccaatttgttccaataagctaagggcttttcatacacaggacaactccatgtggttgattttactggcatgtcttggtgacgaagagttggccaagtgaatgatgcatcttttacttggagctctccagcctttgtcatagttcccagaccttttttccttgtggtcatccaggaggtgatcaattacatgtgcacagtgctaggacgggaggcagagccggctcagagcaggtccaccagcccacctatagcaggaagcgtgtcggtgcttaggaaatctaggacttccagcttccctcatgtcagatagaaaaaaagtcaggaaaccagctcgtggacaggggctttggttccaaaacttggacaaacctgatgccttaaggaaaaggttaagatgagaggggacttccagagtcaatgaacgtcacccttcagcggacggataccgggagcgcttgggcgaaacagcagagaaagaaagactgtgg

SEQ ID NO: 19777 - protein, 956 aa, Homo sapiens
MLLLLGLCLGLSLCVGSQEEAQSWGHSSEQDGLRVPRQVRLLQRLKTKPLMTEFSVKSTIISRYAFTTVSCRMLNRASEDQDIEFQMQIPAAAFITNFTMLIGDKVYQGEITEREKKSGDRVKEKRNKTTEENGEKGTEIFRASAVIPSKDKAAFFLSYEELLQRRLGKYEHSISVRPQQLSGRLSVDVNILESAGIASLEVLPLHNSRQRGSGRGEDDSGPPPSTVINQNETFANIIFKPTVVQQARIAQNGILGDFIIRYDVNREQSIGDIQVLNGYFVHYFAPKDLPPLPKNVVFVLDSSASMVGTKLRQTKDALFTILHDLRPQDRFSIIGFSNRIKVWKDHLISVTPDSIRDGKVYIHHMSPTGGTDINGALQRAIRLLNKYVAHSGIGDRSVSLIVFLTDGKPTVGETHTLKILNNTREAARGQVCIFTIGIGNDVDFRLLEKLSLENCGLTRRVHEEEDAGSQLIGFYDEIRTPLLSDIRIDYPPSSVVQATKTLFPNYFNGSEIIIAGKLVDRKLDHLHVEVTASNSKKFIILKTDVPVRPQKAGKDVTGSPRPGGDGEGDTNHIERLWSYLTTKELLSSWLQSDDEPEKERLRQRAQALAVSYRFLTPFTSMKLRGPVPRMDGLEEAHGMSAAMGPEPVVQSVRGAGTQPGPLLKKPYQPRIKISKTSVDGDPHFVVDFPLSRLTVCFNIDGQPGDILRLVSDHRDSGVTVNGELIGAPAPPNGHKKQRTYLRTITILINKPERSYLEITPSRVILDGGDRLVLPCNQSVVVGSWGLEVSVSANANVTVTIQGSIAFVILIHLYKKPAPFQRHHLGFYIANSEGLSSNCHGLLGQFLNQDARLTEDPAGPSQNLTHPLLLQVGEGPEAVLTVKGHQVPVVWKQRKIYNGEEQIDCWFARNNAAKLIDGEYKDYLAFHPFDTGMDTWPGNVQGALKLAALKMQVHEGQ

SEQ ID NO: 19778 - DNA, 2937 bp, Homo sapiens
cgccttgtagacgtgttcgctttgcgtttgccttctgcgtgattgtaagtttcccgaggcttccccagccatgcggaactatgattctgggcctcccccatctactgtcattaaccaaaatgaaacatttgccaacataatttttaaacctactgtagtacaacaagccaggattgcccagaatggaattttgggagactttatcattagatatgacgtcaatagagaacagagcattggggacatccaggttctaaatggctattttgtgcactactttgctcctaaagaccttcctcctttacccaagaatgtggtattcgtgcttgacagcagtgcttctatggtgggaaccaaactccggcagaccaaggatgccctcttcacaattctccatgacctccgaccccaggaccgtttcagtatcattggattttccaaccggatcaaagtatggaaggaccacttgatatcagtcactccagacagcatcagggatgggaaagtgtacattcaccatatgtcacccactggaggcacagacatcaacggggccctgcagagggccatcaggctcctcaacaagtacgtggcccacagtggcattggagaccggagcgtgtccctcatcgtcttcctgacggatgggaagcccacggtcggggagacgcacaccctcaagatcctcaacaacacccgagaggccgcccgaggccaagtctgcatcttcaccattggcatcggcaacgacgtggacttcaggctgctggagaaactgtcgctggagaactgtggcctcacacggcgcgtgcacgaggaggaggacgcaggctcgcagctcatcgggttctacgatgaaatcaggaccccgctcctctctgacatccgcatcgattatccccccagctcagtggtgcaggccaccaagaccctgttccccaactacttcaacggctcggagatcatcattgcggggaagctggtggacaggaagctggatcacctgcacgtggaggtcaccgccagcaacagtaagaaattcatcatcctgaagacagatgtgcctgtgcggcctcagaaggcagggaaagatgtcacaggaagccccaggcctggaggcgatggagagggggacaccaaccacatcgagcgtctctggagctacctcaccacaaaggagctgctgagctcctggctgcaaagtgacgatgaaccggagaaggagcggctgcggcagcgggcccaggccctggctgtgagctaccgcttcctcactcccttcacctccatgaagctgagggggccggtcccacgcatggatggcctggaggaggcccacggcatgtcggctgccatgggacccgaaccggtggtgcagagcgtgcgaggagctggcacgcagccaggacctttgctcaagaagccataccagccaagaattaaaatctctaaaacatcagtggatggtgatccccactttgttgtggatttccccctgagcagactcaccgtgtgcttcaacattgatgggcagcccggggacatcctcaggctggtctctgatcacagggactctggtgtcacagtgaacggagagttaattggggcacccgcccctccaaatggccacaagaaacagcgcacttacttgcgcactatcaccatcctcatcaacaagccagagagatcttatctcgagatcacaccgagcagagtcatcttggatggtggggacagactggtgctcccctgcaaccagagtgtggtggtggggagctgggggctggaggtgtccgtgtctgccaacgccaatgtcaccgtcaccatccagggctccatagcctttgtcatcctcatccacctctacaaaaagccggcgcccttccagcgacaccacctgggtttctacattgccaacagcgagggcctttccagcaactgccacggactgctgggtcagttcctgaatcaggatgccagactcacagaagaccctgcagggcccagccagaacctcactcaccctctgctccttcaggtgggagaggggcctgaggccgtcctaacagtgaaaggccaccaagtcccagtggtctggaagcaaaggaagatttacaacggggaagagcagatagactgctggtttgccaggaacaatgccgccaaactgattgacggggagtacaaggattacctggcattccatccatttgacacagggatggacacttggccggggaatgtccagggagctctgaagctggcagccttaaagatgcaagtgcatgaaggacagtgatgtggggaggccgtggggcagctcttttcatggcttgtacacgcctcagctcctggcaattagctggactccatgacccacccctggtgcagcatagatccgacgtctgtctgggcgaagggtaggggtgggtaggggcgggaagcctgagtgcaaatgtcatttccctctactgcctcttcctgcctctccccaccctgcccacatccacagaggggagagaagggtcatagctaaatgcaacaaagtctgtatcttgtcccaacctgcttttctgttctgttagcatatcataaagtaagcctttctggtgaaggaaggttgctatgaaactttttttcttggtggaaatggacaagtttaggcactctgctttttgccttacactaatgcttagaaagctgtcttttcagtggtgttgcagcccccagatgtgtggccaacctctgctgcaaaggaatctcttgctgagtccaggccaccaatcaggcaaatagcccatacatttgatcgttgtaaaccatgaagtcttttcttgcaagacgtttttcttctgctgtggtatcttgcccttaaaaattagttttcattaaaaagaaatttgattgaaaatagaaacatctacagctcagatactg

SEQ ID NO: 19779 - protein, 742 aa, Homo sapiens
MRNYDSGPPPSTVINQNETFANIIFKPTVVQQARIAQNGILGDFIIRYDVNREQSIGDIQVLNGYFVHYFAPKDLPPLPKNVVFVLDSSASMVGTKLRQTKDALFTILHDLRPQDRFSIIGFSNRIKVWKDHLISVTPDSIRDGKVYIHHMSPTGGTDINGALQRAIRLLNKYVAHSGIGDRSVSLIVFLTDGKPTVGETHTLKILNNTREAARGQVCIFTIGIGNDVDFRLLEKLSLENCGLTRRVHEEEDAGSQLIGFYDEIRTPLLSDIRIDYPPSSVVQATKTLFPNYFNGSEIIIAGKLVDRKLDHLHVEVTASNSKKFIILKTDVPVRPQKAGKDVTGSPRPGGDGEGDTNHIERLWSYLTTKELLSSWLQSDDEPEKERLRQRAQALAVSYRFLTPFTSMKLRGPVPRMDGLEEAHGMSAAMGPEPVVQSVRGAGTQPGPLLKKPYQPRIKISKTSVDGDPHFVVDFPLSRLTVCFNIDGQPGDILRLVSDHRDSGVTVNGELIGAPAPPNGHKKQRTYLRTITILINKPERSYLEITPSRVILDGGDRLVLPCNQSVVVGSWGLEVSVSANANVTVTIQGSIAFVILIHLYKKPAPFQRHHLGFYIANSEGLSSNCHGLLGQFLNQDARLTEDPAGPSQNLTHPLLLQVGEGPEAVLTVKGHQVPVVWKQRKIYNGEEQIDCWFARNNAAKLIDGEYKDYLAFHPFDTGMDTWPGNVQGALKLAALKMQVHEGQ

SEQ ID NO: 19780 - DNA, 3595 bp, Homo sapiens
cgagagcgtcccgcagtggctggagccctgggcgctgcaaagcgtgtcccgccgggtccccgagcgtcccgcgccctcgccccgccatgctcctgctgctggggctgtgcctggggctgtccctgtgtgtggggtcgcaggaagaggcgcagagctggggccactcttcggagcaggatggactcagggtcccgaggcaagtcagactgttgcagaggctgaaaaccaaacctttgatgacagaattctcagtgaagtctaccatcatttcccgttatgccttcactacggtttcctgcagaatgctgaacagagcttctgaagaccaggacattgagttccagatgcagattccagctgcagctttcatcaccaacttcactatgcttattggagacaaggtgtatcagggcgaaattacagagagagaaaagaagagtggtgatagggtaaaagagaaaaggaataaaaccacagaagaaaatggagagaaggggactgaaatattcagagcttctgcagtgattcccagcaaggacaaagccgcctttttcctgagttatgaggagcttctgcagaggcgcctgggcaagtacgagcacagcatcagcgtgcggccccagcagctgtccgggaggctgagcgtggacgtgaatatcctggagagcgcgggcatcgcatccctggaggtgctgccgcttcacaacagcaggcagaggggcagtgggcgcggggaagatgattctgggcctcccccatctactgtcattaaccaaaatgaaacatttgccaacataatttttaaacctactgtagtacaacaagccaggattgcccagaatggaattttgggagactttatcattagatatgacgtcaatagagaacagagcattggggacatccaggttctaaatggctattttgtgcactactttgctcctaaagaccttcctcctttacccaagaatgtggtattcgtgcttgacagcagtgcttctatggtgggaaccaaactccggcagaccaaggatgccctcttcacaattctccatgacctccgaccccaggaccgtttcagtatcattggattttccaaccggatcaaagtatggaaggaccacttgatatcagtcactccagacagcatcagggatgggaaagtgtacattcaccatatgtcacccactggaggcacagacatcaacggggccctgcagagggccatcaggctcctcaacaagtacgtggcccacagtggcattggagaccggagcgtgtccctcatcgtcttcctgacggatgggaagcccacggtcggggagacgcacaccctcaagatcctcaacaacacccgagaggccgcccgaggccaagtctgcatcttcaccattggcatcggcaacgacgtggacttcaggctgctggagaaactgtcgctggagaactgtggcctcacacggcgcgtgcacgaggaggaggacgcaggctcgcagctcatcgggttctacgatgaaatcaggaccccgctcctctctgacatccgcatcgattatccccccagctcagtggtgcaggccaccaagaccctgttccccaactacttcaacggctcggagatcatcattgcggggaagctggtggacaggaagctggatcacctgcacgtggaggtcaccgccagcaacagtaagaaattcatcatcctgaagacagatgtgcctgtgcggcctcagaaggcagggaaagatgtcacaggaagccccaggcctggaggcgatggagagggggacaccaaccacatcgagcgtctctggagctacctcaccacaaaggagctgctgagctcctggctgcaaagtgacgatgaaccggagaaggagcggctgcggcagcgggcccaggccctggctgtgagctaccgcttcctcactcccttcacctccatgaagctgagggggccggtcccacgcatggatggcctggaggaggcccacggcatgtcggctgccatgggacccgaaccggtggtgcagagcgtgcgaggagctggcacgcagccaggacctttgctcaagaagccataccagccaagaattaaaatctctaaaacatcagtggatggtgatccccactttgttgtggatttccccctgagcagactcaccgtgtgcttcaacattgatgggcagcccggggacatcctcaggctggtctctgatcacagggactctggtgtcacagtgaacggagagttaattggggcacccgcccctccaaatggccacaagaaacagcgcacttacttgcgcactatcaccatcctcatcaacaagccagagagatcttatctcgagatcacaccgagcagagtcatcttggatggtggggacagactggtgctcccctgcaaccagagtgtggtggtggggagctgggggctggaggtgtccgtgtctgccaacgccaatgtcaccgtcaccatccagggctccatagcctttgtcatcctcatccacctctacaaaaagccggcgcccttccagcgacaccacctgggtttctacattgccaacagcgagggcctttccagcaactgccacggactgctgggtcagttcctgaatcaggatgccagactcacagaagaccctgcagggcccagccagaacctcactcaccctctgctccttcaggtgggagaggggcctgaggccgtcctaacagtgaaaggccaccaagtcccagtggtctggaagcaaaggaagatttacaacggggaagagcagatagactgctggtttgccaggaacaatgccgccaaactgattgacggggagtacaaggattacctggcattccatccatttgacacagggatggacacttggccggggaatgtccagggagctctgaagctggcagccttaaagatgcaagtgcatgaaggacagtgatgtggggaggccgtggggcagctcttttcatggcttgtacacgcctcagctcctggcaattagctggactccatgacccacccctggtgcagcatagatccgacgtctgtctgggcgaagggtaggggtgggtaggggcgggaagcctgagtgcaaatgtcatttccctctactgcctcttcctgcctctccccaccctgcccacatccacagaggggagagaagggtcatagctaaatgcaacaaagtctgtatcttgtcccaacctgcttttctgttctgttagcatatcataaagtaagcctttctggtgaaggaaggttgctatgaaactttttttcttggtggaaatggacaagtttaggcactctgctttttgccttacactaatgcttagaaagctgtcttttcagtggtgttgcagcccccagatgtgtggccaacctctgctgcaaaggaatctcttgctgagtccaggccaccaatcaggcaaatagcccatacatttgatcgttgtaaaccatgaagtcttttcttgcaagacgtttttcttctgctgtggtatcttgcccttaaaaattagttttcattaaaaagaaatttgattgaaaatagaaacatctacagctcagatactg

SEQ ID NO: 19781 - protein, 956 aa, Homo sapiens; identical to SEQ ID NO: 19777

SEQ ID NO: 19782 - DNA, 1370 bp, Homo sapiens
gtttgggtagatttataggtgtttaatagccatagtcaaagcacatttattaatgataaatggaaatggagacacctaaggtgtgcagtaaagacaggtcctcggtttgggattcgccaccgtttcctcccacgcattttaatgaaagatttaaatgaaaacacagatttgctttccacattttaaaaattattcaaaactagagtcaaaggggagaatctgatacactggataacagaattgaaattcaataaggcattcagaagcaaaagcagttatgctgtaacaagtcagctgcactgccatcccactgaaactatgatcgatacctggcatttatgagaacttatgatacaccaggaacttcgatgtgcatcatcccagatgatcctcacagaaatcctaggaggttctacgatgaaatcaggaccccgctcctctctgacatccgcatcgattatccccccagctcagtggtgcaggccaccaagaccctgttccccaactacttcaacggctcggagatcatcattgcggggaagctggtggacaggaagctggatcacctgcacgtggaggtcaccgccagcaacagtaagaaattcatcatcctgaagacagatgtgcctgtgcggcctcagaaggcagggaaagatgtcacaggaagccccaggcctggaggcgatggagagggggacaccaaccacatcgagcgtctctggagctacctcaccacaaaggagctgctgagctcctggctgcaaagtgacgatgaaccggagaaggagcggctgcggcagcgggcccaggccctggctgtgagctaccgcttcctcactcccttcacctccatgaagctgagggggccggtcccacgcatggatggcctggaggaggcccacggcatgtcggctgccatgggacccgaaccggtggtgcagagcgtgcgaggagctggcacgcagccaggacctttgctcaagaagccataccagccaagaattaaaatctctaaaacatcaggtaaagcaaaggatgcggttgtgtgtggattgagagtaagagatgtttaaaaagtgtaaaaccaggccaggtgtactggctcacgcctgtaatcccagcactttgggaggccgaggtgggtgtattgcttgaggtcaggagttcaagaccagcctggccaacatggtgaaacctcgtctctactaaaaatacaaaaattagccaggcatggtggcaggggcctgtagttccagctactggggaggctgaggcaggagaatcacttgaacctgggaagttgaggttacagtgagccgagattgtgccaccacactctagcctggactacaagagtgaaactctgtctc

SEQ ID NO: 19783 - protein, 244 aa, Homo sapiens
MRTYDTPGTSMCIIPDDPHRNPRRFYDEIRTPLLSDIRIDYPPSSVVQATKTLFPNYFNGSEIIIAGKLVDRKLDHLHVEVTASNSKKFIILKTDVPVRPQKAGKDVTGSPRPGGDGEGDTNHIERLWSYLTTKELLSSWLQSDDEPEKERLRQRAQALAVSYRFLTPFTSMKLRGPVPRMDGLEEAHGMSAAMGPEPVVQSVRGAGTQPGPLLKKPYQPRIKISKTSGKAKDAVVCGLRVRDV

SEQ ID NO: 19784 - DNA, 731 bp, Homo sapiens
atttgtcccaattttgaacaaagttagagagttttttcttcttttttcttctttcttaaagcgaactgtactcctctgctgttcctttgaacttggttcagtaggaagaagtgatatcctccccagaccatctgctttggggagcttggcaaaactgtccagcaaaatgaaaagactcacgtgctttttcatctgcttctttctttctgaagtatcaggcttcgaaatccccataaatggactttctgaatttgtagactatgaagatcttgtggaactggccccaggcaaatttcaattggtggcagagaaccggagatatcagagaagccttccaggagaatcggaagaaatgatggaagaggttgatcaagtaactctttatagctataaagtccagtctactattacttctcggatggccaccaccatgatccagagcaaagtggtgaacaattccccgcagcctcagaatgtcgtgtttgatgttcagatccccaaaggagcattcatttccaacttctccatgactgtggacggcaagacatttaggagctctattaaggagaaaactgtgggccgagctctttatgcacaggccagagcaaaaggcaagacggctggcttggtgaggtaaggcctgagtgagcaaggcttgcccttgcctctcaatgacggtttcctctcctacttccttcccacagcagcaaagcagcctctggaaaggcaca

SEQ ID NO: 19785 - protein, 156 aa, Homo sapiens
MKRLTCFFICFFLSEVSGFEIPINGLSEFVDYEDLVELAPGKFQLVAENRRYQRSLPGESEEMMEEVDQVTLYSYKVQSTITSRMATTMIQSKVVNNSPQPQNVVFDVQIPKGAFISNFSMTVDGKTFRSSIKEKTVGRALYAQARAKGKTAGLVR

SEQ ID NO: 19786 - DNA, 444 bp, Homo sapiens
atttgtcccaattttgaacaaagttagagagttttttcttcttttttcttctttcttaaagcgaactgtactcctctgctgttcctttgaacttggttcagtaggaagaagtgatatcctccccagaccatctgctttggggagcttggcaaaactgtccagcaaaatgaaaagactcacgtgctttttcatctgcttctttctttctgaagtatcaggcttcgaaatccccataaatggactttctgaatttgtagactatgaagatcttgtggaactggccccaggcaaatttcaattggtggcagagaaccggagatatcagagaagccttccaggagaatcggaagaaatgatggaagaggttgatcaagtaactctttatagctataaagtccagtctactattacttcatcgtgtttggaagaagcatcccgtcaatg

SEQ ID NO: 19787 - protein, 91 aa, Homo sapiens
MKRLTCFFICFFLSEVSGFEIPINGLSEFVDYEDLVELAPGKFQLVAENRRYQRSLPGESEEMMEEVDQVTLYSYKVQSTITSSCLEEASR

SEQ ID NO: 19788 - DNA, 3193 bp, Homo sapiens
atttgtcccaattttgaacaaagttagagagttttttcttcttttttcttctttcttaaagcgaactgtactcctctgctgttcctttgaacttggttcagtaggaagaagtgatatcctccccagaccatctgctttggggagcttggcaaaactgtccagcaaaatgaaaagactcacgtgctttttcatctgcttctttctttctgaagtatcaggcttcgaaatccccataaatggactttctgaatttgtagactatgaagatcttgtggaactggccccaggcaaatttcaattggtggcagagaaccggagatatcagagaagccttccaggagaatcggaagaaatgatggaagaggttgatcaagtaactctttatagctataaagtccagtctactattacttctcggatggccaccaccatgatccagagcaaagtggtgaacaattccccgcagcctcagaatgtcgtgtttgatgttcagatccccaaaggagcattcatttccaacttctccatgactgtggacggcaagacatttaggagctctattaaggagaaaactgtgggccgagctctttatgcacaggccagagcaaaaggcaagacggctggcttggtgaggagcagcgctcttgatatggaaaacttcagaacggaagtaaatgtcctcccaggagcaaaggtgcagttcgaacttcactaccaggaggtgaagtggaggaagctgggctcctatgagcacaggatctatctgcaacctggacggctggccaaacacttagaggtagatgtgtgggttatcgaaccacagggactgagatttcttcatgttcccgacacatttgaaggccatttcgatggtgttccggtcatttctaaaggacaacagaaggcgcacgtctccttcaagcccacggtagcacagcagagaatatgccctaactgccgggagactgcggtagatggggaactggtggtgctgtatgacgtgaaaagagaagagaaggctggtgaactggaggtgtttaatggatattttgtccacttctttgctcctgacaacctggacccaattcccaaaaacatcctctttgtcatcgatgtgagtggctccatgtggggagttaaaatgaaacaaactgtggaagcaatgaagaccatattggatgacctcagagcagaagaccatttctctgtgattgatttcaaccagaacattcgaacttggagaaatgatttaatttcagctacaaaaacacaggttgcagatgccaagaggtatattgagaaaatccagcccagtggaggcacaaacatcaacgaagcactcctacgggcaatcttcattttgaatgaagccaataacttgggactgttagaccccaactccgtctcgctgatcattttggtttctgatggagatccaacagtgggcgaactaaaactgtcaaaaattcagaaaaacgttaaggagaacatccaagacaatatctccttgttcagtttgggcatgggatttgatgtggactatgattttttgaagagactgtccaatgaaaaccatggaattgcacaaaggatttatggaaaccaggacacgtcttcccagcttaagaaattctacaaccaggtctccactccattgctccggaatgttcagttcaactatccccatacatcagtcacggacgtcactcaaaacaatttccataactactttggaggctcagagattgtggtggcaggaaaatttgaccctgctaaattggatcaaatagagagcgttatcacggcgacttcggctaacacgcagttagtcttggagaccctggcccagatggacgacttgcaggattttctatcgaaagacaagcatgcagatcccgatttcaccaggaaactgtgggcctatctaaccatcaaccaactgctagctgaacgaagcctggctcctacagctgccgccaagagaagaattacaagatcgatcctgcagatgtctctagaccaccacattgtgactccgctgacctcgctggtgatcgagaacgaggctggggatgagcgcatgctggcggatgccccaccgcaggatccctcctgctgctcaggggccctgtattacggcagcaaagtggttccagattccaccccgtcttgggccaatccttcaccaacgcccgtgatctccatgctggcacaaggatctcaggtgctagagtccacgccacccccacatgtgatgagagttgaaaatgacccacatttcatcatttatctaccaaaaagccaaaagaacatttgtttcaatattgactcagaacctggaaaaatcctcaacctggtttctgacccagaatcaggaattgtagtcaacggtcagcttgttggtgccaagaagcccaacaatggaaaactaagcacctattttggaaaactgggattttatttccaaagtgaagacataaaaatagaaatcagcactgagaccatcaccctgagccatggttctagcacattctccttgtcctggtccgacacggctcaagtcacgaatcagagggtgcagatctcagtgaagaaagaaaaagtggtaactatcaccctggataaagagatgtccttttctgttttacttcatcgtgtttggaagaagcatcccgtcaatgttgactttctgggaatctacataccccctacaaacaagttctcacctaaagcccacggactaataggccagttcatgcaggaaccaaagatacacatcttcaatgagagaccaggaaaggaccctgagaagccagaggccagcatggaagtgaaggggcagaagctgatcatcaccaggggcttacagaaagactacagaacggatctagtgtttggaacggacgttacctgctggtttgtgcacaacagtggaaaaggattcattgacgggcattacaaggattacttcgtgcctcagctctacagctttctcaaacggccttaaaggtttatagtttgggaaattatatatattaatatacatctttcccctgtcacttttgcagatattcttcggtttgaataattaaaatgaaccagatatcagggtggttaattaaaatgaaccagatatcagggtggtttataaagcctgtaaacacacctaagaaaataaacattttacaaatga

SEQ ID NO: 19789 - protein, 946 aa, Homo sapiens; identical to SEQ ID NO: 2475

SEQ ID NO: 19790 - DNA, 496 bp, Homo sapiens
tgcaggctctgtctcaaagctttgcacgaggccatgctcatctttttcttcaattatttgatatcgcaagctgactatccacaacaactccccaatcccttaggctgattgtgcaacatctcaccttgcttacttatttatttcttttcttttgaaatgaaatttcactctatcaccctggatagagtgaagtgcagtggcgtgatctcgctcactgcaacatccacctcccaggtctaagcaattttcctgcctcagcctcccaagcagctgggattataggcacccaccaccacacctggctaatttttgtatttttaggagagacagggctcactacaacctccacctcccaggtctaagcaattttcctgcctcagcctccggagcagctgggattataggcacccaccaccacgcccggctaatttttgtatttttaggatgagctgagatcacaccactgcactacagcctgggcagcagagcgagaccc

SEQ ID NO: 19791 - protein, 80 aa, Homo sapiens
SRSLQHPPPRSKQFSCLSLPSSWDYRHPPPHLANFCIFRRDRAHYNLHLPGLSNFPASASGAAGIIGTHHHARLIFVFLG

SEQ ID NO: 19792 - DNA, 3218 bp, Homo sapiens
gtagctgggactacaggcatgcactaccatgcctggctaatttttttgatttttagtagagatgaggtcttgctatgttgcccaggctggtctcaaactcttgagctcaagcaatcctcctgcctcggccttctaaaatgttgtgattacaggtgtgagctaccacgccttgcctgagttgatcttctacaagagttcaaacaaaaaacagaccataccaggatgatcacttcaaacatgaggatgggtataagctgacgtcagacacaggtatggtgccaaaccctgggatctctctctttaactgagagtcagggagggctgattgcttctattctcagaagatgggagaacgtatgctgttagcagaaatgtaagaggcagtaaagaaatactaataggatgatggcagaagctttacagaaaatgttcctcagggatgaattaaggtttttccaaagtaacctgacagcacattatggaaagcaactgggttttgggtgtgggcagtctttagatcaaattctggcagttctgttcattggctttgtaatattagaatgttaatgttcttgaattgcaatgtttttaatgtataaattgtcaaaatgtttttcagcagggttgatgggagacctacagaaaatacatataaatcatcagacatgaagtccagcacatagtaggtattgaataaatggcagtgagtggtcatgtccagaaatgaagccaagaagttgagcctggactactaagaatctggtctgaagaatttcaaaaaggagaatggttctccctgataacaaatagtgatgagtaaaaccagacaaattacatatgcctcccccaagtatgtacgtttggaatcaacttggtggttttcttcagagaaaaaatgtttcatgtctgcctcccacatttaattctccaacgtctttctgaaattatttcagaatgaaatgaggcagcatacttgaggttaaattcaataaaaaatatctgaagcataaaaatacgattatagacttcacagtagttttttccctctgagtctgtagaacttgatagagtttatgctaagcaaaatgactgcagataactaacaacaggtctcatattagactttgatttttgaagtatcataagctatttttctttatttcaaacatagactttactttttagagcagtctctgtgggttttgacaaatgtataatgacatgcatctgccactgtagtatcacacagaacagtttcactgccctagaagtttcctgtgttctgtctgttccctgtctccccccaaatccctgctgaccgctgatctttttactgtctccctagttttgtctccatcgaaggtcatatagttggagtcacacagggtgtagctttttcagattggcttctttcacctggtagaacatatgcatgtaaggttcctccatgttgttttggttaggtttttgtggctcgatagcgcacttcattttagcactgcatattctattgtctgaatgcaccacagtttatgcactcacctactgaaggatatcttggttgcttacaaggtttggaaattatgagtaaagctgctacaaacatctgtgcgcaggttttttgtggatagacgttttcaacttatttacgtaacgaccaaagagcacaattgctggatcatatgccaggagtcttctgagaaactaccaacctgtcttccagagtgactgtaccattttgtattcaaacgagcagtgaatgagagttcctgctgctctgcatctccgtcagcatttgatgttgtcagtgttctggattttggccatcttaatagctgtacagtgggatcttgtcattgctttaatttgcatttctttgatgaagtatgatgtggagcatcttttcatgggcttatttgccacctgtatatcttctctggtgagatgtctttcaggttttttgcccattatttaattgggttactcattttcttattgttgaattttaagagttgtttgtatatttcagttgtgttctttatcgaatgtgtcttttgcaagtattttctctcagtcagtggcctgtcttctcattttgttttaagctattcttttttaacaccccaagattttcatcgttattttaagaccactgtgcacacataaaatactaaaagctaaacttaatatctgcaggtagaagttttaaattcaagattttaaccaaataacagagttaatgctaaaatctcacttttgaagtttatgttgaatattagcattctaatatttaatatttttctatttttgaaataggaaatggaaaagatgcagtaggtttttcaaaagggtatcataggtgagcacttcttatagaagaagaaaactaagaggtagtgctatttacctcttcagcactaagtttatctttatttttatttatttctataaagagatgggagtctcactgtgttgcttaggctggtcttgaactcctggcctccagtgatgctcctgccttggcctccgagagtgctgggattataggcatgaggcaccacacccagccagtaatctttagcttctagaaacaatcagatttccttaagattttgcaattaggtttagaggagctcacttgctttttcaaatatgggttggatatgtccaaaaaaagagttttgcctctacaatgaaaaatgatttttaccagattatggaaaggaagattcataaaaatgtgcctttaaaaagcttttttaaagtgcaagttcaccaatttgacttttgaaaatacgttcattttaggaattgattttttaaggaaagttgtaaacacagcaaagcacagaattacactggttcagacttgcatcttagcaccaaaatccactatacaaatgcagacagcataaagtaacctagtttcgctttaaatttgttgcttattttattctcccttataaatgtcattggtcttttgttagaacataatttactactttattttgaaataaagtctaagatttagcatgtaagtggtattactcagaaatggtttaaatgcaaatgaaataacagttctaccaggagtactaaaaaagatgctgtgttcaaggtatattaaatttgtgtgaaacttgattcacagacacagagggcttccagagaatttggaactatgattcagaattcatttagcaacattaacaatgtgt

SEQ ID NO: 19793 - protein, 73 aa, Homo sapiens
MSFRFFAHYLIGLLIFLLLNFKSCLYISVVFFIECVFCKYFLSVSGLSSHFVLSYSFLTPQDFHRYFKTTVHT

SEQ ID NO: 19794 - DNA, 2081 bp, Homo sapiens
ggctggctgagtactggggtccagaaagtgatcgctgccgtggtcgccatggggaagtcggattttcttactcccaaggctatcgccaacaggatcaagtccaaggggctgcagaagctacgctggtattgccagatgtgccagaagcagtgccgggacgagaatggctttaagtgtcattgtatgtccgaatctcatcagagacaactattgctggcttcagaaaatcctcagcagtttatggattatttttcagaggaattccgaaatgactttctagaacttctcaggagacgctttggcactaaaagggtccacaacaacattgtctacaacgaatacatcagccaccgagagcacatccacatgaatgccactcagtgggaaactctgactgattttactaagtggctgggcagagaaggcttgtgcaaagtggacgagacaccaaaaggctggtatattcagtacatagacagggacccagaaactatccgccggcaactggaactggagaaaaagaaaaagcaggaccttgatgatgaagaaaaaactgccaaatttattgaagagcaagtgagaagaggcctggaagggaaggaacaggaggtccctacttttacggaattaagcagagaaaatgatgaagagaaagtcacgtttaatttgagtaaaggagcatgtagctcatccggagcaacatcttccaagtcaagtactctgggaccgagtgcactgaagacgataggaagttcagcatcagtgaaacgaaaagaatcttcccagagctcaactcagtctaaagaaaagaagaaaaagaaatctgcactggatgaaatcatggagattgaagaggaaaagaaaagaactgcccgaacagactactggctacagcctgaaattattgtgaaaattataaccaagaaactgggagagaaatatcataagaaaaaggctattgttaaggaagtaattgacaaatatacagctgttgtgaagatgattgattctggagacaagctgaaacttgaccagactcatttagagacagtaattccagcaccaggaaaaagaattctagttttaaatggaggctacagaggaaatgaaggtaccctagaatccatcaatgagaagactttttcagctactatcgtcattgaaactggccctttaaaaggacgcagagttgaaggaattcaatatgaagacatttctaaacttgcctgagtttgaaaatttgttaacaatacattaaaatcttaaagcatcaaattggtgttcgccaaggcattatgagactctactgtgttagggtatattcttttgtataaaacaaacaggtttttgaaaatattactgtatagttgttcagctaaactttgagaagaatttaattatgtctcatgaggtatcaaactatgtaattttgtccttgttatttttgtttcctttgtaatttacttgatgagtttatatcttcattaaagaatgttattataaagtgttttatctatgacaatttagaatcatgtaattggaggaaatccttcatacactctatattttcagtagtagagtagtaaagttgaactctaagtgtgactaaattttaaatgtcaaactataaatatagaagcagctttattgtggtaataattcatataccatacagttcactcatttaaaatatacatacaattcagtggtttttagtatttttgcagaattgtgcagccatcaccactgtctgattttaaaacactttcataccccaaaatgaaaccctttaatagtcaatcgctatttttcccctctgccctagccctagacagccactaatgtactttctgtctctatggatttgccctttctggacatttcttataaatggaatcatataatatgtgatcttttatgactggcttcttacacttagcatcatgttttcaaggtttatccatgcagtagcatgtaggcgtgcttcatttgtttttatggctgcttaatattccactgtatggatgtaccgtattttgtttgtccattcatcagctgataaacatttagattgtttctac

SEQ ID NO: 19795 - protein, 393 aa, Homo sapiens; identical to SEQ ID NO: 2477

SEQ ID NO: 19796 - DNA, 957 bp, Homo sapiens
agaaaaagggttttgttttttattatgtttattcagtgtagtacattttgctgtaacaagttagaagaaaagtggagatatttcttcacattaatttttatattcttttccatcataggaaaaagaattctagttttaaatggaggctacagaggaaatgaaggtaccctagaatccatcaatgagaagactttttcagctactatcgtcattgaaactggccctttaaaaggacgcagagttgaaggaattcaatatgaagacatttctaaacttgcctgagtttgaaaatttgttaacaatacattaaaatcttaaagcatcaaattggtgttcgccaaggcattatgagactctactgtgttagggtatattcttttgtataaaacaaacaggtttttgaaaatattactgtatagttgttcagctaaactttgagaagaatttaattatgtctcatgaggtatcaaactatgtaattttgtccttgttatttttgtttcctttgtaatttacttgatgagtttatatcttcattaaagaatgttattataaagtgttttatctatgacaatttagaatcatgtaattggaggaaatccttcatacactctatattttcagtagtagagtagtaaagttgaactctaagtgtgactaaattttaaatgtcaaactataaatatagaagcagctttattgtggtaataattcatataccatacagttcactcatttaaaatatacatacaattcagtggtttttagtatttttgcagaattgtgcagccatcaccactgtctgattttaaaacactttcataccccaaaatgaaaccctttaatagtcaatcgctatttttcccctctgccctagccctagacagccactaatgtactttctgtctctatggatttgccctttctggacatttcttataaatggaatcatataat

SEQ ID NO: 19797 - protein, 85 aa, Homo sapiens
MFIQCSTFCCNKLEEKWRYFFTLIFIFFSIIGKRILVLNGGYRGNEGTLESINEKTFSATIVIETGPLKGRRVEGIQYEDISKLA

SEQ ID NO: 19798 - DNA, 1108 bp, Homo sapiens
actggctggtctttcagctgaataggagttgtgtctgtttgcttcctagattgaagaggaaaagaaaagaactgcccgaacagactactggctacagcctgaaattattgtgaaaattataaccaagaaactgggagagaaatatcataagaaaaaggctattgttaaggaagtaattgacaaatatacagctgttgtgaagatgattgattctggagacaagctgaaacttgaccagactcatttagagacagtaattccagcaccaggaaaaagaattctagttttaaatggaggctacagaggaaatgaaggtaccctagaatccatcaatgagaagactttttcagctactatcgtcattgaaactggccctttaaaaggacgcagagttgaaggaattcaatatgaagacatttctaaacttgcctgagtttgaaaatttgttaacaatacattaaaatcttaaagcatcaaattggtgttcgccaaggcattatgagactctactgtgttagggtatattcttttgtataaaacaaacaggtttttgaaaatattactgtatagttgttcagctaaactttgagaagaatttaattatgtctcatgaggtatcaaactatgtaattttgtccttgttatttttgtttcctttgtaatttacttgatgagtttatatcttcattaaagaatgttattataaagtgttttatctatgacaatttagaatcatgtaattggaggaaatccttcatacactctatattttcagtagtagagtagtaaagttgaactctaagtgtgactaaattttaaatgtcaaactataaatatagaagcagctttattgtggtaataattcatataccatacagttcactcatttaaaatatacatacaattcagtggtttttagtatttttgcagaattgtgcagccatcaccactgtctgattttaaaacactttcataccccaaaatgaaaccctttaatagtcaatcgctatttttcccctctgccctagccctagacagccactaatgtactttctgtctctatggatttgccctttctggacatttcttataaatggaatcatataat

SEQ ID NO: 19799 - protein, 76 aa, Homo sapiens [sequence omitted]

SEQ ID NO: 19800 - DNA, 1491 bp, Homo sapiens
tttcaaacagggagccccctgtttgctaccaggctgtatacttaaccacactgtgctacattgatccatgtgttatgattttactgcatgaaaacgtggcctcttttccagctcctgacagtcacatgggagaaagtgggtgagggcaggtactggctggtctttcagctgaataggagttgtgtctgtttgcttcctaggtcagttgacttgctttattatatacttttaaaaactgaagttttttttaaatcaaaaactaatgacaagtaatgtttatttgtatttatcagagctcgcaaattatgtcattggtcttctgtgaagtagaggacttcacagttttatggtgttattttgctaaatagaatggtattttgaaatccaatgaggattttagggagataatttaagacattatgtgttctacagattgaagaggaaaagaaaagaactgcccgaacagactactggctacagcctgaaattattgtgaaaattataaccaagaaactgggagagaaatatcataagaaaaaggctattgttaaggaagtaattgacaaatatacagctgttgtgaagatgattgattctggagacaagctgaaacttgaccagactcatttagagacagtaattccagcaccaggaaaaagaattctagttttaaatggaggctacagaggaaatgaaggtaccctagaatccatcaatgagaagactttttcagctactatcgtcattgaaactggccctttaaaaggacgcagagttgaaggaattcaatatgaagacatttctaaacttgcctgagtttgaaaatttgttaacaatacattaaaatcttaaagcatcaaattggtgttcgccaaggcattatgagactctactgtgttagggtatattcttttgtataaaacaaacaggtttttgaaaatattactgtatagttgttcagctaaactttgagaagaatttaattatgtctcatgaggtatcaaactatgtaattttgtccttgttatttttgtttcctttgtaatttacttgatgagtttatatcttcattaaagaatgttattataaagtgttttatctatgacaatttagaatcatgtaattggaggaaatccttcatacactctatattttcagtagtagagtagtaaagttgaactctaagtgtgactaaattttaaatgtcaaactataaatatagaagcagctttattgtggtaataattcatataccatacagttcactcatttaaaatatacatacaattcagtggtttttagtatttttgcagaattgtgcagccatcaccactgtctgattttaaaacactttcataccccaaaatgaaaccctttaatagtcaatcgctatttttcccctctgccctagccctagacagccactaatgtactttctgtctctatggatttgccctttctggacatttcttataaatggaatcatataat

SEQ ID NO: 19801 - protein, 76 aa, Homo sapiens [sequence omitted]

SEQ ID NO: 19802 - DNA, 710 bp, Homo sapiens
actggctggtctttcagctgaataggagttgtgtctgtttgcttcctagattgaagaggaaaagaaaagaactgcccgaacagactactggctacagcctgaaattattgtgaaaattataaccaagaaactgggagagaaatatcataagaaaaaggctattgttaaggaagtaattgacaaatatacagctgttgtgaagatgattgattctggagacaagctgaaacttgaccagactcatttagagacagtaattccagcaccaggaaaaagaattctagttttaaatggaggctacagaggaaatgaaggtaccctagaatccatcaatgagaagactttttcagctactatcgtcattgaaactggccctttaaaaggacgcagagttgaaggaattcaatatgaagacatttctaaacttgcctgagtttgaaaatttgttaacaatacattaaaatcttaaagcatcaaattggtgttcgccaaggcattatgagactctactgtgttagggtatattcttttgtataaaacaaacaggtttttgaaaatattactgtatagttgttcagctaaactttgagaagaatttaattatgtctcatgaggtatcaaactatgtaattttgtccttgttatttttgtttcctttgtaatttacttgatgagtttatatcttcattaaagaatgttattataaagtg

SEQ ID NO: 19803 - protein, 76 aa, Homo sapiens [sequence omitted]

SEQ ID NO: 19804 - DNA, 1093 bp, Homo sapiens
tttcaaacagggagccccctgtttgctaccaggctgtatacttaaccacactgtgctacattgatccatgtgttatgattttactgcatgaaaacgtggcctcttttccagctcctgacagtcacatgggagaaagtgggtgagggcaggtactggctggtctttcagctgaataggagttgtgtctgtttgcttcctaggtcagttgacttgctttattatatacttttaaaaactgaagttttttttaaatcaaaaactaatgacaagtaatgtttatttgtatttatcagagctcgcaaattatgtcattggtcttctgtgaagtagaggacttcacagttttatggtgttattttgctaaatagaatggtattttgaaatccaatgaggattttagggagataatttaagacattatgtgttctacagattgaagaggaaaagaaaagaactgcccgaacagactactggctacagcctgaaattattgtgaaaattataaccaagaaactgggagagaaatatcataagaaaaaggctattgttaaggaagtaattgacaaatatacagctgttgtgaagatgattgattctggagacaagctgaaacttgaccagactcatttagagacagtaattccagcaccaggaaaaagaattctagttttaaatggaggctacagaggaaatgaaggtaccctagaatccatcaatgagaagactttttcagctactatcgtcattgaaactggccctttaaaaggacgcagagttgaaggaattcaatatgaagacatttctaaacttgcctgagtttgaaaatttgttaacaatacattaaaatcttaaagcatcaaattggtgttcgccaaggcattatgagactctactgtgttagggtatattcttttgtataaaacaaacaggtttttgaaaatattactgtatagttgttcagctaaactttgagaagaatttaattatgtctcatgaggtatcaaactatgtaattttgtccttgttatttttgtttcctttgtaatttacttgatgagtttatatcttcattaaagaatgttattataaagtg

SEQ ID NO: 19805 - protein, 76 aa, Homo sapiens [sequence omitted]

SEQ ID NO: 19806 - DNA, 1507 bp, Homo sapiens
ggctggctgagtactggggtccagaaagtgatcgctgccgtggtcgccatggggaagtcggattttcttactcccaaggctatcgccaacaggatcaagtccaaggggctgcagaagctacgctggtattgccagatgtgccagaagcagtgccgggacgagaatggctttaagtgtcattgtatgtccgaatctcatcagagacaactattgctggcttcagaaaatcctcagcagtttatggattatttttcagaggaattccgaaatgactttctagaacttctcaggagacgctttggcactaaaagggtccacaacaacattgtctacaacgaatacatcagccaccgagagcacatccacatgaatgccactcagtgggaaactctgactgattttactaagtggctgggcagagaaggcttgtgcaaagtggacgagacaccaaaaggctggtatattcagtacatagacagggacccagaaactatccgccggcaactggaactggagaaaaagaaaaagcaggaccttgatgatgaagaaaaaactgccaaatttattgaagagcaagtgagaagaggcctggaagggaaggaacaggaggtccctacttttacggaattaagcagagaaaatgatgaagagaaagtcacgtttaatttgagtaaaggagcatgtagctcatccggagcaacatcttccaagtcaagtactctgggaccgagtgcactgaagacgataggaagttcagcatcagtgaaacgaaaagaatcttcccagagctcaactcagtctaaagaaaagaagaaaaagaaatctgcactggatgaaatcatggagattgaagaggaaaagaaaagaactgcccgaacagactactggctacagcctgaaattattgtgaaaattataaccaagaaactgggagagaaatatcataagaaaaaggctattgttaaggaagtaattgacaaatatacagctgttgtgaagatgattgattctggagacaagctgaaacttgaccagactcatttagagacagtaattccagcaccaggaaaaagaattctagttttaaatggaggctacagaggaaatgaaggtaccctagaatccatcaatgagaagactttttcagctactatcgtcattgaaactggccctttaaaaggacgcagagttgaaggaattcaatatgaagacatttctaaacttgcctgagtttgaaaatttgttaacaatacattaaaatcttaaagcatcaaattggtgttcgccaaggcattatgagactctactgtgttagggtatattcttttgtataaaacaaacaggtttttgaaaatattactgtatagttgttcagctaaactttgagaagaatttaattatgtctcatgaggtatcaaactatgtaattttgtccttgttatttttgtttcctttgtaatttacttgatgagtttatatcttcattaaagaatgttattataaagtg

SEQ ID NO: 19807 - protein, 393 aa, Homo sapiens; identical to SEQ ID NO: 2477

SEQ ID NO: 19808 - DNA, 557 bp, Homo sapiens
agaaaaagggttttgttttttattatgtttattcagtgtagtacattttgctgtaacaagttagaagaaaagtggagatatttcttcacattaatttttatattcttttccatcataggaaaaagaattctagttttaaatggaggctacagaggaaatgaaggtaccctagaatccatcaatgagaagactttttcagctactatcgtcattgaaactggccctttaaaaggacgcagagttgaaggaattcaatatgaagacatttctaaacttgcctgagtttgaaaatttgttaacaatacattaaaatcttaaagcatcaaattggtgttcgccaaggcattatgagactctactgtgttagggtatattcttttgtataaaacaaacaggtttttgaaaatattactgtatagttgttcagctaaactttgagaagaatttaattatgtctcatgaggtatcaaactatgtaattttgtccttgttatttttgtttcctttgtaatttacttgatgagtttatatcttcattaaagaatgttattataaag

SEQ ID NO: 19809 - protein, 85 aa, Homo sapiens; identical to SEQ ID NO: 19797

SEQ ID NO: 19810 - DNA, 528 bp, Homo sapiens
ggttccgtttccggctggctgagtactggggtccagaaagtgatcgctgccgtggtcgccatggggaagtcggattttcttactcccaaggctatcgccaacaggatcaagtccaaggggctgcagaagctacgctggtattgccagatgtgccagaagcagtgccgggacgagaatggctttaagtgtcattgtatgtccgaatctcatcagagacaactattgctggcttcagaaaatcctcagcagtttatggattatttttcagagtaagtaactcaaagaactctttatcttataggctttattcagttgaacatttaatagatggttaatattttaaatattggaagttctattatttcttatatgttaactgtattctctctatgctcagtttttatcttcttttgaaaattaatcatagtataaaactgttacaaaattatttctcacaacttagtttttcctttcttccacttcagatatacaaaactgtctttcattctaatacaattgtgacaaaga

SEQ ID NO: 19811 - protein, 70 aa, Homo sapiens
MGKSDFLTPKAIANRIKSKGLQKLRWYCQMCQKQCRDENGFKCHCMSESHQRQLLLASENPQQFMDYFSE

SEQ ID NO: 19812 - DNA, 888 bp, Homo sapiens
aacgagactgaagaagagagcaaggtgggaggggcgcgctggggagcttcggcgcatgcgcgctgaggcctgcctgaccgaccttcagcagggctgtggctaccatgttctctcgcgcgggtgtcgctgggctgtcggcctggaccttgcagccgcaatggattcaagttcgaaatatggcaactttgaaagatatcaccaggagactaaagtccatcaaaaacatccagaaaattaccaagtctatgaaaatggtagcggcagcaaaatatgcccgagctgagagagagctgaaaccagctcgaatatatggattgggatctttagctctgtatgaaaaagctgatatcaaggggcctgaagacaagaagaaacacctccttattggtgtgtcctcagatcgaggactgtgtggtgctattcattcctccattgctaaacagatgaaaagcgaggttgctacactaacagcagctgggaaagaagttatgcttgttggaattggtgacaaaatcagaggcatactttataggtaatttaaatatatattgtttattttcataaagatgtaagcacgaataaatcttctctcaaaagttttgacaaactctcaaaaccttcatcaataacaaggtatattcttcagggccttttttggtatattcacaagggggtgtttgtttcctttttcttttttccaggatatattggaacatttctgttttccttcccctgttttctacctttgcttcttcatccggatcataagttgaatgccatgtgaatatcaaaagctatcagcattaagccaaatgaggcatctgaggagctgttacagcctggaaatgttagcaatagttcattaggattagaaggagaggaataaag

SEQ ID NO: 19813 - protein, 143 aa, Homo sapiens
MFSRAGVAGLSAWTLQPQWIQVRNMATLKDITRRLKSIKNIQKITKSMKMVAAAKYARAERELKPARIYGLGSLALYEKADIKGPEDKKKHLLIGVSSDRGLCGAIHSSIAKQMKSEVATLTAAGKEVMLVGIGDKIRGILYR

SEQ ID NO: 19814 - DNA, 844 bp, Homo sapiens
aacgagactgaagaagagagcaaggtgggaggggcgcgctggggagcttcggcgcatgcgcgctgaggcctgcctgaccgaccttcagcagggctgtggctaccatgttctctcgcgcgggtgtcgctgggctgtcggcctggaccttgcagccgcaatggattcaagttcgaaatatggcaactttgaaagatatcaccaggagactaaagtccatcaaaaacatccagaaaattaccaagtctatgaaaatggtagcggcagcaaaatatgcccgagctgagagagagctgaaaccagctcgaatatatggattgggatctttagctctgtatgaaaaagctgatatcaaggggcctgaagacaagaagaaacacctccttattggtgtgtcctcagatcgaggactgtgtggtgctattcattcctccattgctaaacagatgaaaagcgaggttgctacactaacagcagctgggaaagaagttatgcttgttggaattggtgacaaaatcagaggcatactttataggactcattctgaccagtttctggtggcattcaaagaagtgggaagaaagccccccacttttggagatgcgtcagtcattgcccttgaattactaaattctggatatgaatttgatgaaggctccatcatctttaataaattcaggtctgtcatctcctataagacatatctatgacgatattgatgctgacgtgctgcaaaattaccaagaatacaatctggccaacatcatctactactctctgaaggagtccaccactagtgagcagagtgccaggatgacagccatggacaatgccagcaagaatgctt

SEQ ID NO: 19815 - protein, 200 aa, Homo sapiens
MFSRAGVAGLSAWTLQPQWIQVRNMATLKDITRRLKSIKNIQKITKSMKMVAAAKYARAERELKPARIYGLGSLALYEKADIKGPEDKKKHLLIGVSSDRGLCGAIHSSIAKQMKSEVATLTAAGKEVMLVGIGDKIRGILYRTHSDQFLVAFKEVGRKPPTFGDASVIALELLNSGYEFDEGSIIFNKFRSVISYKTYL

SEQ ID NO: 19816 - DNA, 1170 bp, Homo sapiens
aacgagactgaagaagagagcaaggtgggaggggcgcgctggggagcttcggcgcatgcgcgctgaggcctgcctgaccgaccttcagcagggctgtggctaccatgttctctcgcgcgggtgtcgctgggctgtcggcctggaccttgcagccgcaatggattcaagttcgaaatatggcaactttgaaagatatcaccaggagactaaagtccatcaaaaacatccagaaaattaccaagtctatgaaaatggtagcggcagcaaaatatgcccgagctgagagagagctgaaaccagctcgaatatatggattgggatctttagctctgtatgaaaaagctgatatcaaggggcctgaagacaagaagaaacacctccttattggtgtgtcctcagatcgaggactgtgtggtgctattcattcctccattgctaaacagatgaaaagcgaggttgctacactaacagcagctgggaaagaagttatgcttgttggaattggtgacaaaatcagaggcatactttataggactcattctgaccagtttctggtggcattcaaagaagtgggaagaaagccccccacttttggagatgcgtcagtcattgcccttgaattactaaattctggatatgaatttgatgaaggctccatcatctttaataaattcaggtctgtcatctcctataagacagaagaaaagcccatcttttcccttaataccgttgcaagtgctgacagcatgagtatctatgacgatattgatgctgacgtgctgcaaaattaccaagaatacaatctggccaacatcatctactactctctgaaggagtccaccactagtgagcagagtgccaggatgacagccatggacaatgccagcaagaatgcttctgagatgattgacaaattgacattgacattcaaccgtacccgccaagctgtcatcacaaaagagttgattgaaattatctctggtgctgcagctctggattaatgaaaatcaagttccatcctcagacaagaggtaaagaaggaaaattcagccagttgattttgtttttagcttactgctgcctttgtccgaagaaactgttcctccattatttgaattactgaagacagcaagatatttgtaaattatcttaaaataaacaacttaaaat

SEQ ID NO: 19817 - protein, 298 aa, Homo sapiens; identical to SEQ ID NO: 2479

SEQ ID NO: 19818 - DNA, 1151 bp, Homo sapiens
aacgagactgaagaagagagcaaggtgggaggggcgcgctggggagcttcggcgcatgcgcgctgaggcctgcctgaccgaccttcagcagggctgtggctaccatgttctctcgcgcgggtgtcgctgggctgtcggcctggaccttgcagccgcaatggattcaagttcgaaatatggcaactttgaaagatatcaccaggagactaaagtccatcaaaaacatccagaaaattaccaagtctatgaaaatggtagcggcagcaaaatatgcccgagctgagagagagctgaaaccagctcgaatatatggattgggatctttagctctgtatgaaaaagctgatatcaaggggcctgaagacaagaagaaacacctccttattggtgtgtcctcagatcgaggactgtgtggtgctattcattcctccattgctaaacagatgaaaagcgaggttgctacactaacagcagctgggaaagaagttatgcttgttggaattggtgacaaaatcagaggcatactttataggactcattctgaccagtttctggtggcattcaaagaagtgggaagaaagccccccacttttggagatgcgtcagtcattgcccttgaattactaaattctggatatgaatttgatgaaggctccatcatctttaataaattcaggtctgtcatctcctataagacagaagaaaagcccatcttttcccttaataccgttgcaagtgctgacagcatgagtatctatgacgatattgatgctgacgtgctgcaaaattaccaagaatacaatctggccaacatcatctactactctctgaaggagtccaccactagtgagcagagtgccaggatgacagccatggacaatgccagcaagaatgcttctgagatgattgacaaattgacattgacattcaaccgtacccgccaagctgtcatcacaaaagagttgattgaaattatctctggtgctgcagctctgtaaagaaggaaaattcagccagttgattttgtttttagcttactgctgcctttgtccgaagaaactgttcctccattatttgaattactgaagacagcaagatatttgtaaattatcttaaaataaacaacttaaaataaaatcattgtttttctt

SEQ ID NO: 19819 - protein, 297 aa, Homo sapiens; identical to SEQ ID NO: 2481

SEQ ID NO: 19820 - DNA, 1188 bp, Homo sapiens
aacgagactgaagaagagagcaaggtgggaggggcgcgctggggagcttcggcgcatgcgcgctgaggcctgcctgaccgaccttcagcagggctgtggctaccatgttctctcgcgcgggtgtcgctgggctgtcggcctggaccttgcagccgcaatggattcaagttcgaaatatggcaactttgaaagatatcaccaggagactaaagtccatcaaaaacatccagaaaattaccaagtctatgaaaatggtagcggcagcaaaatatgcccgagctgagagagagctgaaaccagctcgaatatatggattgggatctttagctctgtatgaaaaagctgatatcaaggggcctgaagacaagaagaaacacctccttattggtgtgtcctcagatcgaggactgtgtggtgctattcattcctccattgctaaacagatgaaaagcgaggttgctacactaacagcagctgggaaagaagttatgcttgttggaattggtgacaaaatcagaggcatactttataggactcattctgaccagtttctggtggcattcaaagaagtgggaagaaagccccccacttttggagatgcgtcagtcattgcccttgaattactaaattctggatatgaatttgatgaaggctccatcatctttaataaattcaggtctgtcatctcctataagacagaagaaaagcccatcttttcccttaataccgttgcaagtgctgacagcatgagtatctatgacgatattgatgctgacgtgctgcaaaattaccaagaatacaatctggccaacatcatctactactctctgaaggagtccaccactagtgagcagagtgccaggatgacagccatggacaatgccagcaagaatgcttctgagatgattgacaaattgacattgacattcaaccgtacccgccaagctgtcatcacaaaagagttgattgaaattatctctggtgctgcagctctggattaatgaaaatcaagttccatcctcagacaagaggtaaagaaggaaaattcagccagttgattttgtttttagcttactgctgcctttgtccgaagaaactgttcctccattatttgaattactgaagacagcaagatatttgtaaattatcttaaaataaacaacttaaaataaaatcattgtttttctt

SEQ ID NO: 19821 - protein, 298 aa, Homo sapiens; identical to SEQ ID NO: 2479

SEQ ID NO: 19822 - DNA, 570 bp, Homo sapiens
atgcgcgctgaggcctgcctgaccgaccttcagcagggctgtggctaccatgttctctcgcgcgggtgtcgctgggctgtcggcctggaccttgcagccgcaatggattcaagttcgaaatatggcaactttgaaagatagtaagtatgttgtttgtctcaatatgtgaattgagaaaaactaaattttgacaaatacaaatactttcaaaaatatactgctttagcccattgtgtatttgatcaaaactgaccaaatggatttccattgtatgtttgggacattggacttgttctgaaaagaccagtaagaaaggacacctgagacagctatgttctgttgtttgtagaatgatcatgatataactagaaaaaattataccagtgttggtgtaggtgggtgtatgtgtgggaaggggtaaatcatgttatatataaataatgttatggaatatgtggttaaggcaactttcaataccatttaatgttttaaatgtatattattgtcttatgttgccatttgcttgtcctaagtagtagctagttttgccttccttttattagtactatt

SEQ ID NO: 19823 - protein, 46 aa, Homo sapiens
MRAEACLTDLQQGCGYHVLSRGCRWAVGLDLAAAMDSSSKYGNFER

SEQ ID NO: 19824 - DNA, 296 bp, Homo sapiens
gaccgaccttcagcagggctgtggctaccatgttctctcgcgcgggtgtcgctgggctgtcggcctggaccttgcagccgcaatggattcaagttcgaaatatggcaactttgaaagataggattaatgaaaatcaagttccatcctcagacaagaggtaaagaaggaaaattcagccagttgattttgtttttagcttactgctgcctttgtccgaagaaactgttcctccattatttgaattactgaagacagcaagatatttgtaaattatcttaaaataaacaacttaaaat

SEQ ID NO: 19825 - protein, 43 aa, Homo sapiens
MFSRAGVAGLSAWTLQPQWIQVRNMATLKDRINENQVPSSDKR

SEQ ID NO: 19826 - DNA, 373 bp, Homo sapiens
gaccttcagcagggctgtggctaccatgttctctcgcgcgggtgtcgctgggctgtcggcctggaccttgcagccgcaatgtcaccaggagactaaagtccatcaaaaacatccagaaaattaccaagtctatgaaaatggtagcggcagcaaaatatgcccgagctgagagagagctgaaaccagctcgaatatatggattgggatctttagctctgtatgaaaaagctgatatcaaggggcctgaagacaagaagaaacacctccttattggtgtgtcctcagatcgaggactgtgtggtgctattcattcctccattgctaaacagatgaaaagcgaggttgctacactaacagcagctgggaaagaagt

SEQ ID NO: 19827 - protein, 79 aa, Homo sapiens
MKMVAAAKYARAERELKPARIYGLGSLALYEKADIKGPEDKKKHLLIGVSSDRGLCGAIHSSIAKQMKSEVATLTAAGK

SEQ ID NO: 19828 - DNA, 530 bp, Homo sapiens
gaaaagcccatcttttcccttaataccgttgcaagtgctgattgatacattcagatttcttcagtaatcaaatgactaagttggaattactgcacagacagcatgagtatctatgacgatattgatgctgacgtgctgcaaaattaccaagaatacaatctggccaacatcatctactactctctgaaggagtccaccactagtgagcagagtgccaggatgacagccatggacaatgccagcaagaatgcttctgagatgattgacaaattgacattgacattcaaccgtacccgccaagctgtcatcacaaaagagttgattgaaattatctctggtgctgcagctctggattaatgaaaatcaagttccatcctcagacaagaggtaaagaaggaaaattcagccagttgattttgtttttagcttactgctgcctttgtccgaagaaactgttcctccattatttgaattactgaagacagcaagatatttgtaaattatcttaaaataaacaacttaaaataaaa

SEQ ID NO: 19829 - protein, 84 aa, Homo sapiens
MSIYDDIDADVLQNYQEYNLANIIYYSLKESTTSEQSARMTAMDNASKNASEMIDKLTLTFNRTRQAVITKELIEIISGAAALD

SEQ ID NO: 19830 - DNA, 4203 bp, Homo sapiens
cagcgggaggcggagcgagtccaaaatggcggctctcaggctggcgcgctccgtgctgctggggctttgaggtggtcgccgggggtccgggggaccctttccccgccgcggaagccctagaggatgaatcggggaccctgctaaggtctggcggcggggctggagagcagtggcagcaagggctgcggtggcgtccacgcagcgggatgtgcgagagttactccaggtcgttgttgagggtctcggtggcgcagatctgccaggcgctgggctgggactcggtgcagctcagcgcctgccacctcctcacggacgtgctgcagcgctatctgcagcagctgggccggggctgccatcggtactctgagctctatggccgaacagacccaattttggatgatgttggtgaagctttccagctgatgggggttagtctacatgaactagaagactatattcacaacattgagcctgtcaccttcccacaccaaattccgtcatttcctgttagcaagaacaatgtacttcagtttcctcaacctggaagtaaagatgcagaggaaagaaaagaatacattcctgattacctgccacccattgtgtcttctcaagaagaagaagaagaagagcaggtgcccactgatggaggcacatcagcagaagccatgcaggttcccttggaagaagatgatgaattggaggaggaagaaattattaatgatgagaatttcctgggcaagagaccactggatagtcctgaagctgaagaactgccagccatgaagcggcctcggctattaagcactaaaggggacacgctagatgttgtgttattggaagctcgagagccactcagctcaataaatactcaaaagatcccaccaatgctttctccagtccatgtacaggacagtacagacttggcacctccctcacccgagccgccaatgttggctccagttgcaaaatcacaaatgccaactgcaaaaccattagaaacaaagtcatttacacctaaaacaaagactaaaactagctctccaggacagaagactaaatcacctaaaaccgcccagtcaccagcaatggtcggaagtcctattcgatcaccaaaaactgtatccaaagaaaagaaatcacctggacgttccaagagccccaagagtcccaagagccccaaggtcacgactcacattccccaaacacctgtgagacctgaaacgcccaacaggactccttcagctacactcagtgaaaaaatcagtaaagagactatccaggtaaaacaaatacagacaccccctgatgctgggaaactgaacagtgagaatcagccgaaaaaggctgtggtagcagataaaacgattgaggcctctatcgatgctgtgattgcacgagcctgtgctgagcgagagccagatcctttcgaattttcttctggatcggaatctgaaggagacatttttactagccctaagagaatttcaggcccggagtgtactactcccaaagcttccacttccgcgaacaatttcacaaagtcaggatccactcctctgcctctttccggtggaacctcaagttccgataactcatggacaatggatgcctccattgatgaggttgtacgtaaagcaaaactgggaacaccttcaaatatgccccccaactttccttatatctcttctccgtcagtgtctcctcccactcccgaacctctccacaaggtgtatgaggagaaaaccaagctgccttcctccgtggagataaaagtggaaccagtcgctctggccccgagtccagttatccccagattaactctccgagtcggtgctggccaagacaagattgtcatcagcaaggtggtccctgcccccgaggccaagccggcgccctcgcagaacaggccgaagaccccaccgccggcccccgcgcccgcccccggccccatgctcgtcagccctgcgcccgtgccgctgccgctgctcgcccaggccgccgcgggccctgccctgctgccctccccgggtcccgccgcctccggggccagtgccaaagcccccgtgcgcagcgtggtgactgagacggtcagcacctacgtgatccgagatgagtggggcaatcagatctggatctgccctgggtgtaacaagcctgacgatgggagtcccatgattgggtgtgacgactgcgatgactggtaccactggccctgtgttggaatcatgactgcacccccagaagagatgcagtggttctgccccaagtgtgcgaacaagaagaaggacaaaaagcacaagaagaggaagcatcgagcccactgacgactcccgaggggctggaccaagcggggtcagcccgggcttcttccctggcgcctctggaagggagctggtgcaagtctgccgtcacatccacccccagatgcctgtggataaagaacccaggaggactgaggctggaacacaccgcgcacctggattgttcactcccgagccgccttggcctgtggctccgtggcagtgcgacagaaggaaactcaagcagaggcgtggcctgggggctgcccctcctccacttctctaataccagtgacaagtattattaataaagagcgtacatcttcccttttgatttcctttattctctccagggccttttcattgaggtattagatgagaagataatgtacaaactgcctcaactgtaatttaaggatgatagagtctgtatacagttttcagcccctttccctctatagtaagataatcagaataacataaaagaaaactccagttggagtaccggtaaatatttttgtgataagaatatatgaagcttccctccttcccccgtttttagtactaacatgtaaaatgttcaggcttttgtgaaataccttatattttttaagaaaaaggtttctatcatgtcctgtttgcttttgtgcaaattatttttgtttaatgtattttatatcttcgttgcattctaattttgcccttctttaaactgctggagtctcttctcactgcttgtacatttcatcaacttgtataaaaactcttcagactaaaagattgcccctaatgtaaataataaatatttatgaagtagttattttttaaatttttatcgtgtttaattctggctttctctgaaatccactgtgatttcagccaggtctgtaatgacgctggacagaaacaaggctagagaaaaagccatcgttcaaagaaatttcccttgagctcagcctgcgcagtgcccggaaacatggtggggaaagggcccgagcagttggaaggaaaacaaggcaatttaaatttagagtttatgacttgaagttgttttgtttgttgtctattttgtttttgtaaatttctttgacagacttttactaaaaggacatgtagtttccatgaaagtaaaaaaaaaaaacaacaaaaaacccacatatactgtagcattttgtctttatattgttttatttctacaaatctgttcattaatattgtgctttaaggctgaaatgaagtatattatgaatttttttaagaaaactcatcaaatttcagggtatcacaaaactttattatattattatactgcccactatttattatatgttatagatgtctgagaggtaaaccaaatattttatttttaatgttaaaaaaacatcaaatttaactttattagcatattttagcaactttgggataaatacggacttttacttgattttgaaataatcccagtgtaggcccatgtgctggatctgttggatgctagaatatgggctttgaacctaatacaaatatattactagaaaatgtgatttttttaaatgccaagtaaattgatattagtgtatgaattagtcatattttaaaacattatgtggttagagaaatgcggttttctgccatgaatgttaagttgcaaatcagtggaaatggagtcgacctcttcggagcacagggtgtcattgccctcgttgttcaagaggccagaatttttctatccccgctaagaaacaaagcatctatgttgagatatgtgtttttttgtttgattaatttgagatcattctaaatactttatacaatattttcacatgcacaaaaatgcgcgttagtggtttttggagaggggtgaggggtgggggaagtgcaaaataaagattattggctatttcat

SEQ ID NO: 19831 - protein, 705 aa, Homo sapiens
MCESYSRSLLRVSVAQICQALGWDSVQLSACHLLTDVLQRYLQQLGRGCHRYSELYGRTDPILDDVGEAFQLMGVSLHELEDYIHNIEPVTFPHQIPSFPVSKNNVLQFPQPGSKDAEERKEYIPDYLPPIVSSQEEEEEEQVPTDGGTSAEAMQVPLEEDDELEEEEIINDENFLGKRPLDSPEAEELPAMKRPRLLSTKGDTLDVVLLEAREPLSSINTQKIPPMLSPVHVQDSTDLAPPSPEPPMLAPVAKSQMPTAKPLETKSFTPKTKTKTSSPGQKTKSPKTAQSPAMVGSPIRSPKTVSKEKKSPGRSKSPKSPKSPKVTTHIPQTPVRPETPNRTPSATLSEKISKETIQVKQIQTPPDAGKLNSENQPKKAVVADKTIEASIDAVIARACAEREPDPFEFSSGSESEGDIFTSPKRISGPECTTPKASTSANNFTKSGSTPLPLSGGTSSSDNSWTMDASIDEVVRKAKLGTPSNMPPNFPYISSPSVSPPTPEPLHKVYEEKTKLPSSVEIKVEPVALAPSPVIPRLTLRVGAGQDKIVISKVVPAPEAKPAPSQNRPKTPPPAPAPAPGPMLVSPAPVPLPLLAQAAAGPALLPSPGPAASGASAKAPVRSVVTETVSTYVIRDEWGNQIWICPGCNKPDDGSPMIGCDDCDDWYHWPCVGIMTAPPEEMQWFCPKCANKKKDKKHKKRKHRAH

SEQ ID NO: 19832 - DNA, 2388 bp, Homo sapiens
agcgagtccaaaatggcggctctcaggctggcgcgctccgtgctgctggggctttgaggtggtcgccgggggtccgggggaccctttccccgccgcggaagccctagaggatgaatcggggaccctgctaaggtctggcggcggggctggagagcagtggcagcaagggctgcggtggcgtccacgcagcgggatgtgcgagagttactccaggtcgttgttgagggtctcggtggcgcagatctgccaggcgctgggctgggactcggtgcagctcagcgcctgccacctcctcacggacgtgctgcagcgctatctgcagcagctgggccggggctgccatcggtactctgagctctatggccgaacagacccaattttggatgatgttggtgaagctttccagctgatgggggttagtctacatgaactagaagactatattcacaacattgagcctgtcaccttcccacaccaaattccgtcatttcctgttagcaagaacaatgtacttcagtttcctcaacctggaagtaaagatgcagaggaaagaaaagaatacattcctgattacctgccacccattgtgtcttctcaagaagaagaagaagaagagcaggtgcccactgatggaggcacatcagcagaagccatgcaggttcccttggaagaagatgatgaattggaggaggaagaaattattaatgatgagaatttcctgggcaagagaccactggatagtcctgaagctgaagaactgccagccatgaagcggcctcggctattaagcactaaaggggacacgctagatgttgtgttattggaagctcgagagccactcagctcaataaatactcaaaagatcccaccaatgctttctccagtccatgtacaggacagtacagacttggcacctccctcacccgagccgccaatgttggctccagttgcaaaatcacaaatgccaactgcaaaaccattagaaacaaagtcatttacacctaaaacaaagactaaaactagctctccaggacagaagactaaatcacctaaaaccgcccagtcaccagcaatggtcggaagtcctattcgatcaccaaaaactgtatccaaagaaaagaaatcacctggacgttccaagagccccaagagtcccaagagccccaaggtcacgactcacattccccaaacacctgtgagacctgaaacgcccaacaggactccttcagctacactcagtgaaaaaatcagtaaagagactatccaggtaaaacaaatacagacaccccctgatgctgggaaactgaacagtgagaatcagccgaaaaaggctgtggtagcagataaaacgattgaggcctctatcgatgctgtgattgcacgagcctgtgctgagcgagagccagatcctttcgaattttcttctggatcggaatctgaaggagacatttttactagccctaagagaatttcaggcccggagtgtactactcccaaagcttccacttccgcgaacaatttcacaaagtcaggatccactcctctgcctctttccggtggaacctcaagttccgataactcatggacaatggatgcctccattgatgaggttgtacgtaaagcaaaactgggaacaccttcaaatatgccccccaactttccttatatctcttctccgtcagtgtctcctcccactcccgaacctctccacaaggtgtatgaggagaaaaccaagctgccttcctccgtggaggtaaagaagaagttgaaaaaggaactaaagactaaaatgaaaaagaaagaaaagcagagagatagggagagggaaaaagacaagaacaaggacaaaagtaaggagaaggataaagtgaaagagaaagagaaagacaaggaaactggcagggaaacaaagtatccctggaaggaatttcttaaagaggaagaggcagatccctacaagtttaaaatcaaagaatttgaagatgttgatcccaaagtgaaattgaaagatggacttgtgaggaaggagaaagagaagcataaagataagaagaaagatagagagaaaggcaagaaagataaagataagagagagaaagaaaaagtgaaagataaaggcagagaagataagatgaaagccccagcacccccactggtgttgcccccaaaagagttggccctgcccttgttcagccctgccacagcctccagggtcccagccatgctgccatctttgttgccagtgcttccggaaaaactgtttgaggagaaagagaaggtgaaggagaaagaaaagaaaaaggacaaaaaggagaagaagaaaaagaaggaaaaagagaaggagaagaaggagaaggaaagagagaaagagaagagagagcgagagaa

SEQ ID NO: 19833 - protein, 730 aa, Homo sapiens
MCESYSRSLLRVSVAQICQALGWDSVQLSACHLLTDVLQRYLQQLGRGCHRYSELYGRTDPILDDVGEAFQLMGVSLHELEDYIHNIEPVTFPHQIPSFPVSKNNVLQFPQPGSKDAEERKEYIPDYLPPIVSSQEEEEEEQVPTDGGTSAEAMQVPLEEDDELEEEEIINDENFLGKRPLDSPEAEELPAMKRPRLLSTKGDTLDVVLLEAREPLSSINTQKIPPMLSPVHVQDSTDLAPPSPEPPMLAPVAKSQMPTAKPLETKSFTPKTKTKTSSPGQKTKSPKTAQSPAMVGSPIRSPKTVSKEKKSPGRSKSPKSPKSPKVTTHIPQTPVRPETPNRTPSATLSEKISKETIQVKQIQTPPDAGKLNSENQPKKAVVADKTIEASIDAVIARACAEREPDPFEFSSGSESEGDIFTSPKRISGPECTTPKASTSANNFTKSGSTPLPLSGGTSSSDNSWTMDASIDEVVRKAKLGTPSNMPPNFPYISSPSVSPPTPEPLHKVYEEKTKLPSSVEVKKKLKKELKTKMKKKEKQRDREREKDKNKDKSKEKDKVKEKEKDKETGRETKYPWKEFLKEEEADPYKFKIKEFEDVDPKVKLKDGLVRKEKEKHKDKKKDREKGKKDKDKREKEKVKDKGREDKMKAPAPPLVLPPKELALPLFSPATASRVPAMLPSLLPVLPEKLFEEKEKVKEKEKKKDKKEKKKKKEKEKEKKEKEREKEKRER

SEQ ID NO: 19834 - DNA, 275 bp, Homo sapiens
taactatcacctttatttcaagacaatttacttgtgtcacaactcttaatatattgtctctcctcagcaggttaaagctgcaagtttctttcctggacaatggcaaatcctccaattctaagagagaaaaaagacagagagataggagagagaaagagaagagagtttacatttgaaaatacattccatatgaaagaacaataagagagaatattgtagctttatacaaaagggtcaagaaacatgaaattgaactacagaaaaagcagaacaat

SEQ ID NO: 19835 - protein, 34 aa, Homo sapiens [sequence omitted]

SEQ ID NO: 19836 - DNA, 5849 bp, Homo sapiens
atcttttcattgctcgttcccctccttcccgcagacacccggacctcccctgggcgccagctccgcggctccaacgggtccagaaacaagccggattttttttttttcttcctggaaattggctttggtgtgtgttgccctacctccctcctccccctcccacccacagcccccccccggccttttttttttttttttttttttttgagacatggcccgggcagtggctcctggaagaggaacaagtgtgggaaaagggagaggaagccggagctaaatgacaggatgcaggcgacttgagacacaaaaagagaagcgttcctctcggatccaggcattgcctcgctgctttcttttctccaagacgggctgaggattgtacagctctaggcggagttggggctcttcggatcgcttagattctcctctttgctgcatttccccccacgtcctcgttctcccgcgtctgcctgcggacccggagaagggagaatggagagggggctgccgctcctctgcgccgtgctcgccctcgtcctcgccccggccggcgcttttcgcaacgataaatgtggcgatactataaaaattgaaagccccgggtaccttacatctcctggttatcctcattcttatcacccaagtgaaaaatgcgaatggctgattcaggctccggacccataccagagaattatgatcaacttcaaccctcacttcgatttggaggacagagactgcaagtatgactacgtggaagtcttcgatggagaaaatgaaaatggacattttaggggaaagttctgtggaaagatagcccctcctcctgttgtgtcttcagggccatttctttttatcaaatttgtctctgactacgaaacacatggtgcaggattttccatacgttatgaaattttcaagagaggtcctgaatgttcccagaactacacaacacctagtggagtgataaagtcccccggattccctgaaaaatatcccaacagccttgaatgcacttatattgtctttgtgccaaagatgtcagagattatcctggaatttgaaagctttgacctggagcctgactcaaatcctccaggggggatgttctgtcgctacgaccggctagaaatctgggatggattccctgatgttggccctcacattgggcgttactgtggacagaaaacaccaggtcgaatccgatcctcatcgggcattctctccatggttttttacaccgacagcgcgatagcaaaagaaggtttctcagcaaactacagtgtcttgcagagcagtgtctcagaagatttcaaatgtatggaagctctgggcatggaatcaggagaaattcattctgaccagatcacagcttcttcccagtatagcaccaactggtctgcagagcgctcccgcctgaactaccctgagaatgggtggactcccggagaggattcctaccgagagtggatacaggtagacttgggccttctgcgctttgtcacggctgtcgggacacagggcgccatttcaaaagaaaccaagaagaaatattatgtcaagacttacaagatcgacgttagctccaacggggaagactggatcaccataaaagaaggaaacaaacctgttctctttcagggaaacaccaaccccacagatgttgtggttgcagtattccccaaaccactgataactcgatttgtccgaatcaagcctgcaacttgggaaactggcatatctatgagatttgaagtatacggttgcaagataacagattatccttgctctggaatgttgggtatggtgtctggacttatttctgactcccagatcacatcatccaaccaaggggacagaaactggatgcctgaaaacatccgcctggtaaccagtcgctctggctgggcacttccacccgcacctcattcctacatcaatgagtggctccaaatagacctgggggaggagaagatcgtgaggggcatcatcattcagggtgggaagcaccgagagaacaaggtgttcatgaggaagttcaagatcgggtacagcaacaacggctcggactggaagatgatcatggatgacagcaaacgcaaggcgaagtcttttgagggcaacaacaactatgatacacctgagctgcggacttttccagctctctccacgcgattcatcaggatctaccccgagagagccactcatggcggactggggctcagaatggagctgctgggctgtgaagtggaagcccctacagctggaccgaccactcccaacgggaacttggtggatgaatgtgatgacgaccaggccaactgccacagtggaacaggtgatgacttccagctcacaggtggcaccactgtgctggccacagaaaagcccacggtcatagacagcaccatacaatcagagtttccaacatatggttttaactgtgaatttggctggggctctcacaagaccttctgccactgggaacatgacaatcacgtgcagctcaagtggagtgtgttgaccagcaagacgggacccattcaggatcacacaggagatggcaacttcatctattcccaagctgacgaaaatcagaagggcaaagtggctcgcctggtgagccctgtggtttattcccagaactctgcccactgcatgaccttctggtatcacatgtctgggtcccacgtcggcacactcagggtcaaactgcgctaccagaagccagaggagtacgatcagctggtctggatggccattggacaccaaggtgaccactggaaggaagggcgtgtcttgctccacaagtctctgaaactttatcaggtgattttcgagggcgaaatcggaaaaggaaaccttggtgggattgctgtggatgacattagtattaataaccacatttcacaagaagattgtgcaaaaccagcagacctggataaaaagaacccagaaattaaaattgatgaaacagggagcacgccaggatacgaaggtgaaggagaaggtgacaagaacatctccaggaagccaggcaatgtgttgaagaccttagaccccatcctcatcaccatcatagccatgagtgccctgggggtcctcctgggggctgtctgtggggtcgtgctgtactgtgcctgttggcataatgggatgtcagaaagaaacttgtctgccctggagaactataactttgaacttgtggatggtgtgaagttgaaaaaagacaaactgaatacacagagtacttattcggaggcatgaaggcagacagagatgaaaagacagtcaaaggacggaagtggaaggacgggagtgagctggggagctgttgatctttcactatacaggctgggaagtgtgttgatgaccactgagccaggcttttctcaggagcttcaatgagtatggccgacagacatggacaaggagctgtgttcaccatcggactcatgtgcagtcagcttttttcctgttggtttcatttgaataatcagatgctggtgttgagaccaagtatgattgacataatcattcatttcgacccctcctgcccctctctctctctctcctctcccctttgtggattctttttggaaactgagcgaaatccaagatgctggcaccaagcgtattccgtgtggccctttggatggacatgctacctgaaacccagtgcccagaatatactagaatcaccgcatttcagtggactcctgaagttgtacttgtgtataattgcccgcgtcgtgcataggcaaagaaggattaggctgttttctttttaaagtactgtagcctcagtactggtgtagtgtgtcagctctgtttacgaagcaatactgtccagttttcttgctgtttttccggtgttgtactaaacctcgtgcttgtgaactccatacagaaaacggtgccatccctgaacacggctggccactgggtatactgctgacaaccgcaacaacaaaaacacaaatccttggcactggctagtctatgtcctctcaagtgcctttttgtttgtactggttcattgtgttacattaacgacccactctgcttcttgctggtgaaagccctgctctttaatcaaactctggtggcccactgactaagaagaaagtttattttcgtgtgagatgccagcccctccgggcaggcaagggctctgaagatttggcaacgtggcttaattgttctgctttttctgtagttcaatttcatgtttcttgacccttttgtataaagctacaatattctctcttattgttctttcatatggaatgtattttcaaatgtaaactctcttctctttctctctcctatctctctgtcttttttctctcttagaattggaggatttgccattgtccaggaaagaaacttgcagctttaacctgctgggaatggcaaacgattttactagactttatgtttaaaaataaataaataagggaaattcctaactttgccctccaaagtctaactttggttttcttgttaactggttaaagtgacagtatcttttttccttatctattctattcaaaatgacctttgatagaaatgttggcatttagtagaaatagtgataagttgaggaaagaaataatacaaattggctttcaagtgagacccaaaggaagaactggataaaatcttccaaatccaaaagcatgagatttttctatccaaatatgcaaaaatgacccaagagaactttcttattttgctactgagtcacacaagggaagtggaaggaagaacagttaatttaagaatgaaactataaatcctgatgcctgggggtcaagtattttaagataagagggggaaaaacacataaagtcaaacaaatgttttaaaaattcataacagcaaccttgaaaaaatagacttaaatgaatgcttctagaaacttccagcggctcacaaagaataagcctgccttagggctggcaacatctaagcctctaacagcacagggaagcaaatatcttaccaggcagcctatgaattaacccaaagaagctttggttggttttggtggatttttatcatgccatgttggacatgagattttttagatcttccttcccacattgctagacgtctcactcaaagacatttgttgggagtcacatttgcatcatagacgagacagtccattcatcttagttaaattggattgagaatgccttttgtttccaggaaaatattgatcaccatgaaagaagaatagttttttgtccccagagacattcatttagttgatataatcctaccagaaggaaagcactaagaaacactcgtttgttgtttttaaaggcaacagacttaaagttgtcctcagccaaggaaaaatgatactgcaactttaaaatttaaagtatcttgcactgataaatatatttaaaaattatatgtttataaagttattaatttgtaaaggcagtgttacaaaatgttcagtttatattgttttagattgttttgtaatttttaaaggtgtaaaataacatattttttctttatggaaatctataaaactttctgtagtaaaatgttttcattttactggtatattattgcttcatgttttgtaccatcataagattttgtgcagattttttttacagaaattattattttctatgacaatatgacacttgtaaattgttgtttcaaaatgaacagcgaagccttaactttaaatgacatttgtattctcagacactgagtagcataaaaaccacatagaactgaactgtaacttaaattccaaactatgactactacattccaaagaaacagttgaattaaacattttcataaaatatcccaca

SEQ ID NO: 19837 - protein, 923 aa, Homo sapiens
MERGLPLLCAVLALVLAPAGAFRNDKCGDTIKIESPGYLTSPGYPHSYHPSEKCEWLIQAPDPYQRIMINFNPHFDLEDRDCKYDYVEVFDGENENGHFRGKFCGKIAPPPVVSSGPFLFIKFVSDYETHGAGFSIRYEIFKRGPECSQNYTTPSGVIKSPGFPEKYPNSLECTYIVFVPKMSEIILEFESFDLEPDSNPPGGMFCRYDRLEIWDGFPDVGPHIGRYCGQKTPGRIRSSSGILSMVFYTDSAIAKEGFSANYSVLQSSVSEDFKCMEALGMESGEIHSDQITASSQYSTNWSAERSRLNYPENGWTPGEDSYREWIQVDLGLLRFVTAVGTQGAISKETKKKYYVKTYKIDVSSNGEDWITIKEGNKPVLFQGNTNPTDVVVAVFPKPLITRFVRIKPATWETGISMRFEVYGCKITDYPCSGMLGMVSGLISDSQITSSNQGDRNWMPENIRLVTSRSGWALPPAPHSYINEWLQIDLGEEKIVRGIIIQGGKHRENKVFMRKFKIGYSNNGSDWKMIMDDSKRKAKSFEGNNNYDTPELRTFPALSTRFIRIYPERATHGGLGLRMELLGCEVEAPTAGPTTPNGNLVDECDDDQANCHSGTGDDFQLTGGTTVLATEKPTVIDSTIQSEFPTYGFNCEFGWGSHKTFCHWEHDNHVQLKWSVLTSKTGPIQDHTGDGNFIYSQADENQKGKVARLVSPVVYSQNSAHCMTFWYHMSGSHVGTLRVKLRYQKPEEYDQLVWMAIGHQGDHWKEGRVLLHKSLKLYQVIFEGEIGKGNLGGIAVDDISINNHISQEDCAKPADLDKKNPEIKIDETGSTPGYEGEGEGDKNISRKPGNVLKTLDPILITIIAMSALGVLLGAVCGVVLYCACWHNGMSERNLSALENYNFELVDGVKLKKDKLNTQSTYSEA

SEQ ID NO: 19838 - DNA, 5883 bp, Homo sapiens
gccaaaacctttgaccagagtctccttgccagcattcctacctccctttggccagctatttgtgccagacacccggacctcccctgggcgccagctccgcggctccaacgggtccagaaacaagccggattttttttttttcttcctggaaattggctttggtgtgtgttgccctacctccctcctccccctcccacccacagcccccccccggccttttttttttttttttttttttttgagacatggcccgggcagtggctcctggaagaggaacaagtgtgggaaaagggagaggaagccggagctaaatgacaggatgcaggcgacttgagacacaaaaagagaagcgttcctctcggatccaggcattgcctcgctgctttcttttctccaagacgggctgaggattgtacagctctaggcggagttggggctcttcggatcgcttagattctcctctttgctgcatttccccccacgtcctcgttctcccgcgtctgcctgcggacccggagaagggagaatggagagggggctgccgctcctctgcgccgtgctcgccctcgtcctcgccccggccggcgcttttcgcaacgataaatgtggcgatactataaaaattgaaagccccgggtaccttacatctcctggttatcctcattcttatcacccaagtgaaaaatgcgaatggctgattcaggctccggacccataccagagaattatgatcaacttcaaccctcacttcgatttggaggacagagactgcaagtatgactacgtggaagtcttcgatggagaaaatgaaaatggacattttaggggaaagttctgtggaaagatagcccctcctcctgttgtgtcttcagggccatttctttttatcaaatttgtctctgactacgaaacacatggtgcaggattttccatacgttatgaaattttcaagagaggtcctgaatgttcccagaactacacaacacctagtggagtgataaagtcccccggattccctgaaaaatatcccaacagccttgaatgcacttatattgtctttgtgccaaagatgtcagagattatcctggaatttgaaagctttgacctggagcctgactcaaatcctccaggggggatgttctgtcgctacgaccggctagaaatctgggatggattccctgatgttggccctcacattgggcgttactgtggacagaaaacaccaggtcgaatccgatcctcatcgggcattctctccatggttttttacaccgacagcgcgatagcaaaagaaggtttctcagcaaactacagtgtcttgcagagcagtgtctcagaagatttcaaatgtatggaagctctgggcatggaatcaggagaaattcattctgaccagatcacagcttcttcccagtatagcaccaactggtctgcagagcgctcccgcctgaactaccctgagaatgggtggactcccggagaggattcctaccgagagtggatacaggtagacttgggccttctgcgctttgtcacggctgtcgggacacagggcgccatttcaaaagaaaccaagaagaaatattatgtcaagacttacaagatcgacgttagctccaacggggaagactggatcaccataaaagaaggaaacaaacctgttctctttcagggaaacaccaaccccacagatgttgtggttgcagtattccccaaaccactgataactcgatttgtccgaatcaagcctgcaacttgggaaactggcatatctatgagatttgaagtatacggttgcaagataacagattatccttgctctggaatgttgggtatggtgtctggacttatttctgactcccagatcacatcatccaaccaaggggacagaaactggatgcctgaaaacatccgcctggtaaccagtcgctctggctgggcacttccacccgcacctcattcctacatcaatgagtggctccaaatagacctgggggaggagaagatcgtgaggggcatcatcattcagggtgggaagcaccgagagaacaaggtgttcatgaggaagttcaagatcgggtacagcaacaacggctcggactggaagatgatcatggatgacagcaaacgcaaggcgaagtcttttgagggcaacaacaactatgatacacctgagctgcggacttttccagctctctccacgcgattcatcaggatctaccccgagagagccactcatggcggactggggctcagaatggagctgctgggctgtgaagtggaagcccctacagctggaccgaccactcccaacgggaacttggtggatgaatgtgatgacgaccaggccaactgccacagtggaacaggtgatgacttccagctcacaggtggcaccactgtgctggccacagaaaagcccacggtcatagacagcaccatacaatcagagtttccaacatatggttttaactgtgaatttggctggggctctcacaagaccttctgccactgggaacatgacaatcacgtgcagctcaagtggagtgtgttgaccagcaagacgggacccattcaggatcacacaggagatggcaacttcatctattcccaagctgacgaaaatcagaagggcaaagtggctcgcctggtgagccctgtggtttattcccagaactctgcccactgcatgaccttctggtatcacatgtctgggtcccacgtcggcacactcagggtcaaactgcgctaccagaagccagaggagtacgatcagctggtctggatggccattggacaccaaggtgaccactggaaggaagggcgtgtcttgctccacaagtctctgaaactttatcaggtgattttcgagggcgaaatcggaaaaggaaaccttggtgggattgctgtggatgacattagtattaataaccacatttcacaagaagattgtgcaaaaccagcagacctggataaaaagaacccagaaattaaaattgatgaaacagggagcacgccaggatacgaaggtgaaggagaaggtgacaagaacatctccaggaagccaggcaatgtgttgaagaccttagaccccatcctcatcaccatcatagccatgagtgccctgggggtcctcctgggggctgtctgtggggtcgtgctgtactgtgcctgttggcataatgggatgtcagaaagaaacttgtctgccctggagaactataactttgaacttgtggatggtgtgaagttgaaaaaagacaaactgaatacacagagtacttattcggaggcatgaaggcagacagagatgaaaagacagtcaaaggacggaagtggaaggacgggagtgagctggggagctgttgatctttcactatacaggctgggaagtgtgttgatgaccactgagccaggcttttctcaggagcttcaatgagtatggccgacagacatggacaaggagctgtgttcaccatcggactcatgtgcagtcagcttttttcctgttggtttcatttgaataatcagatgctggtgttgagaccaagtatgattgacataatcattcatttcgacccctcctgcccctctctctctctctcctctcccctttgtggattctttttggaaactgagcgaaatccaagatgctggcaccaagcgtattccgtgtggccctttggatggacatgctacctgaaacccagtgcccagaatatactagaatcaccgcatttcagtggactcctgaagttgtacttgtgtataattgcccgcgtcgtgcataggcaaagaaggattaggctgttttctttttaaagtactgtagcctcagtactggtgtagtgtgtcagctctgtttacgaagcaatactgtccagttttcttgctgtttttccggtgttgtactaaacctcgtgcttgtgaactccatacagaaaacggtgccatccctgaacacggctggccactgggtatactgctgacaaccgcaacaacaaaaacacaaatccttggcactggctagtctatgtcctctcaagtgcctttttgtttgtactggttcattgtgttacattaacgacccactctgcttcttgctggtgaaagccctgctctttaatcaaactctggtggcccactgactaagaagaaagtttattttcgtgtgagatgccagcccctccgggcaggcaagggctctgaagatttggcaacgtggcttaattgttctgctttttctgtagttcaatttcatgtttcttgacccttttgtataaagctacaatattctctcttattgttctttcatatggaatgtattttcaaatgtaaactctcttctctttctctctcctatctctctgtcttttttctctcttagaattggaggatttgccattgtccaggaaagaaacttgcagctttaacctgctgggaatggcaaacgattttactagactttatgtttaaaaataaataaataagggaaattcctaactttgccctccaaagtctaactttggttttcttgttaactggttaaagtgacagtatcttttttccttatctattctattcaaaatgacctttgatagaaatgttggcatttagtagaaatagtgataagttgaggaaagaaataatacaaattggctttcaagtgagacccaaaggaagaactggataaaatcttccaaatccaaaagcatgagatttttctatccaaatatgcaaaaatgacccaagagaactttcttattttgctactgagtcacacaagggaagtggaaggaagaacagttaatttaagaatgaaactataaatcctgatgcctgggggtcaagtattttaagataagagggggaaaaacacataaagtcaaacaaatgttttaaaaattcataacagcaaccttgaaaaaatagacttaaatgaatgcttctagaaacttccagcggctcacaaagaataagcctgccttagggctggcaacatctaagcctctaacagcacagggaagcaaatatcttaccaggcagcctatgaattaacccaaagaagctttggttggttttggtggatttttatcatgccatgttggacatgagattttttagatcttccttcccacattgctagacgtctcactcaaagacatttgttgggagtcacatttgcatcatagacgagacagtccattcatcttagttaaattggattgagaatgccttttgtttccaggaaaatattgatcaccatgaaagaagaatagttttttgtccccagagacattcatttagttgatataatcctaccagaaggaaagcactaagaaacactcgtttgttgtttttaaaggcaacagacttaaagttgtcctcagccaaggaaaaatgatactgcaactttaaaatttaaagtatcttgcactgataaatatatttaaaaattatatgtttataaagttattaatttgtaaaggcagtgttacaaaatgttcagtttatattgttttagattgttttgtaatttttaaaggtgtaaaataacatattttttctttatggaaatctataaaactttctgtagtaaaatgttttcattttactggtatattattgcttcatgttttgtaccatcataagattttgtgcagattttttttacagaaattattattttctatgacaatatgacacttgtaaattgttgtttcaaaatgaacagcgaagccttaactttaaatgacatttgtattctcagacactgagtagcataaaaaccacatagaactgaactgtaacttaaattccaaactatgactactacattccaaagaaacagttgaattaaacattttcataaaatatcccaca

SEQ ID NO: 19839 - protein, 923 aa, Homo sapiens; identical to SEQ ID NO: 19837

SEQ ID NO: 19840 - DNA, 757 bp, Homo sapiens
tgttgtattttatttcttagcatggagtcgcccaggaaatcattttacattatctgtttcatttcacttcccagattatccttgctctggaatgttgggtatggtgtctggacttatttctgactcccagatcacatcatccaaccaaggggacagaaactggatgcctgaaaacatccgcctggtaaccagtcgctctggctgggcacttccacccgcacctcattcctacatcaatgagtggctccaaatagacctgggggaggagaagatcgtgaggggcatcatcattcagggtgggaagcaccgagagaacaaggtgttcatgaggaagttcaagatcgggtacagcaacaacggctcggactggaagatgatcatggatgacagcaaacgaaggcattgatctaaaaacatatcctttaaataaccaaattgccacaagttacatgatcaagacaagaagataaaagagcagtaaaatacaaaaacttagagcggttcacctggttaaatgtacaggatggggaaggacattggaaggtaaaggcagactgtcattctctgaagcgagaagtgcctgaaacattttttcaggcaaagcggttccatgtcctggtcatttcaaaaatatccaagttcctacattttatggtatcatcagaatatgaagagccaaaagaatggatgatgtcattttctgttctataaacaataaatgtaatgtattaacaaagtaaatacaggcagaactgtg

SEQ ID NO: 19841 - protein, 104 aa, Homo sapiens
MLGMVSGLISDSQITSSNQGDRNWMPENIRLVTSRSGWALPPAPHSYINEWLQIDLGEEKIVRGIIIQGGKHRENKVFMRKFKIGYSNNGSDWKMIMDDSKRRH

SEQ ID NO: 19842 - DNA, 781 bp, Homo sapiens
gttgaagaacatgtcacaccagcacacgccgccgtcgccagcagcaggaagttgttgatttgcagcatattcacactttctgatgcagtcagagctcactgcttctcagaacagatccactcagaaggaactccagtttctgatgtttattttactttttcttccccccaaacaaggcacaaaaggggaaaatgaaagggacacaagaaaaaagaatcaagggtcttactgaccccatcacacacctcctctaatgtcatggctggaaggaaataagaagcccttcctcgggagaatgccagaggcccttgattgaagtcaaggacataagggatgacctcctcccagtccccagccctcaccttcgccttgcgtttgctgtcatccatgatcatcttccagtccgagccgttgttgctgtacccgatcttgaacttcctcatgaacaccttgttctctcggtgcttcccaccctgaatgatgatgcccctcacgatcttctcctcccccaggtctatttggagccactcattgatgtaggaatgaggtgcgggtggaagtgcccagccagagcgactggttaccaggcggatgttttcaggcatccagtttctgtccccttggttggatgatgtgatctgggagtcagaaataagtccagacaccatacccaacattccagagcaaggataatctgggaagtgaaatgaaacagataatgtaaaatgatttcctgggcgactccatgctaagaaataaaatacaacatatggaataaaga

SEQ ID NO: 19843 - protein, 49 aa, Homo sapiens
MQSELTASQNRSTQKELQFLMFILLFLPPKQGTKGENERDTRKKNQGSY

SEQ ID NO: 19844 - DNA, 4137 bp, Homo sapiens
gcagggtctctgggaaagacagacagacggacggggagagcactcggagggaaagttgttcctcccagtctcctgtcaggcaattacagacacccggacctcccctgggcgccagctccgcggctccaacgggtccagaaacaagccggattttttttttttcttcctggaaattggctttggtgtgtgttgccctacctccctcctccccctcccacccacagcccccccccggccttttttttttttttttttttttttgagacatggcccgggcagtggctcctggaagaggaacaagtgtgggaaaagggagaggaagccggagctaaatgacaggatgcaggcgacttgagacacaaaaagagaagcgttcctctcggatccaggcattgcctcgctgctttcttttctccaagacgggctgaggattgtacagctctaggcggagttggggctcttcggatcgcttagattctcctctttgctgcatttccccccacgtcctcgttctcccgcgtctgcctgcggacccggagaagggagaatggagagggggctgccgctcctctgcgccgtgctcgccctcgtcctcgccccggccggcgcttttcgcaacgataaatgtggcgatactataaaaattgaaagccccgggtaccttacatctcctggttatcctcattcttatcacccaagtgaaaaatgcgaatggctgattcaggctccggacccataccagagaattatgatcaacttcaaccctcacttcgatttggaggacagagactgcaagtatgactacgtggaagtcttcgatggagaaaatgaaaatggacattttaggggaaagttctgtggaaagatagcccctcctcctgttgtgtcttcagggccatttctttttatcaaatttgtctctgactacgaaacacatggtgcaggattttccatacgttatgaaattttcaagagaggtcctgaatgttcccagaactacacaacacctagtggagtgataaagtcccccggattccctgaaaaatatcccaacagccttgaatgcacttatattgtctttgtgccaaagatgtcagagattatcctggaatttgaaagctttgacctggagcctgactcaaatcctccaggggggatgttctgtcgctacgaccggctagaaatctgggatggattccctgatgttggccctcacattgggcgttactgtggacagaaaacaccaggtcgaatccgatcctcatcgggcattctctccatggttttttacaccgacagcgcgatagcaaaagaaggtttctcagcaaactacagtgtcttgcagagcagtgtctcagaagatttcaaatgtatggaagctctgggcatggaatcaggagaaattcattctgaccagatcacagcttcttcccagtatagcaccaactggtctgcagagcgctcccgcctgaactaccctgagaatgggtggactcccggagaggattcctaccgagagtggatacaggtagacttgggccttctgcgctttgtcacggctgtcgggacacagggcgccatttcaaaagaaaccaagaagaaatattatgtcaagacttacaagatcgacgttagctccaacggggaagactggatcaccataaaagaaggaaacaaacctgttctctttcagggaaacaccaaccccacagatgttgtggttgcagtattccccaaaccactgataactcgatttgtccgaatcaagcctgcaacttgggaaactggcatatctatgagatttgaagtatacggttgcaagataacagattatccttgctctggaatgttgggtatggtgtctggacttatttctgactcccagatcacatcatccaaccaaggggacagaaactggatgcctgaaaacatccgcctggtaaccagtcgctctggctgggcacttccacccgcacctcattcctacatcaatgagtggctccaaatagacctgggggaggagaagatcgtgaggggcatcatcattcagggtgggaagcaccgagagaacaaggtgttcatgaggaagttcaagatcgggtacagcaacaacggctcggactggaagatgatcatggatgacagcaaacgcaaggcgaaggtgagggctggggactgggaggaggtcatcccttatgtccttgacttcaatcaagggcctctggcattctcccgaggaagggcttcttatttccttccagccatgacattagaggaggtgtgtgatggggtcagtaagacccttgattctaggaagacaggaatatggcatgaaaagtgatgtctgagataacatgcaaaagaattgcattgctggtcccattccctggctgtagggatggacagacagctcaacatgcagacaggagacggggaagcccaaggctgacagcagccatccagccagcgctcagaaccccttgcagataccactcagtcgtttgggtctgccctccccccatctcaaacctacccctagtttaagtgctttgtttcttttataaatttttattgtgggccaggctcagtggctcatgcctgtaatcccagcactttgggatgccgagtcgggcggattgtctgagctcaggagttcgagaccagactggacagcacggtgaaaccccatctctactaaaatacaaaaaattaacagggtgtggcagcgtgtgcctgtagtcctagctattctggaggctgaagcaggagaattgcttaaacccgggaggcagaggttgcagtgagctgagattgcaccactgctctctagcctgggtgacagagtgagattccgtctcaaaaaaaaaaaattaattgtgataaaatacatataatatacaatttcccatcttaacctttttagtgtgcagttcaacagtgttaagtatgtgtatattgtgcaaccaatctctagaactttctcatcttgcaaaactgaaactctacacccattaagcaacaactcccagtccccctgcccccagcctctggtgaccacctccactttctgtctgtgtgaattcaaccattttagggacctcatactgtatttgtctttttgtgattggcttatgtcacttaggataatgttttcaagggccatcagtgttatagcattgtgtcagaatttccatccttcgaaaggctggataatattcattgtgtgtttataccacactttgtttatccattcagccactgatggacacttgaattgctgtcacctttagctattgtgaataatgcttaagtatatttctttatgcgttgaaaccttttaagatgcagtaggctcttgataatccagtgaaaagaaaaggaaatctcaacacaaaaacattccattccaacatccaccaaaacccgtggtataatttttttcaaccaacaaatcaacctcagtcattatgttttacttagagtgatggctaaatttatttgcgaacatgcaacagcaacttggaaaggataccctggagtgtgctgggtggcccagaagctggtttaggattcaaatatggaccaacctacagacaactagcagtttaagttctgtgttcagtgtgggaattatattcagcgatggtatttctcacaccaatacaattggccttttggtcttagcctttccatccctgctttggccaggacctactcctcttgtgaaaaacagattttagcttattgaagggaatattaccctcactcccactctaagcaagtgtgggaacatggcttaatatagtgactcaagccagaggcattgcaggcagcaaagaagccaggctgtgctgccagctcccactccctccagatgtgaaggctccaaggaaacctccgtgtccccgacaggccaccggctaccactagagcagcgggccactggcagggctgggtgccatcagaaatatctgaatctctctcccatctctcccttccttaacttgtggtttctaaaatattttcagtgttatatttatctctctgtgcagctaccttttttcttgtgtccctttcattttccccttttgtgccttgtttggggggaagaaaaagtaaaataaacatcagaaactg

SEQ ID NO: 19845 - protein, 597 aa, Homo sapiens
MERGLPLLCAVLALVLAPAGAFRNDKCGDTIKIESPGYLTSPGYPHSYHPSEKCEWLIQAPDPYQRIMINFNPHFDLEDRDCKYDYVEVFDGENENGHFRGKFCGKIAPPPVVSSGPFLFIKFVSDYETHGAGFSIRYEIFKRGPECSQNYTTPSGVIKSPGFPEKYPNSLECTYIVFVPKMSEIILEFESFDLEPDSNPPGGMFCRYDRLEIWDGFPDVGPHIGRYCGQKTPGRIRSSSGILSMVFYTDSAIAKEGFSANYSVLQSSVSEDFKCMEALGMESGEIHSDQITASSQYSTNWSAERSRLNYPENGWTPGEDSYREWIQVDLGLLRFVTAVGTQGAISKETKKKYYVKTYKIDVSSNGEDWITIKEGNKPVLFQGNTNPTDVVVAVFPKPLITRFVRIKPATWETGISMRFEVYGCKITDYPCSGMLGMVSGLISDSQITSSNQGDRNWMPENIRLVTSRSGWALPPAPHSYINEWLQIDLGEEKIVRGIIIQGGKHRENKVFMRKFKIGYSNNGSDWKMIMDDSKRKAKVRAGDWEEVIPYVLDFNQGPLAFSRGRASYFLPAMTLEEVCDGVSKTLDSRKTGIWHEK

SEQ ID NO: 19846 - DNA, 2321 bp, Homo sapiens
cgggcagtggctcctggaagaggaacaagtgtgggaaaagggagaggaagccggagctaaatgacaggatgcaggcgacttgagacacaaaaagagaagcgttcctctcggatccaggcattgcctcgctgctttcttttctccaagacgggctgaggattgtacagctctaggcggagttggggctcttcggatcgcttagattctcctctttgctgcatttccccccacgtcctcgttctcccgcgtctgcctgcggacccggagaagggagaatggagagggggctgccgctcctctgcgccgtgctcgccctcgtcctcgccccggccggcgcttttcgcaacgataaatgtggcgatactataaaaattgaaagccccgggtaccttacatctcctggttatcctcattcttatcacccaagtgaaaaatgcgaatggctgattcaggctccggacccataccagagaattatgatcaacttcaaccctcacttcgatttggaggacagagactgcaagtaagtgggaatgtttttgaacagggcaccacagcaccatctagtggtcacgcctgtctacgggggggaagtcggtgtgtacaatgtagattataaatggatccaggagggattccaatctcagccagattatatgtcaatggtatggaaattgaagtacgttaagtgatttctgagttccccaaaccaggaagattatagttaaatgtgtaagctcttatactccttcctgttagcacttttggtttgggaactcttgttaagaaatgtatacagtatgtatgtttcttttttctttctttttttttttttcctggagaggggaagaactagaaactcaaaaatctcacttgtatttttacgaaatacagtggatcactaatatacatcgcatccacagatagtgtgattggagatctcactatttgagatatattgaactgtggcacatcttatgatttaagaactgcattcatcttactaagtaagtttgacatggaaaaagcaaattgaataaaataaggcctacaggataagccagatgaggggttttgtaaatggtggattactgattaaaatacttttatggaaaatgctagaaaataattgttaagacacgatgaatacaatgggaactcaaatacacatcagtgtttcatccacctgcttagtcttgctatctctttctattgttaagtttctaaacatcaacttatgcccaatttcgttattatgaagacattctcactatagagacagtcgaaattatatttcctcactttatgtgaaagaactggtatgtggatattgctttccacagtatcgaaagtatgtttttaccttgcacgtagcagtccactcagatacatgtttgctcgtctctcttaacacccaacagaccccctgtctctgtcttgtccacattatcccattctgacccactgaaagtggtgtagtctccagagacttgaacctgaatatccatcttttaagtttgtacatatataaatagttttatcaaagaaaaataatcgatttaaatctcaattctaaagtgtttctcagggactgagaggttttcacaagttttaaagtgggtcagtttggtgtaaccgtatatgatatctacagactactgctaccgctggacctaaatattattttgcaagtatattcattgttaaagacagtctatttgaacacacatttcttttgggaaagaacagagtaatatcaaaatcttcctacctgtaggaagtgctcgacaacctgttgagttggtttagtaaactagcttttcatggtcagagagatgaggtcatttggttcattcaacattttagtatctagagaattagcataaatccacaggctgatgaccagtttccaaataatcagtgtatactacagtgcaacaaaattacaccaattccaatttatctttgctttgtgattcagaagtgcctcagggcattatattgactttttaattgtgtatggaagttaccattaatagtgttccagtgactgcttggaaacaaagagttcattgtattgatttatttatttttgctaatattctttatggtggtttttacagtgtcaatcacctagacaatctggagacttgttttcttttatatttgatttacttcattagtagtagcagtagttattagtatttgctttttgaccatgtttaaactgctataggagaaactctggtaaaacatactcaagtaataacattattccaaaaaataaagtgctgttagaattcaataaactgacgtttact

SEQ ID NO: 19847 - protein, 83 aa, Homo sapiens
MERGLPLLCAVLALVLAPAGAFRNDKCGDTIKIESPGYLTSPGYPHSYHPSEKCEWLIQAPDPYQRIMINFNPHFDLEDRDCK

SEQ ID NO: 19848 - DNA, 1876 bp, Homo sapiens
aaccccagcagccgactcgaccccaggagcagagtacaggagacaccatggggagagaccctggtgtgtccttcaaggctgttggtctacaacctgctggagatgtaaatttgccatgacttcctggaggacagcagcatggagaaagatcctagaaaaggtcagacccaactcaggccttggtgtccctggactgcaagtgtggaaggagggaaagcctggtttacctctctctgcatctgagctctgctacccatggagcagatggatggtgggaacaggaaagagcttatgttacacctcattcccatgcttagcccacccagagctaacccctgtcttcttccccaggcctctgacttccctcacctcccaaccatcattacaggaaagactgtgaactcctgagttcagcttgatttctgactacatcccagcaagctctggcatctgtggattaaaatccctggatctctctcagttgtgtatttgttcatcttcatatgctggcaggaacaactattaatacagatactcagaagccaataacatgacaggagctgggactggtttgaacacagggtgtgcagatggggagggggtactggccttgggcctcctatgatgcagacatggtgaatttaattcaaggaggaggagaatgttttaggcaggtggttatatgtgggaagataattttattcatggatccaaatgtttgttgagtcctttctttgtgctaaggttcttgcggtgaaccagaattataacagtgagctcatctgactgttttaggatgtacagcctagtgttaacattcttggtatctttttgtgccttatctaaaacatttctcgatcactggtttcagatgttcatttattatattcttttcaaagattcagagattggcttttgtcatccactattgtatgttttgtttcattgacctctagtgataccttgatctttcccactttctgttttcggattggagaagatgtaccttttttgtcaactcttacttttatcagatgatcaactcacgtatttggatctttatttgttttctcaaataaatatttaaggttatacatttcttctgacttcctttattttcacaatcattcaattcatagcatttcctatattctgttataattatttcattgattcataaatttctttgaaaaataatttggtcttctattgattgtgagaagataatctaagtttaatttggtcagagaatatcatctgtttaataaactttgaaatttggtgagtgaattatcttttttactgataaagagtgatgtcatcttttttaatgtttcacataggtttggaaagaatgcattttagattgtgtgtagtattttctattagattatgtttgcaatttttgtttcaatttatatcttatatacttaattttttgttgtctgtcacctgagaggtgtgttcaaatctccaactatgatagtggatttgtgcatttgtctttatagttccattttcttacatactttgcagttactttattaaggtatatgtaaatttacatttatatttttcttctgaactgaactctttgtgtggtagcctgcttcatctataggctaatgtgtttaaccttgaaaactactagttttaatattaatataactgtcaattcttttggttaccctttgcttgacatcctttctcttgaatttccattcttttttagtttcaacctttctttatatttaccacttgtatacagcatttaaagggttatttataaaaaaaaaaaaaactcttgtcacatttgtctttatgattttctagttgtgtcaattttttatttgctttctcttggctttttatttat

SEQ ID NO: 19849 - protein, 94 aa, Homo sapiens
MTSWRTAAWRKILEKVRPNSGLGVPGLQVWKEGKPGLPLSASELCYPWSRWMVGTGKSLCYTSFPCLAHPELTPVFFPRPLTSLTSQPSLQERL

SEQ ID NO: 19850 - DNA, 1712 bp, Homo sapiens
ctgaggcagagaatcttccagatgataaaccccagcagccgactcgaccccaggagcagagtacaggagacaccatggggagagaccctggtgtgtccttcaaggctgttggtctacaacctgctggagatgtaaatttgccatgacttcctggaggacagcagcatggagaaagatcctagaaaaggcctctgacttccctcacctcccaaccatcattacaggaaagactgtgaactcctgagttcagcttgatttctgactacatcccagcaagctctggcatctgtggattaaaatccctggatctctctcagttgtgtatttgttcatcttcatatgctggcaggaacaactattaatacagatactcagaagccaataacatgacaggagctgggactggtttgaacacagggtgtgcagatggggagggggtactggccttgggcctcctatgatgcagacatggtgaatttaattcaaggaggaggagaatgttttaggcaggtggttatatgtgggaagataattttattcatggatccaaatgtttgttgagtcctttctttgtgctaaggttcttgcggtgaaccagaattataacagtgagctcatctgactgttttaggatgtacagcctagtgttaacattcttggtatctttttgtgccttatctaaaacatttctcgatcactggtttcagatgttcatttattatattcttttcaaagattcagagattggcttttgtcatccactattgtatgttttgtttcattgacctctagtgataccttgatctttcccactttctgttttcggattggagaagatgtaccttttttgtcaactcttacttttatcagatgatcaactcacgtatttggatctttatttgttttctcaaataaatatttaaggttatacatttcttctgacttcctttattttcacaatcattcaattcatagcatttcctatattctgttataattatttcattgattcataaatttctttgaaaaataatttggtcttctattgattgtgagaagataatctaagtttaatttggtcagagaatatcatctgtttaataaactttgaaatttggtgagtgaattatcttttttactgataaagagtgatgtcatcttttttaatgtttcacataggtttggaaagaatgcattttagattgtgtgtagtattttctattagattatgtttgcaatttttgtttcaatttatatcttatatacttaattttttgttgtctgtcacctgagaggtgtgttcaaatctccaactatgatagtggatttgtgcatttgtctttatagttccattttcttacatactttgcagttactttattaaggtatatgtaaatttacatttatatttttcttctgaactgaactctttgtgtggtagcctgcttcatctataggctaatgtgtttaaccttgaaaactactagttttaatattaatataactgtcaattcttttggttaccctttgcttgacatcctttctcttgaatttccattcttttttagtttcaacctttctttatatttaccacttgtatacagcatttaaagggttatttataaaaaaaaaaaaaactcttgtcacatttgtctttatgattttctagttgtgtcaattttttatttgctttctcttggctttttatttat

SEQ ID NO: 19851 - protein, 37 aa, Homo sapiens
MINPSSRLDPRSRVQETPWGETLVCPSRLLVYNLLEM

SEQ ID NO: 19852 - DNA, 1596 bp, Homo sapiens
ttgacagggtgtttcagaaacttggaaacctgaagcacccacccagagctaacccctgtcttcttccccaggcctctgacttccctcacctcccaaccatcattacaggaaagactgtgaactcctgagttcagcttgatttctgactacatcccagcaagctctggcatctgtggattaaaatccctggatctctctcagttgtgtatttgttcatcttcatatgctggcaggaacaactattaatacagatactcagaagccaataacatgacaggagctgggactggtttgaacacagggtgtgcagatggggagggggtactggccttgggcctcctatgatgcagacatggtgaatttaattcaaggaggaggagaatgttttaggcaggtggttatatgtgggaagataattttattcatggatccaaatgtttgttgagtcctttctttgtgctaaggttcttgcggtgaaccagaattataacagtgagctcatctgactgttttaggatgtacagcctagtgttaacattcttggtatctttttgtgccttatctaaaacatttctcgatcactggtttcagatgttcatttattatattcttttcaaagattcagagattggcttttgtcatccactattgtatgttttgtttcattgacctctagtgataccttgatctttcccactttctgttttcggattggagaagatgtaccttttttgtcaactcttacttttatcagatgatcaactcacgtatttggatctttatttgttttctcaaataaatatttaaggttatacatttcttctgacttcctttattttcacaatcattcaattcatagcatttcctatattctgttataattatttcattgattcataaatttctttgaaaaataatttggtcttctattgattgtgagaagataatctaagtttaatttggtcagagaatatcatctgtttaataaactttgaaatttggtgagtgaattatcttttttactgataaagagtgatgtcatcttttttaatgtttcacataggtttggaaagaatgcattttagattgtgtgtagtattttctattagattatgtttgcaatttttgtttcaatttatatcttatatacttaattttttgttgtctgtcacctgagaggtgtgttcaaatctccaactatgatagtggatttgtgcatttgtctttatagttccattttcttacatactttgcagttactttattaaggtatatgtaaatttacatttatatttttcttctgaactgaactctttgtgtggtagcctgcttcatctataggctaatgtgtttaaccttgaaaactactagttttaatattaatataactgtcaattcttttggttaccctttgcttgacatcctttctcttgaatttccattcttttttagtttcaacctttctttatatttaccacttgtatacagcatttaaagggttatttataaaaaaaaaaaaaactcttgtcacatttgtctttatgattttctagttgtgtcaattttttatttgctttctcttggctttttatttat

SEQ ID NO: 19853 - protein, 50 aa, Homo sapiens
MYSLVLTFLVSFCALSKTFLDHWFQMFIYYILFKDSEIGFCHPLLYVLFH

SEQ ID NO: 19854 - DNA, 2319 bp, Homo sapiens
ggactctcagaagaaagacaagctgctctgcagccagcttcaggtagcggatttcctgcagaacatcctggctcaggaggacactgctaagggtctcgaccccttggcttctgaagacacgagccgacagaaggcaattgcagctaaggaacaatggaaagagctgaaggccacctacagggagcacgtagaggccatcaaaattggcctcaccaaggccctgactcagatggaggaagcccagaggaaacggacacaactccgggaagcctttgagcagctccaggccaagaaacaaatggccatggagaaacgcagagcagtccagaaccagtggcagctacaacaggagaagcatctgcagcatctggcggaggtttctgcagagggtaagctgttgttccctgaggctgaggctgaggcagagaatcttccagatgataaaccccagcagccgactcgaccccaggagcagagtacaggagacaccatggggagagaccctggtgtgtccttcaaggctgttggtctacaacctgctggagatgtaaatttgccatgacttcctggaggacagcagcatggagaaagatcctagaaaaggtcagacccaactcaggccttggtgtccctggactgcaagtgtggaaggagggaaagcctggtttacctctctctgcatctgagctctgctacccatggagcagatggatggtgggaacaggaaagagcttatgttacacctcattcccatgcttagcccacccagagctaacccctgtcttcttccccaggcctctgacttccctcacctcccaaccatcattacaggaaagactgtgaactcctgagttcagcttgatttctgactacatcccagcaagctctggcatctgtggattaaaatccctggatctctctcagttgtgtatttgttcatcttcatatgctggcaggaacaactattaatacagatactcagaagccaataacatgacaggagctgggactggtttgaacacagggtgtgcagatggggagggggtactggccttgggcctcctatgatgcagacatggtgaatttaattcaaggaggaggagaatgttttaggcaggtggttatatgtgggaagataattttattcatggatccaaatgtttgttgagtcctttctttgtgctaaggttcttgcggtgaaccagaattataacagtgagctcatctgactgttttaggatgtacagcctagtgttaacattcttggtatctttttgtgccttatctaaaacatttctcgatcactggtttcagatgttcatttattatattcttttcaaagattcagagattggcttttgtcatccactattgtatgttttgtttcattgacctctagtgataccttgatctttcccactttctgttttcggattggagaagatgtaccttttttgtcaactcttacttttatcagatgatcaactcacgtatttggatctttatttgttttctcaaataaatatttaaggttatacatttcttctgacttcctttattttcacaatcattcaattcatagcatttcctatattctgttataattatttcattgattcataaatttctttgaaaaataatttggtcttctattgattgtgagaagataatctaagtttaatttggtcagagaatatcatctgtttaataaactttgaaatttggtgagtgaattatcttttttactgataaagagtgatgtcatcttttttaatgtttcacataggtttggaaagaatgcattttagattgtgtgtagtattttctattagattatgtttgcaatttttgtttcaatttatatcttatatacttaattttttgttgtctgtcacctgagaggtgtgttcaaatctccaactatgatagtggatttgtgcatttgtctttatagttccattttcttacatactttgcagttactttattaaggtatatgtaaatttacatttatatttttcttctgaactgaactctttgtgtggtagcctgcttcatctataggctaatgtgtttaaccttgaaaactactagttttaatattaatataactgtcaattcttttggttaccctttgcttgacatcctttctcttgaatttccattcttttttagtttcaacctttctttatatttaccacttgtatacagcatttaaagggttatttataaaaaaaaaaaaaactcttgtcacatttgtctttatgattttctagttgtgtcaattttttatttgctttctcttggctttttatttat

SEQ ID NO: 19855 - protein, 110 aa, Homo sapiens
MEEAQRKRTQLREAFEQLQAKKQMAMEKRRAVQNQWQLQQEKHLQHLAEVSAEGKLLFPEAEAEAENLPDDKPQQPTRPQEQSTGDTMGRDPGVSFKAVGLQPAGDVNLP

SEQ ID NO: 19856 - DNA, 2069 bp, Homo sapiens
gaactcggcgcctggaaagatggaggcagcggagacagaggcggaagctgcagccctagaggtcctggctgaggtggcaggcatcttggaacctgtaggcctgcaggaggaggcagaactgccagccaagatcctggttgagtttgtggtggactctcagaagaaagacaagctgctctgcagccagcttcaggtagcggatttcctgcagaacatcctggctcaggaggacactgctaagggtctcgaccccttggcttctgaagacacgagcctggcagctacaacaggagaagcatctgcagcatctggcggaggtttctgcagagggtaagctgttgttccctgaggctgaggctgaggcagagaatcttccagatgataaaccccagcagccgactcgaccccaggagcagagtacaggagacaccatggggagagaccctggtgtgtccttcaaggctgttggtctacaacctgctggagatgtaaatttgccatgacttcctggaggacagcagcatggagaaagatcctagaaaaggcctctgacttccctcacctcccaaccatcattacaggaaagactgtgaactcctgagttcagcttgatttctgactacatcccagcaagctctggcatctgtggattaaaatccctggatctctctcagttgtgtatttgttcatcttcatatgctggcaggaacaactattaatacagatactcagaagccaataacatgacaggagctgggactggtttgaacacagggtgtgcagatggggagggggtactggccttgggcctcctatgatgcagacatggtgaatttaattcaaggaggaggagaatgttttaggcaggtggttatatgtgggaagataattttattcatggatccaaatgtttgttgagtcctttctttgtgctaaggttcttgcggtgaaccagaattataacagtgagctcatctgactgttttaggatgtacagcctagtgttaacattcttggtatctttttgtgccttatctaaaacatttctcgatcactggtttcagatgttcatttattatattcttttcaaagattcagagattggcttttgtcatccactattgtatgttttgtttcattgacctctagtgataccttgatctttcccactttctgttttcggattggagaagatgtaccttttttgtcaactcttacttttatcagatgatcaactcacgtatttggatctttatttgttttctcaaataaatatttaaggttatacatttcttctgacttcctttattttcacaatcattcaattcatagcatttcctatattctgttataattatttcattgattcataaatttctttgaaaaataatttggtcttctattgattgtgagaagataatctaagtttaatttggtcagagaatatcatctgtttaataaactttgaaatttggtgagtgaattatcttttttactgataaagagtgatgtcatcttttttaatgtttcacataggtttggaaagaatgcattttagattgtgtgtagtattttctattagattatgtttgcaatttttgtttcaatttatatcttatatacttaattttttgttgtctgtcacctgagaggtgtgttcaaatctccaactatgatagtggatttgtgcatttgtctttatagttccattttcttacatactttgcagttactttattaaggtatatgtaaatttacatttatatttttcttctgaactgaactctttgtgtggtagcctgcttcatctataggctaatgtgtttaaccttgaaaactactagttttaatattaatataactgtcaattcttttggttaccctttgcttgacatcctttctcttgaatttccattcttttttagtttcaacctttctttatatttaccacttgtatacagcatttaaagggttatttataaaaaaaaaaaaaactcttgtcacatttgtctttatgattttctagttgtgtcaattttttatttgctttctcttggctttttatttat

SEQ ID NO: 19857 - protein, 104 aa, Homo sapiens
MEAAETEAEAAALEVLAEVAGILEPVGLQEEAELPAKILVEFVVDSQKKDKLLCSQLQVADFLQNILAQEDTAKGLDPLASEDTSLAATTGEASAASGGGFCRG

SEQ ID NO: 19858 - DNA, 2741 bp, Homo sapiens
ggcagctgaactcggcgcctggaaagatggaggcagcggagacagaggcggaagctgcagccctagaggtcctggctgaggtggcaggcatcttggaacctgtaggcctgcaggaggaggcagaactgccagccaagatcctggttgagtttgtggtggtatgtacaagatgagagcgagcctttcagaagccagggtctggtcctggctcctcttactgagatacagggcagcactggcagagagcagacttaaggaaacctgtaaggaggtaaggatgttccctgtctctgccctccctctgagcaggactctcagaagaaagacaagctgctctgcagccagcttcaggtagcggatttcctgcagaacatcctggctcaggaggacactgctaagggtctcgaccccttggcttctgaagacacgagccgtgagtaggcaggggattgtagtagcagctgacctgagtggggaaggaaggaggatttcagttaggtctcccatttggctgatgggaaggaggcccagtgttgcagggaggcaggctagcaggccaccctcactcatgtactcattcctggtggctcatctcaggacagaaggcaattgcagctaaggaacaatggaaagagctgaaggccacctacagggagcacgtagaggccatcaaaattggcctcaccaaggccctgactcagatggaggaagcccagaggaaacggacacaactccgggaagcctttgagcagctccaggccaagaaacaaatggccatggagaaacgcagagcagtccagaaccagtggcagctacaacaggagaagcatctgcagcatctggcggaggtttctgcagaggtgagggagcgtaagacagggactcagcaggagcttgacagggtgtttcagaaacttggaaacctgaagcagcaggcagaacaggagcgggacaagctgcagaggtatcagaccttcctccagcttctgtataccctgcagggtaagctgttgttccctgaggctgaggctgaggcagagaatcttccagatgataaaccccagcagccgactcgaccccaggagcagagtacaggagacaccatggggagagaccctggtgtgtccttcaaggctgttggtctacaacctgctggagatgtaaatttgccatgacttcctggaggacagcagcatggagaaagatcctagaaaaggcctctgacttccctcacctcccaaccatcattacaggaaagactgtgaactcctgagttcagcttgatttctgactacatcccagcaagctctggcatctgtggattaaaatccctggatctctctcagttgtgtatttgttcatcttcatatgctggcaggaacaactattaatacagatactcagaagccaataacatgacaggagctgggactggtttgaacacagggtgtgcagatggggagggggtactggccttgggcctcctatgatgcagacatggtgaatttaattcaaggaggaggagaatgttttaggcaggtggttatatgtgggaagataattttattcatggatccaaatgtttgttgagtcctttctttgtgctaaggttcttgcggtgaaccagaattataacagtgagctcatctgactgttttaggatgtacagcctagtgttaacattcttggtatctttttgtgccttatctaaaacatttctcgatcactggtttcagatgttcatttattatattcttttcaaagattcagagattggcttttgtcatccactattgtatgttttgtttcattgacctctagtgataccttgatctttcccactttctgttttcggattggagaagatgtaccttttttgtcaactcttacttttatcagatgatcaactcacgtatttggatctttatttgttttctcaaataaatatttaaggttatacatttcttctgacttcctttattttcacaatcattcaattcatagcatttcctatattctgttataattatttcattgattcataaatttctttgaaaaataatttggtcttctattgattgtgagaagataatctaagtttaatttggtcagagaatatcatctgtttaataaactttgaaatttggtgagtgaattatcttttttactgataaagagtgatgtcatcttttttaatgtttcacataggtttggaaagaatgcattttagattgtgtgtagtattttctattagattatgtttgcaatttttgtttcaatttatatcttatatacttaattttttgttgtctgtcacctgagaggtgtgttcaaatctccaactatgatagtggatttgtgcatttgtctttatagttccattttcttacatactttgcagttactttattaaggtatatgtaaatttacatttatatttttcttctgaactgaactctttgtgtggtagcctgcttcatctataggctaatgtgtttaaccttgaaaactactagttttaatattaatataactgtcaattcttttggttaccctttgcttgacatcctttctcttgaatttccattcttttttagtttcaacctttctttatatttaccacttgtatacagcatttaaagggttatttataaaaaaaaaaaaaactcttgtcacatttgtctttatgattttctagttgtgtcaattttttatttgctttctcttggctttttatttat

SEQ ID NO: 19859 - protein, 157 aa, Homo sapiens
MEEAQRKRTQLREAFEQLQAKKQMAMEKRRAVQNQWQLQQEKHLQHLAEVSAEVRERKTGTQQELDRVFQKLGNLKQQAEQERDKLQRYQTFLQLLYTLQGKLLFPEAEAEAENLPDDKPQQPTRPQEQSTGDTMGRDPGVSFKAVGLQPAGDVNLP

SEQ ID NO: 19860 - DNA, 2439 bp, Homo sapiens
gaaggcagctgaactcggcgcctggaaagatggaggcagcggagacagaggcggaagctgcagccctagaggtcctggctgaggtggcaggcatcttggaacctgtaggcctgcaggaggaggcagaactgccagccaagatcctggttgagtttgtggtggtatgtacaagatgagagcgagcctttcagaagccagggtctggtcctggctcctcttactgagatacagggcagcactggcagagagcagacttaaggaaacctgtaaggaggtaaggatgttccctgtctctgccctccctctgagcaggactctcagaagaaagacaagctgctctgcagccagcttcaggtagcggatttcctgcagaacatcctggctcaggaggacactgctaagggtctcgaccccttggcttctgaagacacgagccgacagaaggcaattgcagctaaggaacaatggaaagagctgaaggccacctacagggagcacgtagaggccatcaaaattggcctcaccaaggccctgactcagatggaggaagcccagaggaaacggacacaactccgggaagcctttgagcagctccaggccaagaaacaaatggccatggagaaacgcagagcagtccagaaccagtggcagctacaacaggagaagcatctgcagcatctggcggaggtttctgcagagggtaagctgttgttccctgaggctgaggctgaggcagagaatcttccagatgataaaccccagcagccgactcgaccccaggagcagagtacaggagacaccatggggagagaccctggtgtgtccttcaaggctgttggtctacaacctgctggagatgtaaatttgccatgacttcctggaggacagcagcatggagaaagatcctagaaaaggcctctgacttccctcacctcccaaccatcattacaggaaagactgtgaactcctgagttcagcttgatttctgactacatcccagcaagctctggcatctgtggattaaaatccctggatctctctcagttgtgtatttgttcatcttcatatgctggcaggaacaactattaatacagatactcagaagccaataacatgacaggagctgggactggtttgaacacagggtgtgcagatggggagggggtactggccttgggcctcctatgatgcagacatggtgaatttaattcaaggaggaggagaatgttttaggcaggtggttatatgtgggaagataattttattcatggatccaaatgtttgttgagtcctttctttgtgctaaggttcttgcggtgaaccagaattataacagtgagctcatctgactgttttaggatgtacagcctagtgttaacattcttggtatctttttgtgccttatctaaaacatttctcgatcactggtttcagatgttcatttattatattcttttcaaagattcagagattggcttttgtcatccactattgtatgttttgtttcattgacctctagtgataccttgatctttcccactttctgttttcggattggagaagatgtaccttttttgtcaactcttacttttatcagatgatcaactcacgtatttggatctttatttgttttctcaaataaatatttaaggttatacatttcttctgacttcctttattttcacaatcattcaattcatagcatttcctatattctgttataattatttcattgattcataaatttctttgaaaaataatttggtcttctattgattgtgagaagataatctaagtttaatttggtcagagaatatcatctgtttaataaactttgaaatttggtgagtgaattatcttttttactgataaagagtgatgtcatcttttttaatgtttcacataggtttggaaagaatgcattttagattgtgtgtagtattttctattagattatgtttgcaatttttgtttcaatttatatcttatatacttaattttttgttgtctgtcacctgagaggtgtgttcaaatctccaactatgatagtggatttgtgcatttgtctttatagttccattttcttacatactttgcagttactttattaaggtatatgtaaatttacatttatatttttcttctgaactgaactctttgtgtggtagcctgcttcatctataggctaatgtgtttaaccttgaaaactactagttttaatattaatataactgtcaattcttttggttaccctttgcttgacatcctttctcttgaatttccattcttttttagtttcaacctttctttatatttaccacttgtatacagcatttaaagggttatttataaaaaaaaaaaaaactcttgtcacatttgtctttatgattttctagttgtgtcaattttttatttgctttctcttggctttttatttat

SEQ ID NO: 19861 - protein, 110 aa, Homo sapiens; identical to SEQ ID NO: 19855

SEQ ID NO: 19862 - DNA, 1873 bp, Homo sapiens
gtgggaaggcagctgaactcggcgcctggaaagatggaggcagcggagacagaggcggaagctgcagccctagaggtcctggctgaggtggcaggcatcttggaacctgtaggcctgcaggaggaggcagaactgccagccaagatcctggttgagtttgtggtggactctcagaagaaagacaagctgctctgcagccagcttcaggtagcggatttcctgcagaacatcctggctcaggaggacacctggtgtgtccttcaaggctgttggtctacaacctgctggagatgtaaatttgccatgacttcctggaggacagcagcatggagaaagatcctagaaaaggcctctgacttccctcacctcccaaccatcattacaggaaagactgtgaactcctgagttcagcttgatttctgactacatcccagcaagctctggcatctgtggattaaaatccctggatctctctcagttgtgtatttgttcatcttcatatgctggcaggaacaactattaatacagatactcagaagccaataacatgacaggagctgggactggtttgaacacagggtgtgcagatggggagggggtactggccttgggcctcctatgatgcagacatggtgaatttaattcaaggaggaggagaatgttttaggcaggtggttatatgtgggaagataattttattcatggatccaaatgtttgttgagtcctttctttgtgctaaggttcttgcggtgaaccagaattataacagtgagctcatctgactgttttaggatgtacagcctagtgttaacattcttggtatctttttgtgccttatctaaaacatttctcgatcactggtttcagatgttcatttattatattcttttcaaagattcagagattggcttttgtcatccactattgtatgttttgtttcattgacctctagtgataccttgatctttcccactttctgttttcggattggagaagatgtaccttttttgtcaactcttacttttatcagatgatcaactcacgtatttggatctttatttgttttctcaaataaatatttaaggttatacatttcttctgacttcctttattttcacaatcattcaattcatagcatttcctatattctgttataattatttcattgattcataaatttctttgaaaaataatttggtcttctattgattgtgagaagataatctaagtttaatttggtcagagaatatcatctgtttaataaactttgaaatttggtgagtgaattatcttttttactgataaagagtgatgtcatcttttttaatgtttcacataggtttggaaagaatgcattttagattgtgtgtagtattttctattagattatgtttgcaatttttgtttcaatttatatcttatatacttaattttttgttgtctgtcacctgagaggtgtgttcaaatctccaactatgatagtggatttgtgcatttgtctttatagttccattttcttacatactttgcagttactttattaaggtatatgtaaatttacatttatatttttcttctgaactgaactctttgtgtggtagcctgcttcatctataggctaatgtgtttaaccttgaaaactactagttttaatattaatataactgtcaattcttttggttaccctttgcttgacatcctttctcttgaatttccattcttttttagtttcaacctttctttatatttaccacttgtatacagcatttaaagggttatttataaaaaaaaaaaaaactcttgtcacatttgtctttatgattttctagttgtgtcaattttttatttgctttctcttggctttttatttat

SEQ ID NO: 19863 - protein, 123 aa, Homo sapiens
MEAAETEAEAAALEVLAEVAGILEPVGLQEEAELPAKILVEFVVDSQKKDKLLCSQLQVADFLQNILAQEDTWCVLQGCWSTTCWRCKFAMTSWRTAAWRKILEKASDFPHLPTIITGKTVNS

SEQ ID NO: 19864 - DNA, 2295 bp, Homo sapiens
attgtgggaaggcagctgaactcggcgcctggaaagatggaggcagcggagacagaggcggaagctgcagccctagaggtcctggctgaggtggcaggcatcttggaacctgtaggcctgcaggaggaggcagaactgccagccaagatcctggttgagtttgtggtggactctcagaagaaagacaagctgctctgcagccagcttcaggtagcggatttcctgcagaacatcctggctcaggaggacactgctaagggtctcgaccccttggcttctgaagacacgagccgacagaaggcaattgcagctaaggaacaatggaaagagctgaaggccacctacagggagcacgtagaggccatcaaaattggcctcaccaaggccctgactcagatggaggaagcccagaggaaacggacacaactccgggaagcctttgagcagctccaggccaagaaacaaatggccatggagaaacgcagagcagtccagaaccagtggcagctacaacaggagaagcatctgcagcatctggcggaggtttctgcagagggtaagctgttgttccctgaggctgaggctgaggcagagaatcttccagatgataaaccccagcagccgactcgaccccaggagcagagtacaggagacaccatggggagagaccctggtgtgtccttcaaggctgttggtctacaacctgctggagatgtaaatttgccatgacttcctggaggacagcagcatggagaaagatcctagaaaaggcctctgacttccctcacctcccaaccatcattacaggaaagactgtgaactcctgagttcagcttgatttctgactacatcccagcaagctctggcatctgtggattaaaatccctggatctctctcagttgtgtatttgttcatcttcatatgctggcaggaacaactattaatacagatactcagaagccaataacatgacaggagctgggactggtttgaacacagggtgtgcagatggggagggggtactggccttgggcctcctatgatgcagacatggtgaatttaattcaaggaggaggagaatgttttaggcaggtggttatatgtgggaagataattttattcatggatccaaatgtttgttgagtcctttctttgtgctaaggttcttgcggtgaaccagaattataacagtgagctcatctgactgttttaggatgtacagcctagtgttaacattcttggtatctttttgtgccttatctaaaacatttctcgatcactggtttcagatgttcatttattatattcttttcaaagattcagagattggcttttgtcatccactattgtatgttttgtttcattgacctctagtgataccttgatctttcccactttctgttttcggattggagaagatgtaccttttttgtcaactcttacttttatcagatgatcaactcacgtatttggatctttatttgttttctcaaataaatatttaaggttatacatttcttctgacttcctttattttcacaatcattcaattcatagcatttcctatattctgttataattatttcattgattcataaatttctttgaaaaataatttggtcttctattgattgtgagaagataatctaagtttaatttggtcagagaatatcatctgtttaataaactttgaaatttggtgagtgaattatcttttttactgataaagagtgatgtcatcttttttaatgtttcacataggtttggaaagaatgcattttagattgtgtgtagtattttctattagattatgtttgcaatttttgtttcaatttatatcttatatacttaattttttgttgtctgtcacctgagaggtgtgttcaaatctccaactatgatagtggatttgtgcatttgtctttatagttccattttcttacatactttgcagttactttattaaggtatatgtaaatttacatttatatttttcttctgaactgaactctttgtgtggtagcctgcttcatctataggctaatgtgtttaaccttgaaaactactagttttaatattaatataactgtcaattcttttggttaccctttgcttgacatcctttctcttgaatttccattcttttttagtttcaacctttctttatatttaccacttgtatacagcatttaaagggttatttataaaaaaaaaaaaaactcttgtcacatttgtctttatgattttctagttgtgtcaattttttatttgctttctcttggctttttatttat

SEQ ID NO: 19865 - protein, 230 aa, Homo sapiens; identical to SEQ ID NO: 2491

SEQ ID NO: 19866 - DNA, 2630 bp, Homo sapiens
gggattgtgggaaggcagctgaactcggcgcctggaaagatggaggcagcggagacagaggcggaagctgcagccctagaggtcctggctgaggtggcaggcatcttggaacctgtaggcctgcaggaggaggcagaactgccagccaagatcctggttgagtttgtggtggactctcagaagaaagacaagctgctctgcagccagcttcaggtagcggatttcctgcagaacatcctggctcaggaggacactgctaagggtctcgaccccttggcttctgaagacacgagccgacagaaggcaattgcagctaaggaacaatggaaagagctgaaggccacctacagggagcacgtagaggccatcaaaattggcctcaccaaggccctgactcagatggaggaagcccagaggaaacggacacaactccgggaagcctttgagcagctccaggccaagaaacaaatggccatggagaaacgcagagcagtccagaaccagtggcagctacaacaggagaagcatctgcagcatctggcggaggtttctgcagaggtgagggagcgtaagacagggactcagcaggagcttgacagggtgtttcagaaacttggaaacctgaagcagcaggcagaacaggagcgggacaagctgcagaggtatcagaccttcctccagcttctgtataccctgcagggtaagctgttgttccctgaggctgaggctgaggcagagaatcttccagatgataaaccccagcagccgactcgaccccaggagcagagtacaggagacaccatggggagagaccctggtgtgtccttcaaggctgttggtctacaacctgctggagatgtaaatttgccatgacttcctggaggacagcagcatggagaaagatcctagaaaaggtcagacccaactcaggccttggtgtccctggactgcaagtgtggaaggagggaaagcctggtttacctctctctgcatctgagctctgctacccatggagcagatggatggtgggaacaggaaagagcttatgttacacctcattcccatgcttagcccacccagagctaacccctgtcttcttccccaggcctctgacttccctcacctcccaaccatcattacaggaaagactgtgaactcctgagttcagcttgatttctgactacatcccagcaagctctggcatctgtggattaaaatccctggatctctctcagttgtgtatttgttcatcttcatatgctggcaggaacaactattaatacagatactcagaagccaataacatgacaggagctgggactggtttgaacacagggtgtgcagatggggagggggtactggccttgggcctcctatgatgcagacatggtgaatttaattcaaggaggaggagaatgttttaggcaggtggttatatgtgggaagataattttattcatggatccaaatgtttgttgagtcctttctttgtgctaaggttcttgcggtgaaccagaattataacagtgagctcatctgactgttttaggatgtacagcctagtgttaacattcttggtatctttttgtgccttatctaaaacatttctcgatcactggtttcagatgttcatttattatattcttttcaaagattcagagattggcttttgtcatccactattgtatgttttgtttcattgacctctagtgataccttgatctttcccactttctgttttcggattggagaagatgtaccttttttgtcaactcttacttttatcagatgatcaactcacgtatttggatctttatttgttttctcaaataaatatttaaggttatacatttcttctgacttcctttattttcacaatcattcaattcatagcatttcctatattctgttataattatttcattgattcataaatttctttgaaaaataatttggtcttctattgattgtgagaagataatctaagtttaatttggtcagagaatatcatctgtttaataaactttgaaatttggtgagtgaattatcttttttactgataaagagtgatgtcatcttttttaatgtttcacataggtttggaaagaatgcattttagattgtgtgtagtattttctattagattatgtttgcaatttttgtttcaatttatatcttatatacttaattttttgttgtctgtcacctgagaggtgtgttcaaatctccaactatgatagtggatttgtgcatttgtctttatagttccattttcttacatactttgcagttactttattaaggtatatgtaaatttacatttatatttttcttctgaactgaactctttgtgtggtagcctgcttcatctataggctaatgtgtttaaccttgaaaactactagttttaatattaatataactgtcaattcttttggttaccctttgcttgacatcctttctcttgaatttccattcttttttagtttcaacctttctttatatttaccacttgtatacagcatttaaagggttatttataaaaaaaaaaaaaactcttgtcacatttgtctttatgattttctagttgtgtcaattttttatttgctttctcttggctttttatttat

SEQ ID NO: 19867 - protein, 277 aa, Homo sapiens; identical to SEQ ID NO: 2495

SEQ ID NO: 19868 - DNA, 2439 bp, Homo sapiens
gggattgtgggaaggcagctgaactcggcgcctggaaagatggaggcagcggagacagaggcggaagctgcagccctagaggtcctggctgaggtggcaggcatcttggaacctgtaggcctgcaggaggaggcagaactgccagccaagatcctggttgagtttgtggtggactctcagaagaaagacaagctgctctgcagccagcttcaggtagcggatttcctgcagaacatcctggctcaggaggacactgctaagggtctcgaccccttggcttctgaagacacgagccgacagaaggcaattgcagctaaggaacaatggaaagagctgaaggccacctacagggagcacgtagaggccatcaaaattggcctcaccaaggccctgactcagatggaggaagcccagaggaaacggacacaactccgggaagcctttgagcagctccaggccaagaaacaaatggccatggagaaacgcagagcagtccagaaccagtggcagctacaacaggagaagcatctgcagcatctggcggaggtttctgcagaggtgagggagcgtaagacagggactcagcaggagcttgacagggtgtttcagaaacttggaaacctgaagcagcaggcagaacaggagcgggacaagctgcagaggtatcagaccttcctccagcttctgtataccctgcagggtaagctgttgttccctgaggctgaggctgaggcagagaatcttccagatgataaaccccagcagccgactcgaccccaggagcagagtacaggagacaccatggggagagaccctggtgtgtccttcaaggctgttggtctacaacctgctggagatgtaaatttgccatgacttcctggaggacagcagcatggagaaagatcctagaaaaggcctctgacttccctcacctcccaaccatcattacaggaaagactgtgaactcctgagttcagcttgatttctgactacatcccagcaagctctggcatctgtggattaaaatccctggatctctctcagttgtgtatttgttcatcttcatatgctggcaggaacaactattaatacagatactcagaagccaataacatgacaggagctgggactggtttgaacacagggtgtgcagatggggagggggtactggccttgggcctcctatgatgcagacatggtgaatttaattcaaggaggaggagaatgttttaggcaggtggttatatgtgggaagataattttattcatggatccaaatgtttgttgagtcctttctttgtgctaaggttcttgcggtgaaccagaattataacagtgagctcatctgactgttttaggatgtacagcctagtgttaacattcttggtatctttttgtgccttatctaaaacatttctcgatcactggtttcagatgttcatttattatattcttttcaaagattcagagattggcttttgtcatccactattgtatgttttgtttcattgacctctagtgataccttgatctttcccactttctgttttcggattggagaagatgtaccttttttgtcaactcttacttttatcagatgatcaactcacgtatttggatctttatttgttttctcaaataaatatttaaggttatacatttcttctgacttcctttattttcacaatcattcaattcatagcatttcctatattctgttataattatttcattgattcataaatttctttgaaaaataatttggtcttctattgattgtgagaagataatctaagtttaatttggtcagagaatatcatctgtttaataaactttgaaatttggtgagtgaattatcttttttactgataaagagtgatgtcatcttttttaatgtttcacataggtttggaaagaatgcattttagattgtgtgtagtattttctattagattatgtttgcaatttttgtttcaatttatatcttatatacttaattttttgttgtctgtcacctgagaggtgtgttcaaatctccaactatgatagtggatttgtgcatttgtctttatagttccattttcttacatactttgcagttactttattaaggtatatgtaaatttacatttatatttttcttctgaactgaactctttgtgtggtagcctgcttcatctataggctaatgtgtttaaccttgaaaactactagttttaatattaatataactgtcaattcttttggttaccctttgcttgacatcctttctcttgaatttccattcttttttagtttcaacctttctttatatttaccacttgtatacagcatttaaagggttatttataaaaaaaaaaaaaactcttgtcacatttgtctttatgattttctagttgtgtcaattttttatttgctttctcttggctttttatttat

SEQ ID NO: 19869 - protein, 277 aa, Homo sapiens; identical to SEQ ID NO: 2495

SEQ ID NO: 19870 - DNA, 1294 bp, Homo sapiens
aaccccagcagccgactcgaccccaggagcagagtacaggagacaccatggggagagaccctggtgtgtccttcaaggctgttggtctacaacctgctggagatgtaaatttgccatgacttcctggaggacagcagcatggagaaagatcctagaaaaggtcagacccaactcaggccttggtgtccctggactgcaagtgtggaaggagggaaagcctggtttacctctctctgcatctgagctctgctacccatggagcagatggatggtgggaacaggaaagagcttatgttacacctcattcccatgcttagcccacccagagctaacccctgtcttcttccccaggcctctgacttccctcacctcccaaccatcattacaggaaagactgtgaactcctgagttcagcttgatttctgactacatcccagcaagctctggcatctgtggattaaaatccctggatctctctcagttgtgtatttgttcatcttcatatgctggcaggaacaactattaatacagatactcagaagccaataacatgacaggagctgggactggtttgaacacagggtgtgcagatggggagggggtactggccttgggcctcctatgatgcagacatggtgaatttaattcaaggaggaggagaatgttttaggcaggtggttatatgtgggaagataattttattcatggatccaaatgtttgttgagtcctttctttgtgctaaggttcttgcggtgaaccagaattataacagtgagctcatctgactgttttaggatgtacagcctagtgttaacattcttggtatctttttgtgccttatctaaaacatttctcgatcactggtttcagatgttcatttattatattcttttcaaagattcagagattggcttttgtcatccactattgtatgttttgtttcattgacctctagtgataccttgatctttcccactttctgttttcggattggagaagatgtaccttttttgtcaactcttacttttatcagatgatcaactcacgtatttggatctttatttgttttctcaaataaatatttaaggttatacatttcttctgacttcctttattttcacaatcattcaattcatagcatttcctatattctgttataattatttcattgattcataaatttctttgaaaaataatttggtcttctattgattgtgagaagataatctaagtttaatttggtcagagaatatcatctgtttaataaactttgaaatttggtgagtgaattat

SEQ ID NO: 19871 - protein, 94 aa, Homo sapiens; identical to SEQ ID NO: 19849

SEQ ID NO: 19872 - DNA, 1130 bp, Homo sapiens
ctgaggcagagaatcttccagatgataaaccccagcagccgactcgaccccaggagcagagtacaggagacaccatggggagagaccctggtgtgtccttcaaggctgttggtctacaacctgctggagatgtaaatttgccatgacttcctggaggacagcagcatggagaaagatcctagaaaaggcctctgacttccctcacctcccaaccatcattacaggaaagactgtgaactcctgagttcagcttgatttctgactacatcccagcaagctctggcatctgtggattaaaatccctggatctctctcagttgtgtatttgttcatcttcatatgctggcaggaacaactattaatacagatactcagaagccaataacatgacaggagctgggactggtttgaacacagggtgtgcagatggggagggggtactggccttgggcctcctatgatgcagacatggtgaatttaattcaaggaggaggagaatgttttaggcaggtggttatatgtgggaagataattttattcatggatccaaatgtttgttgagtcctttctttgtgctaaggttcttgcggtgaaccagaattataacagtgagctcatctgactgttttaggatgtacagcctagtgttaacattcttggtatctttttgtgccttatctaaaacatttctcgatcactggtttcagatgttcatttattatattcttttcaaagattcagagattggcttttgtcatccactattgtatgttttgtttcattgacctctagtgataccttgatctttcccactttctgttttcggattggagaagatgtaccttttttgtcaactcttacttttatcagatgatcaactcacgtatttggatctttatttgttttctcaaataaatatttaaggttatacatttcttctgacttcctttattttcacaatcattcaattcatagcatttcctatattctgttataattatttcattgattcataaatttctttgaaaaataatttggtcttctattgattgtgagaagataatctaagtttaatttggtcagagaatatcatctgtttaataaactttgaaatttggtgagtgaattat

SEQ ID NO: 19873 - protein, 37 aa, Homo sapiens; identical to SEQ ID NO: 19851

SEQ ID NO: 19874 - DNA, 1737 bp, Homo sapiens
ggactctcagaagaaagacaagctgctctgcagccagcttcaggtagcggatttcctgcagaacatcctggctcaggaggacactgctaagggtctcgaccccttggcttctgaagacacgagccgacagaaggcaattgcagctaaggaacaatggaaagagctgaaggccacctacagggagcacgtagaggccatcaaaattggcctcaccaaggccctgactcagatggaggaagcccagaggaaacggacacaactccgggaagcctttgagcagctccaggccaagaaacaaatggccatggagaaacgcagagcagtccagaaccagtggcagctacaacaggagaagcatctgcagcatctggcggaggtttctgcagagggtaagctgttgttccctgaggctgaggctgaggcagagaatcttccagatgataaaccccagcagccgactcgaccccaggagcagagtacaggagacaccatggggagagaccctggtgtgtccttcaaggctgttggtctacaacctgctggagatgtaaatttgccatgacttcctggaggacagcagcatggagaaagatcctagaaaaggtcagacccaactcaggccttggtgtccctggactgcaagtgtggaaggagggaaagcctggtttacctctctctgcatctgagctctgctacccatggagcagatggatggtgggaacaggaaagagcttatgttacacctcattcccatgcttagcccacccagagctaacccctgtcttcttccccaggcctctgacttccctcacctcccaaccatcattacaggaaagactgtgaactcctgagttcagcttgatttctgactacatcccagcaagctctggcatctgtggattaaaatccctggatctctctcagttgtgtatttgttcatcttcatatgctggcaggaacaactattaatacagatactcagaagccaataacatgacaggagctgggactggtttgaacacagggtgtgcagatggggagggggtactggccttgggcctcctatgatgcagacatggtgaatttaattcaaggaggaggagaatgttttaggcaggtggttatatgtgggaagataattttattcatggatccaaatgtttgttgagtcctttctttgtgctaaggttcttgcggtgaaccagaattataacagtgagctcatctgactgttttaggatgtacagcctagtgttaacattcttggtatctttttgtgccttatctaaaacatttctcgatcactggtttcagatgttcatttattatattcttttcaaagattcagagattggcttttgtcatccactattgtatgttttgtttcattgacctctagtgataccttgatctttcccactttctgttttcggattggagaagatgtaccttttttgtcaactcttacttttatcagatgatcaactcacgtatttggatctttatttgttttctcaaataaatatttaaggttatacatttcttctgacttcctttattttcacaatcattcaattcatagcatttcctatattctgttataattatttcattgattcataaatttctttgaaaaataatttggtcttctattgattgtgagaagataatctaagtttaatttggtcagagaatatcatctgtttaataaactttgaaatttggtgagtgaattat

SEQ ID NO: 19875 - protein, 110 aa, Homo sapiens; identical to SEQ ID NO: 19855

SEQ ID NO: 19876 - DNA, 1487 bp, Homo sapiens
gaactcggcgcctggaaagatggaggcagcggagacagaggcggaagctgcagccctagaggtcctggctgaggtggcaggcatcttggaacctgtaggcctgcaggaggaggcagaactgccagccaagatcctggttgagtttgtggtggactctcagaagaaagacaagctgctctgcagccagcttcaggtagcggatttcctgcagaacatcctggctcaggaggacactgctaagggtctcgaccccttggcttctgaagacacgagcctggcagctacaacaggagaagcatctgcagcatctggcggaggtttctgcagagggtaagctgttgttccctgaggctgaggctgaggcagagaatcttccagatgataaaccccagcagccgactcgaccccaggagcagagtacaggagacaccatggggagagaccctggtgtgtccttcaaggctgttggtctacaacctgctggagatgtaaatttgccatgacttcctggaggacagcagcatggagaaagatcctagaaaaggcctctgacttccctcacctcccaaccatcattacaggaaagactgtgaactcctgagttcagcttgatttctgactacatcccagcaagctctggcatctgtggattaaaatccctggatctctctcagttgtgtatttgttcatcttcatatgctggcaggaacaactattaatacagatactcagaagccaataacatgacaggagctgggactggtttgaacacagggtgtgcagatggggagggggtactggccttgggcctcctatgatgcagacatggtgaatttaattcaaggaggaggagaatgttttaggcaggtggttatatgtgggaagataattttattcatggatccaaatgtttgttgagtcctttctttgtgctaaggttcttgcggtgaaccagaattataacagtgagctcatctgactgttttaggatgtacagcctagtgttaacattcttggtatctttttgtgccttatctaaaacatttctcgatcactggtttcagatgttcatttattatattcttttcaaagattcagagattggcttttgtcatccactattgtatgttttgtttcattgacctctagtgataccttgatctttcccactttctgttttcggattggagaagatgtaccttttttgtcaactcttacttttatcagatgatcaactcacgtatttggatctttatttgttttctcaaataaatatttaaggttatacatttcttctgacttcctttattttcacaatcattcaattcatagcatttcctatattctgttataattatttcattgattcataaatttctttgaaaaataatttggtcttctattgattgtgagaagataatctaagtttaatttggtcagagaatatcatctgtttaataaactttgaaatttggtgagtgaattat

SEQ ID NO: 19877 - protein, 104 aa, Homo sapiens; identical to SEQ ID NO: 19857

SEQ ID NO: 19878 - DNA, 2159 bp, Homo sapiens
ggcagctgaactcggcgcctggaaagatggaggcagcggagacagaggcggaagctgcagccctagaggtcctggctgaggtggcaggcatcttggaacctgtaggcctgcaggaggaggcagaactgccagccaagatcctggttgagtttgtggtggtatgtacaagatgagagcgagcctttcagaagccagggtctggtcctggctcctcttactgagatacagggcagcactggcagagagcagacttaaggaaacctgtaaggaggtaaggatgttccctgtctctgccctccctctgagcaggactctcagaagaaagacaagctgctctgcagccagcttcaggtagcggatttcctgcagaacatcctggctcaggaggacactgctaagggtctcgaccccttggcttctgaagacacgagccgtgagtaggcaggggattgtagtagcagctgacctgagtggggaaggaaggaggatttcagttaggtctcccatttggctgatgggaaggaggcccagtgttgcagggaggcaggctagcaggccaccctcactcatgtactcattcctggtggctcatctcaggacagaaggcaattgcagctaaggaacaatggaaagagctgaaggccacctacagggagcacgtagaggccatcaaaattggcctcaccaaggccctgactcagatggaggaagcccagaggaaacggacacaactccgggaagcctttgagcagctccaggccaagaaacaaatggccatggagaaacgcagagcagtccagaaccagtggcagctacaacaggagaagcatctgcagcatctggcggaggtttctgcagaggtgagggagcgtaagacagggactcagcaggagcttgacagggtgtttcagaaacttggaaacctgaagcagcaggcagaacaggagcgggacaagctgcagaggtatcagaccttcctccagcttctgtataccctgcagggtaagctgttgttccctgaggctgaggctgaggcagagaatcttccagatgataaaccccagcagccgactcgaccccaggagcagagtacaggagacaccatggggagagaccctggtgtgtccttcaaggctgttggtctacaacctgctggagatgtaaatttgccatgacttcctggaggacagcagcatggagaaagatcctagaaaaggcctctgacttccctcacctcccaaccatcattacaggaaagactgtgaactcctgagttcagcttgatttctgactacatcccagcaagctctggcatctgtggattaaaatccctggatctctctcagttgtgtatttgttcatcttcatatgctggcaggaacaactattaatacagatactcagaagccaataacatgacaggagctgggactggtttgaacacagggtgtgcagatggggagggggtactggccttgggcctcctatgatgcagacatggtgaatttaattcaaggaggaggagaatgttttaggcaggtggttatatgtgggaagataattttattcatggatccaaatgtttgttgagtcctttctttgtgctaaggttcttgcggtgaaccagaattataacagtgagctcatctgactgttttaggatgtacagcctagtgttaacattcttggtatctttttgtgccttatctaaaacatttctcgatcactggtttcagatgttcatttattatattcttttcaaagattcagagattggcttttgtcatccactattgtatgttttgtttcattgacctctagtgataccttgatctttcccactttctgttttcggattggagaagatgtaccttttttgtcaactcttacttttatcagatgatcaactcacgtatttggatctttatttgttttctcaaataaatatttaaggttatacatttcttctgacttcctttattttcacaatcattcaattcatagcatttcctatattctgttataattatttcattgattcataaatttctttgaaaaataatttggtcttctattgattgtgagaagataatctaagtttaatttggtcagagaatatcatctgtttaataaactttgaaatttggtgagtgaattat

SEQ ID NO: 19879 - protein, 157 aa, Homo sapiens; identical to SEQ ID NO: 19859

SEQ ID NO: 19880 - DNA, 1857 bp, Homo sapiens
gaaggcagctgaactcggcgcctggaaagatggaggcagcggagacagaggcggaagctgcagccctagaggtcctggctgaggtggcaggcatcttggaacctgtaggcctgcaggaggaggcagaactgccagccaagatcctggttgagtttgtggtggtatgtacaagatgagagcgagcctttcagaagccagggtctggtcctggctcctcttactgagatacagggcagcactggcagagagcagacttaaggaaacctgtaaggaggtaaggatgttccctgtctctgccctccctctgagcaggactctcagaagaaagacaagctgctctgcagccagcttcaggtagcggatttcctgcagaacatcctggctcaggaggacactgctaagggtctcgaccccttggcttctgaagacacgagccgacagaaggcaattgcagctaaggaacaatggaaagagctgaaggccacctacagggagcacgtagaggccatcaaaattggcctcaccaaggccctgactcagatggaggaagcccagaggaaacggacacaactccgggaagcctttgagcagctccaggccaagaaacaaatggccatggagaaacgcagagcagtccagaaccagtggcagctacaacaggagaagcatctgcagcatctggcggaggtttctgcagagggtaagctgttgttccctgaggctgaggctgaggcagagaatcttccagatgataaaccccagcagccgactcgaccccaggagcagagtacaggagacaccatggggagagaccctggtgtgtccttcaaggctgttggtctacaacctgctggagatgtaaatttgccatgacttcctggaggacagcagcatggagaaagatcctagaaaaggcctctgacttccctcacctcccaaccatcattacaggaaagactgtgaactcctgagttcagcttgatttctgactacatcccagcaagctctggcatctgtggattaaaatccctggatctctctcagttgtgtatttgttcatcttcatatgctggcaggaacaactattaatacagatactcagaagccaataacatgacaggagctgggactggtttgaacacagggtgtgcagatggggagggggtactggccttgggcctcctatgatgcagacatggtgaatttaattcaaggaggaggagaatgttttaggcaggtggttatatgtgggaagataattttattcatggatccaaatgtttgttgagtcctttctttgtgctaaggttcttgcggtgaaccagaattataacagtgagctcatctgactgttttaggatgtacagcctagtgttaacattcttggtatctttttgtgccttatctaaaacatttctcgatcactggtttcagatgttcatttattatattcttttcaaagattcagagattggcttttgtcatccactattgtatgttttgtttcattgacctctagtgataccttgatctttcccactttctgttttcggattggagaagatgtaccttttttgtcaactcttacttttatcagatgatcaactcacgtatttggatctttatttgttttctcaaataaatatttaaggttatacatttcttctgacttcctttattttcacaatcattcaattcatagcatttcctatattctgttataattatttcattgattcataaatttctttgaaaaataatttggtcttctattgattgtgagaagataatctaagtttaatttggtcagagaatatcatctgtttaataaactttgaaatttggtgagtgaattat

SEQ ID NO: 19881 - protein, 110 aa, Homo sapiens; identical to SEQ ID NO: 19855

SEQ ID NO: 19882 - DNA, 1291 bp, Homo sapiens
gtgggaaggcagctgaactcggcgcctggaaagatggaggcagcggagacagaggcggaagctgcagccctagaggtcctggctgaggtggcaggcatcttggaacctgtaggcctgcaggaggaggcagaactgccagccaagatcctggttgagtttgtggtggactctcagaagaaagacaagctgctctgcagccagcttcaggtagcggatttcctgcagaacatcctggctcaggaggacacctggtgtgtccttcaaggctgttggtctacaacctgctggagatgtaaatttgccatgacttcctggaggacagcagcatggagaaagatcctagaaaaggcctctgacttccctcacctcccaaccatcattacaggaaagactgtgaactcctgagttcagcttgatttctgactacatcccagcaagctctggcatctgtggattaaaatccctggatctctctcagttgtgtatttgttcatcttcatatgctggcaggaacaactattaatacagatactcagaagccaataacatgacaggagctgggactggtttgaacacagggtgtgcagatggggagggggtactggccttgggcctcctatgatgcagacatggtgaatttaattcaaggaggaggagaatgttttaggcaggtggttatatgtgggaagataattttattcatggatccaaatgtttgttgagtcctttctttgtgctaaggttcttgcggtgaaccagaattataacagtgagctcatctgactgttttaggatgtacagcctagtgttaacattcttggtatctttttgtgccttatctaaaacatttctcgatcactggtttcagatgttcatttattatattcttttcaaagattcagagattggcttttgtcatccactattgtatgttttgtttcattgacctctagtgataccttgatctttcccactttctgttttcggattggagaagatgtaccttttttgtcaactcttacttttatcagatgatcaactcacgtatttggatctttatttgttttctcaaataaatatttaaggttatacatttcttctgacttcctttattttcacaatcattcaattcatagcatttcctatattctgttataattatttcattgattcataaatttctttgaaaaataatttggtcttctattgattgtgagaagataatctaagtttaatttggtcagagaatatcatctgtttaataaactttgaaatttggtgagtgaattat

SEQ ID NO: 19883 - protein, 123 aa, Homo sapiens; identical to SEQ ID NO: 19863

SEQ ID NO: 19884 - DNA, 1713 bp, Homo sapiens
attgtgggaaggcagctgaactcggcgcctggaaagatggaggcagcggagacagaggcggaagctgcagccctagaggtcctggctgaggtggcaggcatcttggaacctgtaggcctgcaggaggaggcagaactgccagccaagatcctggttgagtttgtggtggactctcagaagaaagacaagctgctctgcagccagcttcaggtagcggatttcctgcagaacatcctggctcaggaggacactgctaagggtctcgaccccttggcttctgaagacacgagccgacagaaggcaattgcagctaaggaacaatggaaagagctgaaggccacctacagggagcacgtagaggccatcaaaattggcctcaccaaggccctgactcagatggaggaagcccagaggaaacggacacaactccgggaagcctttgagcagctccaggccaagaaacaaatggccatggagaaacgcagagcagtccagaaccagtggcagctacaacaggagaagcatctgcagcatctggcggaggtttctgcagagggtaagctgttgttccctgaggctgaggctgaggcagagaatcttccagatgataaaccccagcagccgactcgaccccaggagcagagtacaggagacaccatggggagagaccctggtgtgtccttcaaggctgttggtctacaacctgctggagatgtaaatttgccatgacttcctggaggacagcagcatggagaaagatcctagaaaaggcctctgacttccctcacctcccaaccatcattacaggaaagactgtgaactcctgagttcagcttgatttctgactacatcccagcaagctctggcatctgtggattaaaatccctggatctctctcagttgtgtatttgttcatcttcatatgctggcaggaacaactattaatacagatactcagaagccaataacatgacaggagctgggactggtttgaacacagggtgtgcagatggggagggggtactggccttgggcctcctatgatgcagacatggtgaatttaattcaaggaggaggagaatgttttaggcaggtggttatatgtgggaagataattttattcatggatccaaatgtttgttgagtcctttctttgtgctaaggttcttgcggtgaaccagaattataacagtgagctcatctgactgttttaggatgtacagcctagtgttaacattcttggtatctttttgtgccttatctaaaacatttctcgatcactggtttcagatgttcatttattatattcttttcaaagattcagagattggcttttgtcatccactattgtatgttttgtttcattgacctctagtgataccttgatctttcccactttctgttttcggattggagaagatgtaccttttttgtcaactcttacttttatcagatgatcaactcacgtatttggatctttatttgttttctcaaataaatatttaaggttatacatttcttctgacttcctttattttcacaatcattcaattcatagcatttcctatattctgttataattatttcattgattcataaatttctttgaaaaataatttggtcttctattgattgtgagaagataatctaagtttaatttggtcagagaatatcatctgtttaataaactttgaaatttggtgagtgaattat

SEQ ID NO: 19885 - protein, 230 aa, Homo sapiens; identical to SEQ ID NO: 2491

SEQ ID NO: 19886 - DNA, 1857 bp, Homo sapiens
gggattgtgggaaggcagctgaactcggcgcctggaaagatggaggcagcggagacagaggcggaagctgcagccctagaggtcctggctgaggtggcaggcatcttggaacctgtaggcctgcaggaggaggcagaactgccagccaagatcctggttgagtttgtggtggactctcagaagaaagacaagctgctctgcagccagcttcaggtagcggatttcctgcagaacatcctggctcaggaggacactgctaagggtctcgaccccttggcttctgaagacacgagccgacagaaggcaattgcagctaaggaacaatggaaagagctgaaggccacctacagggagcacgtagaggccatcaaaattggcctcaccaaggccctgactcagatggaggaagcccagaggaaacggacacaactccgggaagcctttgagcagctccaggccaagaaacaaatggccatggagaaacgcagagcagtccagaaccagtggcagctacaacaggagaagcatctgcagcatctggcggaggtttctgcagaggtgagggagcgtaagacagggactcagcaggagcttgacagggtgtttcagaaacttggaaacctgaagcagcaggcagaacaggagcgggacaagctgcagaggtatcagaccttcctccagcttctgtataccctgcagggtaagctgttgttccctgaggctgaggctgaggcagagaatcttccagatgataaaccccagcagccgactcgaccccaggagcagagtacaggagacaccatggggagagaccctggtgtgtccttcaaggctgttggtctacaacctgctggagatgtaaatttgccatgacttcctggaggacagcagcatggagaaagatcctagaaaaggcctctgacttccctcacctcccaaccatcattacaggaaagactgtgaactcctgagttcagcttgatttctgactacatcccagcaagctctggcatctgtggattaaaatccctggatctctctcagttgtgtatttgttcatcttcatatgctggcaggaacaactattaatacagatactcagaagccaataacatgacaggagctgggactggtttgaacacagggtgtgcagatggggagggggtactggccttgggcctcctatgatgcagacatggtgaatttaattcaaggaggaggagaatgttttaggcaggtggttatatgtgggaagataattttattcatggatccaaatgtttgttgagtcctttctttgtgctaaggttcttgcggtgaaccagaattataacagtgagctcatctgactgttttaggatgtacagcctagtgttaacattcttggtatctttttgtgccttatctaaaacatttctcgatcactggtttcagatgttcatttattatattcttttcaaagattcagagattggcttttgtcatccactattgtatgttttgtttcattgacctctagtgataccttgatctttcccactttctgttttcggattggagaagatgtaccttttttgtcaactcttacttttatcagatgatcaactcacgtatttggatctttatttgttttctcaaataaatatttaaggttatacatttcttctgacttcctttattttcacaatcattcaattcatagcatttcctatattctgttataattatttcattgattcataaatttctttgaaaaataatttggtcttctattgattgtgagaagataatctaagtttaatttggtcagagaatatcatctgtttaataaactttgaaatttggtgagtgaattat

SEQ ID NO: 19887 - protein, 277 aa, Homo sapiens; identical to SEQ ID NO: 2495

SEQ ID NO: 19888 - DNA, 2048 bp, Homo sapiens
gggattgtgggaaggcagctgaactcggcgcctggaaagatggaggcagcggagacagaggcggaagctgcagccctagaggtcctggctgaggtggcaggcatcttggaacctgtaggcctgcaggaggaggcagaactgccagccaagatcctggttgagtttgtggtggactctcagaagaaagacaagctgctctgcagccagcttcaggtagcggatttcctgcagaacatcctggctcaggaggacactgctaagggtctcgaccccttggcttctgaagacacgagccgacagaaggcaattgcagctaaggaacaatggaaagagctgaaggccacctacagggagcacgtagaggccatcaaaattggcctcaccaaggccctgactcagatggaggaagcccagaggaaacggacacaactccgggaagcctttgagcagctccaggccaagaaacaaatggccatggagaaacgcagagcagtccagaaccagtggcagctacaacaggagaagcatctgcagcatctggcggaggtttctgcagaggtgagggagcgtaagacagggactcagcaggagcttgacagggtgtttcagaaacttggaaacctgaagcagcaggcagaacaggagcgggacaagctgcagaggtatcagaccttcctccagcttctgtataccctgcagggtaagctgttgttccctgaggctgaggctgaggcagagaatcttccagatgataaaccccagcagccgactcgaccccaggagcagagtacaggagacaccatggggagagaccctggtgtgtccttcaaggctgttggtctacaacctgctggagatgtaaatttgccatgacttcctggaggacagcagcatggagaaagatcctagaaaaggtcagacccaactcaggccttggtgtccctggactgcaagtgtggaaggagggaaagcctggtttacctctctctgcatctgagctctgctacccatggagcagatggatggtgggaacaggaaagagcttatgttacacctcattcccatgcttagcccacccagagctaacccctgtcttcttccccaggcctctgacttccctcacctcccaaccatcattacaggaaagactgtgaactcctgagttcagcttgatttctgactacatcccagcaagctctggcatctgtggattaaaatccctggatctctctcagttgtgtatttgttcatcttcatatgctggcaggaacaactattaatacagatactcagaagccaataacatgacaggagctgggactggtttgaacacagggtgtgcagatggggagggggtactggccttgggcctcctatgatgcagacatggtgaatttaattcaaggaggaggagaatgttttaggcaggtggttatatgtgggaagataattttattcatggatccaaatgtttgttgagtcctttctttgtgctaaggttcttgcggtgaaccagaattataacagtgagctcatctgactgttttaggatgtacagcctagtgttaacattcttggtatctttttgtgccttatctaaaacatttctcgatcactggtttcagatgttcatttattatattcttttcaaagattcagagattggcttttgtcatccactattgtatgttttgtttcattgacctctagtgataccttgatctttcccactttctgttttcggattggagaagatgtaccttttttgtcaactcttacttttatcagatgatcaactcacgtatttggatctttatttgttttctcaaataaatatttaaggttatacatttcttctgacttcctttattttcacaatcattcaattcatagcatttcctatattctgttataattatttcattgattcataaatttctttgaaaaataatttggtcttctattgattgtgagaagataatctaagtttaatttggtcagagaatatcatctgtttaataaactttgaaatttggtgagtgaattat

SEQ ID NO: 19889 - protein, 277 aa, Homo sapiens; identical to SEQ ID NO: 2495

SEQ ID NO: 19890 - DNA, 1099 bp, Homo sapiens
aaccccagcagccgactcgaccccaggagcagagtacaggagacaccatggggagagaccctggtgtgtccttcaaggctgttggtctacaacctgctggagatgtaaatttgccatgacttcctggaggacagcagcatggagaaagatcctagaaaaggtcagacccaactcaggccttggtgtccctggactgcaagtgtggaaggagggaaagcctggtttacctctctctgcatctgagctctgctacccatggagcagatggatggtgggaacaggaaagagcttatgttacacctcattcccatgcttagcccacccagagctaacccctgtcttcttccccaggcctctgacttccctcacctcccaaccatcattacaggaaagactgtgaactcctgagttcagcttgatttctgactacatcccagcaagctctggcatctgtggattaaaatccctggatctctctcagttgtgtatttgttcatcttcatatgctggcaggaacaactattaatacagatactcagaagccaataacatgacaggagctgggactggtttgaacacagggtgtgcagatggggagggggtactggccttgggcctcctatgatgcagacatggtgaatttaattcaaggaggaggagaatgttttaggcaggtggttatatgtgggaagataattttattcatggatccaaatgtttgttgagtcctttctttgtgctaaggttcttgcggtgaaccagaattataacagtgagctcatctgactgttttaggatgtacagcctagtgttaacattcttggtatctttttgtgccttatctaaaacatttctcgatcactggtttcagatgttcatttattatattcttttcaaagattcagagattggcttttgtcatccactattgtatgttttgtttcattgacctctagtgataccttgatctttcccactttctgttttcggattggagaagatgtaccttttttgtcaactcttacttttatcagatgatcaactcacgtatttggatctttatttgttttctcaaataaatatttaaggttatacattt

SEQ ID NO: 19891 - protein, 94 aa, Homo sapiens; identical to SEQ ID NO: 19849

SEQ ID NO: 19892 - DNA, 935 bp, Homo sapiens
ctgaggcagagaatcttccagatgataaaccccagcagccgactcgaccccaggagcagagtacaggagacaccatggggagagaccctggtgtgtccttcaaggctgttggtctacaacctgctggagatgtaaatttgccatgacttcctggaggacagcagcatggagaaagatcctagaaaaggcctctgacttccctcacctcccaaccatcattacaggaaagactgtgaactcctgagttcagcttgatttctgactacatcccagcaagctctggcatctgtggattaaaatccctggatctctctcagttgtgtatttgttcatcttcatatgctggcaggaacaactattaatacagatactcagaagccaataacatgacaggagctgggactggtttgaacacagggtgtgcagatggggagggggtactggccttgggcctcctatgatgcagacatggtgaatttaattcaaggaggaggagaatgttttaggcaggtggttatatgtgggaagataattttattcatggatccaaatgtttgttgagtcctttctttgtgctaaggttcttgcggtgaaccagaattataacagtgagctcatctgactgttttaggatgtacagcctagtgttaacattcttggtatctttttgtgccttatctaaaacatttctcgatcactggtttcagatgttcatttattatattcttttcaaagattcagagattggcttttgtcatccactattgtatgttttgtttcattgacctctagtgataccttgatctttcccactttctgttttcggattggagaagatgtaccttttttgtcaactcttacttttatcagatgatcaactcacgtatttggatctttatttgttttctcaaataaatatttaaggttatacattt

SEQ ID NO: 19893 - protein, 37 aa, Homo sapiens; identical to SEQ ID NO: 19851

SEQ ID NO: 19894 - DNA, 819 bp, Homo sapiens
ttgacagggtgtttcagaaacttggaaacctgaagcacccacccagagctaacccctgtcttcttccccaggcctctgacttccctcacctcccaaccatcattacaggaaagactgtgaactcctgagttcagcttgatttctgactacatcccagcaagctctggcatctgtggattaaaatccctggatctctctcagttgtgtatttgttcatcttcatatgctggcaggaacaactattaatacagatactcagaagccaataacatgacaggagctgggactggtttgaacacagggtgtgcagatggggagggggtactggccttgggcctcctatgatgcagacatggtgaatttaattcaaggaggaggagaatgttttaggcaggtggttatatgtgggaagataattttattcatggatccaaatgtttgttgagtcctttctttgtgctaaggttcttgcggtgaaccagaattataacagtgagctcatctgactgttttaggatgtacagcctagtgttaacattcttggtatctttttgtgccttatctaaaacatttctcgatcactggtttcagatgttcatttattatattcttttcaaagattcagagattggcttttgtcatccactattgtatgttttgtttcattgacctctagtgataccttgatctttcccactttctgttttcggattggagaagatgtaccttttttgtcaactcttacttttatcagatgatcaactcacgtatttggatctttatttgttttctcaaataaatatttaaggttatacattt

SEQ ID NO: 19895 - protein, 50 aa, Homo sapiens; identical to SEQ ID NO: 19853

SEQ ID NO: 19896 - DNA, 1542 bp, Homo sapiens
ggactctcagaagaaagacaagctgctctgcagccagcttcaggtagcggatttcctgcagaacatcctggctcaggaggacactgctaagggtctcgaccccttggcttctgaagacacgagccgacagaaggcaattgcagctaaggaacaatggaaagagctgaaggccacctacagggagcacgtagaggccatcaaaattggcctcaccaaggccctgactcagatggaggaagcccagaggaaacggacacaactccgggaagcctttgagcagctccaggccaagaaacaaatggccatggagaaacgcagagcagtccagaaccagtggcagctacaacaggagaagcatctgcagcatctggcggaggtttctgcagagggtaagctgttgttccctgaggctgaggctgaggcagagaatcttccagatgataaaccccagcagccgactcgaccccaggagcagagtacaggagacaccatggggagagaccctggtgtgtccttcaaggctgttggtctacaacctgctggagatgtaaatttgccatgacttcctggaggacagcagcatggagaaagatcctagaaaaggtcagacccaactcaggccttggtgtccctggactgcaagtgtggaaggagggaaagcctggtttacctctctctgcatctgagctctgctacccatggagcagatggatggtgggaacaggaaagagcttatgttacacctcattcccatgcttagcccacccagagctaacccctgtcttcttccccaggcctctgacttccctcacctcccaaccatcattacaggaaagactgtgaactcctgagttcagcttgatttctgactacatcccagcaagctctggcatctgtggattaaaatccctggatctctctcagttgtgtatttgttcatcttcatatgctggcaggaacaactattaatacagatactcagaagccaataacatgacaggagctgggactggtttgaacacagggtgtgcagatggggagggggtactggccttgggcctcctatgatgcagacatggtgaatttaattcaaggaggaggagaatgttttaggcaggtggttatatgtgggaagataattttattcatggatccaaatgtttgttgagtcctttctttgtgctaaggttcttgcggtgaaccagaattataacagtgagctcatctgactgttttaggatgtacagcctagtgttaacattcttggtatctttttgtgccttatctaaaacatttctcgatcactggtttcagatgttcatttattatattcttttcaaagattcagagattggcttttgtcatccactattgtatgttttgtttcattgacctctagtgataccttgatctttcccactttctgttttcggattggagaagatgtaccttttttgtcaactcttacttttatcagatgatcaactcacgtatttggatctttatttgttttctcaaataaatatttaaggttatacattt

SEQ ID NO: 19897 - protein, 110 aa, Homo sapiens; identical to SEQ ID NO: 19855

SEQ ID NO: 19898 - DNA, 1292 bp, Homo sapiens
gaactcggcgcctggaaagatggaggcagcggagacagaggcggaagctgcagccctagaggtcctggctgaggtggcaggcatcttggaacctgtaggcctgcaggaggaggcagaactgccagccaagatcctggttgagtttgtggtggactctcagaagaaagacaagctgctctgcagccagcttcaggtagcggatttcctgcagaacatcctggctcaggaggacactgctaagggtctcgaccccttggcttctgaagacacgagcctggcagctacaacaggagaagcatctgcagcatctggcggaggtttctgcagagggtaagctgttgttccctgaggctgaggctgaggcagagaatcttccagatgataaaccccagcagccgactcgaccccaggagcagagtacaggagacaccatggggagagaccctggtgtgtccttcaaggctgttggtctacaacctgctggagatgtaaatttgccatgacttcctggaggacagcagcatggagaaagatcctagaaaaggcctctgacttccctcacctcccaaccatcattacaggaaagactgtgaactcctgagttcagcttgatttctgactacatcccagcaagctctggcatctgtggattaaaatccctggatctctctcagttgtgtatttgttcatcttcatatgctggcaggaacaactattaatacagatactcagaagccaataacatgacaggagctgggactggtttgaacacagggtgtgcagatggggagggggtactggccttgggcctcctatgatgcagacatggtgaatttaattcaaggaggaggagaatgttttaggcaggtggttatatgtgggaagataattttattcatggatccaaatgtttgttgagtcctttctttgtgctaaggttcttgcggtgaaccagaattataacagtgagctcatctgactgttttaggatgtacagcctagtgttaacattcttggtatctttttgtgccttatctaaaacatttctcgatcactggtttcagatgttcatttattatattcttttcaaagattcagagattggcttttgtcatccactattgtatgttttgtttcattgacctctagtgataccttgatctttcccactttctgttttcggattggagaagatgtaccttttttgtcaactcttacttttatcagatgatcaactcacgtatttggatctttatttgttttctcaaataaatatttaaggttatacattt

SEQ ID NO: 19899 - protein, 104 aa, Homo sapiens; identical to SEQ ID NO: 19857

SEQ ID NO: 19900 - DNA, 1964 bp, Homo sapiens
ggcagctgaactcggcgcctggaaagatggaggcagcggagacagaggcggaagctgcagccctagaggtcctggctgaggtggcaggcatcttggaacctgtaggcctgcaggaggaggcagaactgccagccaagatcctggttgagtttgtggtggtatgtacaagatgagagcgagcctttcagaagccagggtctggtcctggctcctcttactgagatacagggcagcactggcagagagcagacttaaggaaacctgtaaggaggtaaggatgttccctgtctctgccctccctctgagcaggactctcagaagaaagacaagctgctctgcagccagcttcaggtagcggatttcctgcagaacatcctggctcaggaggacactgctaagggtctcgaccccttggcttctgaagacacgagccgtgagtaggcaggggattgtagtagcagctgacctgagtggggaaggaaggaggatttcagttaggtctcccatttggctgatgggaaggaggcccagtgttgcagggaggcaggctagcaggccaccctcactcatgtactcattcctggtggctcatctcaggacagaaggcaattgcagctaaggaacaatggaaagagctgaaggccacctacagggagcacgtagaggccatcaaaattggcctcaccaaggccctgactcagatggaggaagcccagaggaaacggacacaactccgggaagcctttgagcagctccaggccaagaaacaaatggccatggagaaacgcagagcagtccagaaccagtggcagctacaacaggagaagcatctgcagcatctggcggaggtttctgcagaggtgagggagcgtaagacagggactcagcaggagcttgacagggtgtttcagaaacttggaaacctgaagcagcaggcagaacaggagcgggacaagctgcagaggtatcagaccttcctccagcttctgtataccctgcagggtaagctgttgttccctgaggctgaggctgaggcagagaatcttccagatgataaaccccagcagccgactcgaccccaggagcagagtacaggagacaccatggggagagaccctggtgtgtccttcaaggctgttggtctacaacctgctggagatgtaaatttgccatgacttcctggaggacagcagcatggagaaagatcctagaaaaggcctctgacttccctcacctcccaaccatcattacaggaaagactgtgaactcctgagttcagcttgatttctgactacatcccagcaagctctggcatctgtggattaaaatccctggatctctctcagttgtgtatttgttcatcttcatatgctggcaggaacaactattaatacagatactcagaagccaataacatgacaggagctgggactggtttgaacacagggtgtgcagatggggagggggtactggccttgggcctcctatgatgcagacatggtgaatttaattcaaggaggaggagaatgttttaggcaggtggttatatgtgggaagataattttattcatggatccaaatgtttgttgagtcctttctttgtgctaaggttcttgcggtgaaccagaattataacagtgagctcatctgactgttttaggatgtacagcctagtgttaacattcttggtatctttttgtgccttatctaaaacatttctcgatcactggtttcagatgttcatttattatattcttttcaaagattcagagattggcttttgtcatccactattgtatgttttgtttcattgacctctagtgataccttgatctttcccactttctgttttcggattggagaagatgtaccttttttgtcaactcttacttttatcagatgatcaactcacgtatttggatctttatttgttttctcaaataaatatttaaggttatacattt

SEQ ID NO: 19901 - protein, 157 aa, Homo sapiens; identical to SEQ ID NO: 19859

SEQ ID NO: 19902 - DNA, 1662 bp, Homo sapiens
gaaggcagctgaactcggcgcctggaaagatggaggcagcggagacagaggcggaagctgcagccctagaggtcctggctgaggtggcaggcatcttggaacctgtaggcctgcaggaggaggcagaactgccagccaagatcctggttgagtttgtggtggtatgtacaagatgagagcgagcctttcagaagccagggtctggtcctggctcctcttactgagatacagggcagcactggcagagagcagacttaaggaaacctgtaaggaggtaaggatgttccctgtctctgccctccctctgagcaggactctcagaagaaagacaagctgctctgcagccagcttcaggtagcggatttcctgcagaacatcctggctcaggaggacactgctaagggtctcgaccccttggcttctgaagacacgagccgacagaaggcaattgcagctaaggaacaatggaaagagctgaaggccacctacagggagcacgtagaggccatcaaaattggcctcaccaaggccctgactcagatggaggaagcccagaggaaacggacacaactccgggaagcctttgagcagctccaggccaagaaacaaatggccatggagaaacgcagagcagtccagaaccagtggcagctacaacaggagaagcatctgcagcatctggcggaggtttctgcagagggtaagctgttgttccctgaggctgaggctgaggcagagaatcttccagatgataaaccccagcagccgactcgaccccaggagcagagtacaggagacaccatggggagagaccctggtgtgtccttcaaggctgttggtctacaacctgctggagatgtaaatttgccatgacttcctggaggacagcagcatggagaaagatcctagaaaaggcctctgacttccctcacctcccaaccatcattacaggaaagactgtgaactcctgagttcagcttgatttctgactacatcccagcaagctctggcatctgtggattaaaatccctggatctctctcagttgtgtatttgttcatcttcatatgctggcaggaacaactattaatacagatactcagaagccaataacatgacaggagctgggactggtttgaacacagggtgtgcagatggggagggggtactggccttgggcctcctatgatgcagacatggtgaatttaattcaaggaggaggagaatgttttaggcaggtggttatatgtgggaagataattttattcatggatccaaatgtttgttgagtcctttctttgtgctaaggttcttgcggtgaaccagaattataacagtgagctcatctgactgttttaggatgtacagcctagtgttaacattcttggtatctttttgtgccttatctaaaacatttctcgatcactggtttcagatgttcatttattatattcttttcaaagattcagagattggcttttgtcatccactattgtatgttttgtttcattgacctctagtgataccttgatctttcccactttctgttttcggattggagaagatgtaccttttttgtcaactcttacttttatcagatgatcaactcacgtatttggatctttatttgttttctcaaataaatatttaaggttatacattt

SEQ ID NO: 19903 - protein, 110 aa, Homo sapiens; identical to SEQ ID NO: 19855

SEQ ID NO: 19904 - DNA, 1096 bp, Homo sapiens
gtgggaaggcagctgaactcggcgcctggaaagatggaggcagcggagacagaggcggaagctgcagccctagaggtcctggctgaggtggcaggcatcttggaacctgtaggcctgcaggaggaggcagaactgccagccaagatcctggttgagtttgtggtggactctcagaagaaagacaagctgctctgcagccagcttcaggtagcggatttcctgcagaacatcctggctcaggaggacacctggtgtgtccttcaaggctgttggtctacaacctgctggagatgtaaatttgccatgacttcctggaggacagcagcatggagaaagatcctagaaaaggcctctgacttccctcacctcccaaccatcattacaggaaagactgtgaactcctgagttcagcttgatttctgactacatcccagcaagctctggcatctgtggattaaaatccctggatctctctcagttgtgtatttgttcatcttcatatgctggcaggaacaactattaatacagatactcagaagccaataacatgacaggagctgggactggtttgaacacagggtgtgcagatggggagggggtactggccttgggcctcctatgatgcagacatggtgaatttaattcaaggaggaggagaatgttttaggcaggtggttatatgtgggaagataattttattcatggatccaaatgtttgttgagtcctttctttgtgctaaggttcttgcggtgaaccagaattataacagtgagctcatctgactgttttaggatgtacagcctagtgttaacattcttggtatctttttgtgccttatctaaaacatttctcgatcactggtttcagatgttcatttattatattcttttcaaagattcagagattggcttttgtcatccactattgtatgttttgtttcattgacctctagtgataccttgatctttcccactttctgttttcggattggagaagatgtaccttttttgtcaactcttacttttatcagatgatcaactcacgtatttggatctttatttgttttctcaaataaatatttaaggttatacattt

SEQ ID NO: 19905 - protein, 123 aa, Homo sapiens; identical to SEQ ID NO: 19863

SEQ ID NO: 19906 - DNA, 1518 bp, Homo sapiens
attgtgggaaggcagctgaactcggcgcctggaaagatggaggcagcggagacagaggcggaagctgcagccctagaggtcctggctgaggtggcaggcatcttggaacctgtaggcctgcaggaggaggcagaactgccagccaagatcctggttgagtttgtggtggactctcagaagaaagacaagctgctctgcagccagcttcaggtagcggatttcctgcagaacatcctggctcaggaggacactgctaagggtctcgaccccttggcttctgaagacacgagccgacagaaggcaattgcagctaaggaacaatggaaagagctgaaggccacctacagggagcacgtagaggccatcaaaattggcctcaccaaggccctgactcagatggaggaagcccagaggaaacggacacaactccgggaagcctttgagcagctccaggccaagaaacaaatggccatggagaaacgcagagcagtccagaaccagtggcagctacaacaggagaagcatctgcagcatctggcggaggtttctgcagagggtaagctgttgttccctgaggctgaggctgaggcagagaatcttccagatgataaaccccagcagccgactcgaccccaggagcagagtacaggagacaccatggggagagaccctggtgtgtccttcaaggctgttggtctacaacctgctggagatgtaaatttgccatgacttcctggaggacagcagcatggagaaagatcctagaaaaggcctctgacttccctcacctcccaaccatcattacaggaaagactgtgaactcctgagttcagcttgatttctgactacatcccagcaagctctggcatctgtggattaaaatccctggatctctctcagttgtgtatttgttcatcttcatatgctggcaggaacaactattaatacagatactcagaagccaataacatgacaggagctgggactggtttgaacacagggtgtgcagatggggagggggtactggccttgggcctcctatgatgcagacatggtgaatttaattcaaggaggaggagaatgttttaggcaggtggttatatgtgggaagataattttattcatggatccaaatgtttgttgagtcctttctttgtgctaaggttcttgcggtgaaccagaattataacagtgagctcatctgactgttttaggatgtacagcctagtgttaacattcttggtatctttttgtgccttatctaaaacatttctcgatcactggtttcagatgttcatttattatattcttttcaaagattcagagattggcttttgtcatccactattgtatgttttgtttcattgacctctagtgataccttgatctttcccactttctgttttcggattggagaagatgtaccttttttgtcaactcttacttttatcagatgatcaactcacgtatttggatctttatttgttttctcaaataaatatttaaggttatacattt

SEQ ID NO: 19907 - protein, 230 aa, Homo sapiens; identical to SEQ ID NO: 2491

SEQ ID NO: 19908 - DNA, 1662 bp, Homo sapiens
gggattgtgggaaggcagctgaactcggcgcctggaaagatggaggcagcggagacagaggcggaagctgcagccctagaggtcctggctgaggtggcaggcatcttggaacctgtaggcctgcaggaggaggcagaactgccagccaagatcctggttgagtttgtggtggactctcagaagaaagacaagctgctctgcagccagcttcaggtagcggatttcctgcagaacatcctggctcaggaggacactgctaagggtctcgaccccttggcttctgaagacacgagccgacagaaggcaattgcagctaaggaacaatggaaagagctgaaggccacctacagggagcacgtagaggccatcaaaattggcctcaccaaggccctgactcagatggaggaagcccagaggaaacggacacaactccgggaagcctttgagcagctccaggccaagaaacaaatggccatggagaaacgcagagcagtccagaaccagtggcagctacaacaggagaagcatctgcagcatctggcggaggtttctgcagaggtgagggagcgtaagacagggactcagcaggagcttgacagggtgtttcagaaacttggaaacctgaagcagcaggcagaacaggagcgggacaagctgcagaggtatcagaccttcctccagcttctgtataccctgcagggtaagctgttgttccctgaggctgaggctgaggcagagaatcttccagatgataaaccccagcagccgactcgaccccaggagcagagtacaggagacaccatggggagagaccctggtgtgtccttcaaggctgttggtctacaacctgctggagatgtaaatttgccatgacttcctggaggacagcagcatggagaaagatcctagaaaaggcctctgacttccctcacctcccaaccatcattacaggaaagactgtgaactcctgagttcagcttgatttctgactacatcccagcaagctctggcatctgtggattaaaatccctggatctctctcagttgtgtatttgttcatcttcatatgctggcaggaacaactattaatacagatactcagaagccaataacatgacaggagctgggactggtttgaacacagggtgtgcagatggggagggggtactggccttgggcctcctatgatgcagacatggtgaatttaattcaaggaggaggagaatgttttaggcaggtggttatatgtgggaagataattttattcatggatccaaatgtttgttgagtcctttctttgtgctaaggttcttgcggtgaaccagaattataacagtgagctcatctgactgttttaggatgtacagcctagtgttaacattcttggtatctttttgtgccttatctaaaacatttctcgatcactggtttcagatgttcatttattatattcttttcaaagattcagagattggcttttgtcatccactattgtatgttttgtttcattgacctctagtgataccttgatctttcccactttctgttttcggattggagaagatgtaccttttttgtcaactcttacttttatcagatgatcaactcacgtatttggatctttatttgttttctcaaataaatatttaaggttatacattt

SEQ ID NO: 19909 - protein, 277 aa, Homo sapiens; identical to SEQ ID NO: 2495

SEQ ID NO: 19910 - DNA, 1853 bp, Homo sapiens
gggattgtgggaaggcagctgaactcggcgcctggaaagatggaggcagcggagacagaggcggaagctgcagccctagaggtcctggctgaggtggcaggcatcttggaacctgtaggcctgcaggaggaggcagaactgccagccaagatcctggttgagtttgtggtggactctcagaagaaagacaagctgctctgcagccagcttcaggtagcggatttcctgcagaacatcctggctcaggaggacactgctaagggtctcgaccccttggcttctgaagacacgagccgacagaaggcaattgcagctaaggaacaatggaaagagctgaaggccacctacagggagcacgtagaggccatcaaaattggcctcaccaaggccctgactcagatggaggaagcccagaggaaacggacacaactccgggaagcctttgagcagctccaggccaagaaacaaatggccatggagaaacgcagagcagtccagaaccagtggcagctacaacaggagaagcatctgcagcatctggcggaggtttctgcagaggtgagggagcgtaagacagggactcagcaggagcttgacagggtgtttcagaaacttggaaacctgaagcagcaggcagaacaggagcgggacaagctgcagaggtatcagaccttcctccagcttctgtataccctgcagggtaagctgttgttccctgaggctgaggctgaggcagagaatcttccagatgataaaccccagcagccgactcgaccccaggagcagagtacaggagacaccatggggagagaccctggtgtgtccttcaaggctgttggtctacaacctgctggagatgtaaatttgccatgacttcctggaggacagcagcatggagaaagatcctagaaaaggtcagacccaactcaggccttggtgtccctggactgcaagtgtggaaggagggaaagcctggtttacctctctctgcatctgagctctgctacccatggagcagatggatggtgggaacaggaaagagcttatgttacacctcattcccatgcttagcccacccagagctaacccctgtcttcttccccaggcctctgacttccctcacctcccaaccatcattacaggaaagactgtgaactcctgagttcagcttgatttctgactacatcccagcaagctctggcatctgtggattaaaatccctggatctctctcagttgtgtatttgttcatcttcatatgctggcaggaacaactattaatacagatactcagaagccaataacatgacaggagctgggactggtttgaacacagggtgtgcagatggggagggggtactggccttgggcctcctatgatgcagacatggtgaatttaattcaaggaggaggagaatgttttaggcaggtggttatatgtgggaagataattttattcatggatccaaatgtttgttgagtcctttctttgtgctaaggttcttgcggtgaaccagaattataacagtgagctcatctgactgttttaggatgtacagcctagtgttaacattcttggtatctttttgtgccttatctaaaacatttctcgatcactggtttcagatgttcatttattatattcttttcaaagattcagagattggcttttgtcatccactattgtatgttttgtttcattgacctctagtgataccttgatctttcccactttctgttttcggattggagaagatgtaccttttttgtcaactcttacttttatcagatgatcaactcacgtatttggatctttatttgttttctcaaataaatatttaaggttatacattt

SEQ ID NO: 19911 - protein, 277 aa, Homo sapiens; identical to SEQ ID NO: 2495

SEQ ID NO: 19912 - DNA, 898 bp, Homo sapiens
attgtgggaaggcagctgaactcggcgcctggaaagatggaggcagcggagacagaggcggaagctgcagccctagaggtcctggctgaggtggcaggcatcttggaacctgtaggcctgcaggaggaggcagaactgccagccaagatcctggttgagtttgtggtggactctcagaagaaagacaagctgctctgcagccagcttcaggtagcggatttcctgcagaacatcctggctcaggaggacactgctaagggtctcgaccccttggcttctgaagacacgagccgacagaaggcaattgcagctaaggaacaatggaaagagctgaaggccacctacagggagcacgtagaggccatcaaaattggcctcaccaaggccctgactcagatggaggaagcccagaggaaacggacacaactccgggaagcctttgagcagctccaggccaagaaacaaatggccatggagaaacgcagagcagtccagaaccagtggcagctacaacaggagaagcatctgcagcatctggcggaggtttctgcagagggtaagctgttgttccctgaggctgaggctgaggcagagaatcttccagatgataaaccccagcagccgactcgaccccaggagcagagtacaggagacaccatggggagagaccctggtgtgtccttcaaggctgttggtctacaacctgctggagatgtaaatttgccatgacttcctggaggacagcagcatggagaaagatcctagaaaaggcctctgacttccctcacctcccaaccatcattacaggaaagactgtgaactcctgagttcagcttgatttctgactacatcccagcaagctctggcatctgtggattaaaatccctggatctctctc

SEQ ID NO: 19913 - protein, 230 aa, Homo sapiens; identical to SEQ ID NO: 2491

SEQ ID NO: 19914 - DNA, 1042 bp, Homo sapiens
gggattgtgggaaggcagctgaactcggcgcctggaaagatggaggcagcggagacagaggcggaagctgcagccctagaggtcctggctgaggtggcaggcatcttggaacctgtaggcctgcaggaggaggcagaactgccagccaagatcctggttgagtttgtggtggactctcagaagaaagacaagctgctctgcagccagcttcaggtagcggatttcctgcagaacatcctggctcaggaggacactgctaagggtctcgaccccttggcttctgaagacacgagccgacagaaggcaattgcagctaaggaacaatggaaagagctgaaggccacctacagggagcacgtagaggccatcaaaattggcctcaccaaggccctgactcagatggaggaagcccagaggaaacggacacaactccgggaagcctttgagcagctccaggccaagaaacaaatggccatggagaaacgcagagcagtccagaaccagtggcagctacaacaggagaagcatctgcagcatctggcggaggtttctgcagaggtgagggagcgtaagacagggactcagcaggagcttgacagggtgtttcagaaacttggaaacctgaagcagcaggcagaacaggagcgggacaagctgcagaggtatcagaccttcctccagcttctgtataccctgcagggtaagctgttgttccctgaggctgaggctgaggcagagaatcttccagatgataaaccccagcagccgactcgaccccaggagcagagtacaggagacaccatggggagagaccctggtgtgtccttcaaggctgttggtctacaacctgctggagatgtaaatttgccatgacttcctggaggacagcagcatggagaaagatcctagaaaaggcctctgacttccctcacctcccaaccatcattacaggaaagactgtgaactcctgagttcagcttgatttctgactacatcccagcaagctctggcatctgtggattaaaatccctggatctctctc

SEQ ID NO: 19915 - protein, 277 aa, Homo sapiens; identical to SEQ ID NO: 2495

SEQ ID NO: 19916 - DNA, 1674 bp, Homo sapiens
gttccccgcggaggtggcagccctgggccgcggcgttccggaacccccgcacccacggcgcggtgccccacggtgcccgcgagcgccgcccccgctggctagccgcgcctcgctccgccctggacgccgccggtcccggcgcggaggtgcggcggggagtgggagccggcccggctcagtctgatttacggctctgctgaaaaccgcttcgctcccgcagcatcagcaccggaggcggcggctgcagcagcagcagcaacaagtcgggacttttagagtaatgcaacagaaggcttttgaggaaagcagatatccctggcaggagtcctttgagaatgttgctgtgtgcctgccattacgctgcccgaggtgtggagaccataccagatttagaagcttgtcatccttgagggcccatctggagttcagtcacagctacgaagaaagaaccctcttgacaaaatgcagtctctttccatccctcaaagacacagacctagtcacttcctcagaactcctgaaaccgggaaaattgcagagcagtggcaacgtggtaaagcagaaaccgagctatgttaacttgtacagcatttcacatgaacattccaaggacaggaagccatttgaggtggtggcagagaggcctgtgtcctatgtgcagacctacactgccatggacctccatgcagactcgctggatgggacacggtcgggtcctggactgcccacctcagacaccaaagcttctttcgaggcacatgtcagagaaaaattcaatcgaatggttgaggctgtggataggaccattgagaagagaattgataaactcaccaaagagttggcccagaaaactgcggaactgttggaagttcgggcagcttttgtgcagctgactcagaaaaagcaggaagttcagagacgagagcgggccttaaacagacaggtggacgtggccgtggaaatgatagctgtactgaggcaacgcctgacggaatctgaggaggagcttcttaggaaagaagaagaagttgtcacattcaaccatttcctggaagcggcagctgagaaggaggttcaagggaaagcccggctccaggactttattgagaatctgttacagcgggtagaactggcggagaagcagcttgagtactatcagagccagcaggcctctggctttgtccgtgatctcagcgggcacgtgagctggaaaggtgctggcgaagctcgcctggtgtgccaaaatgacctggaattggaggagtctgcgattgtggaataatgaacttcgaatgatgtgattctggatgaggacttggatcaagagaatcgcaaattaattgtgccagagaagctttcattcattcaacaaatatttattaagcatgttttacactccaggaactttacaagaaacttgggctacttggtgactttactcaccaggagtgggttcagactcctgatggatgagctccaggtcctccctaacaagactgcagacttcctgagggcacagcccacccctcatgctttgagtttctcatataacccatcatagcaagtagaagatgcttcagaacatttgtccctatgagatagagtcatattctatttagcttgggacatggcaggtactcagttgttaaataaaaaatagttattgagtaattt

SEQ ID NO: 19917 - protein, 333 aa, Homo sapiens; identical to SEQ ID NO: 2501

SEQ ID NO: 19918 - DNA, 3379 bp, Homo sapiens
gttccccgcggaggtggcagccctgggccgcggcgttccggaacccccgcacccacggcgcggtgccccacggtgcccgcgagcgccgcccccgctggctagccgcgcctcgctccgccctggacgccgccggtcccggcgcggaggtgcggcggggagtgggagccggcccggctcagtctgatttacggctctgctgaaaaccgcttcgctcccgcagcatcagcaccggaggcggcggctgcagcagcagcagcaacaagtcgggacttttagagtaatgcaacagaaggcttttgaggaaagcagatatccctggcaggagtcctttgagaatgttgctgtgtgcctgccattacgctgcccgaggtgtggagaccataccagatttagaagcttgtcatccttgagggcccatctggagttcagtcacagctacgaagaaagaaccctcttgacaaaatgcagtctctttccatccctcaaagacacagacctagtcacttcctcagaactcctgaaaccgggaaaattgcagagcagtggcaacgtggtaaagcagaaaccgagctatgttaacttgtacagcatttcacatgaacattccaaggacaggaagccatttgaggtggtggcagagaggcctgtgtcctatgtgcagacctacactgccatggacctccatgcagactcgctggatgggacacggtcgggtcctggactgcccacctcagacaccaaagcttctttcgaggcacatgtcagagaaaaattcaatcgaatggttgaggctgtggataggaccattgagaagagaattgataaactcaccaaagagttggcccagaaaactgcggaactgttggaagttcgggcagcttttgtgcagctgactcagaaaaagcaggaagttcagagacgagagcgggccttaaacagacaggtggacgtggccgtggaaatgatagctgtactgaggcaacgcctgacggaatctgaggaggagcttcttaggaaagaagaagaagttgtcacattcaaccatttcctggaagcggcagctgagaaggaggttcaagggaaagcccggctccaggactttattgagaatctgttacagcgggtagaactggcggagaagcagcttgagtactatcagagccagcaggcctctggctttgtccgtgatctcagcgggcacgtgagctggaaaggtgctggcgaagctcgcctggtgtgccaaaatgacctggaattggagatttttggccatataaaccaccatctttcggggttgaaagattctcattgtctagtttttctgcaagccccacctgtgccctggatcattttagccagctttctctggattctcggaaatccctggacgtcttccacggctactgcaggatttagccaaatttgggtgctatttcccttttgtggagggacttttcatcacaatgagaaggacgtcttaggactccaggactttgagagagaaagtgtctctacaagtcaaagcaggaatatcagccttcttacactaggacaactccaaaattgtgtgattggcaaattgacaatcatcgatttgttgactgaacacctgttaggtgtaaggcacggtgtcatatgctttccttggggcttgccttcaagcagctaacagaaataagaagaaaacaggtgaaaaagacagtgtgataaggccatggtggtggattgtggatgccctgccctgtatccacttgggagagagcctctacaacatgctggcaacttccccctcactgattcaaatgttaatctcctttggcaacaccctcacagacacacccaggatcaatacgttgtatcctttgatccaatcaagttgccactcagtattaaccatgacaccttctaagccatcatctcctcctaatcctcccataacaatgggtataagttatgaaggtgggttagaaactagtgcctatccctcactaagttgccagatggatttaacagcacctcaaagtcaacatgccccaagtcaaagtcttctttacccatggaataagctggcttgctacttccctacatctctgaagggctccaccattcctctagcaaccatgctctcaaagctcagagggaggaaaaggaaatggatctaaatggaattccaggtcccacgctggatattttcacaccttacctcatttaatacaacaagcaaggaggtagacaatattgtctacctttgcaaatgaggaaacagaggcttagagaagttaaataatttgcctgagaataaagctaaaagtagctttaaaatactagagctgggattgcaagtttgatgcaaagtttgtgctctcttcatccttcaccaagatctttcattttccctttaaatatctcttatgtctgcatttcccttccattcccatcactagcactgtcctctaatgccccacccagtggggaagtctccaataggtccccctgcttataacagccaagagggtagctataaactaggtccaataacatgcttcatgtgagggaactgatggacagctgtctaattcataacctctggcctcaacggaatttacagttcagagtccaaaatagcaaggaagtggtgggaagaaggtgagagaaaagggtgggagggtgagagaggggagggaggggaataaggtgtgggcagtagagggaatctgtcagtctcatggtttgccctaggaaaccttctgctcagccccagcctgcttctgggcactcctcctcacccctccttgctgtccatatgggttcaatgtgagtaaccacaattgtagagtgtggccatcttcttctgacatggtcctaaataaacctaactgagtagccagaagaatcacttctaaggtaaacatctgtaaacattggttatatttattttcaatattactggttaacattgtggagctattactgatgggccagactctgtgctaggcacagactttctagggattatttcatttaattctcatggcaaccaccatgcatttgcagataggcaagtcaggctcacaaaaatgtatgcagagcttcagggttgtgatgggtagagccaaacccatctgcccaacccaagggcccgtgcgctccaaccctgcatcgaactgccaacatagtacaccttttagaaaaagattcttgttgcaaaagtaccataggcagtgtgtgtgtaaggtcattgtaaaagtgtagataagcaagaaagtgttataccaccactcagaagtaaccactgttaacatgttggcttatctgctctcaggtgtttctgtgcctgtacatactattcttcttgaataaaaacaggattacacagtgt

SEQ ID NO: 19919 - protein, 462 aa, Homo sapiens; identical to SEQ ID NO: 2503

SEQ ID NO: 19920 - DNA, 2695 bp, Homo sapiens
gaagaggaagagagacccgagctagcacactcagtccccttgctatgtgatgttctttaccatctcaggactctgcacagagtccccaacagcaagaaggccctcaccagatacagccccttgacctgggacttctcagcctccataaccgaattggcccctacaagtcaagttgcaaaccctgggtcaaagggtgaagtagaaggaagctggaaacacatagtattttagaagtttttcagagaaatcacaaggcaggaacttctgctcagtttggaagaaagagcattccatcatgacccttggactgggtgagagcatcatcctttaattaatgtctgcgctgggtcagataaccatcactgtctccaggtgctggaatacagagaggaaccaaacagataaaaatccttgcctgcacggagcttaccttcagctaagggagacagtcaaaaacaagtcaacacatctaaagaagccactgatgaaacaggctcccccttggaaagaccatctcaccttccaacctctccatcctgcagagaggaaaacccaagtttggcgttggcagtcaggtaattcatcagatctggaaaccacctcatcagcatccccctggccaactggaagcaaccgtgacgttgtgctgaatacacttgcagagtcgtgctgtggtctctccgagctcatcacggcacctccctatgcaggagtttcaattcaaggatttagccaaatttgggtgctatttcccttttgtggagggacttttcatcacaatgagaaggacgtcttaggactccaggactttgagagagaaagtgtctctacaagtcaaagcaggaatatcagccttcttacactaggacaactccaaaattgtgtgattggcaaattgacaatcatcgatttgttgactgaacacctgttaggtgtaaggcacggtgtcatatgctttccttggggcttgccttcaagcagctaacagaaataagaagaaaacaggtgaaaaagacagtgtgataaggccatggtggtggattgtggatgccctgccctgtatccacttgggagagagcctctacaacatgctggcaacttccccctcactgattcaaatgttaatctcctttggcaacaccctcacagacacacccaggatcaatacgttgtatcctttgatccaatcaagttgccactcagtattaaccatgacaccttctaagccatcatctcctcctaatcctcccataacaatgggtataagttatgaaggtgggttagaaactagtgcctatccctcactaagttgccagatggatttaacagcacctcaaagtcaacatgccccaagtcaaagtcttctttacccatggaataagctggcttgctacttccctacatctctgaagggctccaccattcctctagcaaccatgctctcaaagctcagagggaggaaaaggaaatggatctaaatggaattccaggtcccacgctggatattttcacaccttacctcatttaatacaacaagcaaggaggtagacaatattgtctacctttgcaaatgaggaaacagaggcttagagaagttaaataatttgcctgagaataaagctaaaagtagctttaaaatactagagctgggattgcaagtttgatgcaaagtttgtgctctcttcatccttcaccaagatctttcattttccctttaaatatctcttatgtctgcatttcccttccattcccatcactagcactgtcctctaatgccccacccagtggggaagtctccaataggtccccctgcttataacagccaagagggtagctataaactaggtccaataacatgcttcatgtgagggaactgatggacagctgtctaattcataacctctggcctcaacggaatttacagttcagagtccaaaatagcaaggaagtggtgggaagaaggtgagagaaaagggtgggagggtgagagaggggagggaggggaataaggtgtgggcagtagagggaatctgtcagtctcatggtttgccctaggaaaccttctgctcagccccagcctgcttctgggcactcctcctcacccctccttgctgtccatatgggttcaatgtgagtaaccacaattgtagagtgtggccatcttcttctgacatggtcctaaataaacctaactgagtagccagaagaatcacttctaaggtaaacatctgtaaacattggttatatttattttcaatattactggttaacattgtggagctattactgatgggccagactctgtgctaggcacagactttctagggattatttcatttaattctcatggcaaccaccatgcatttgcagataggcaagtcaggctcacaaaaatgtatgcagagcttcagggttgtgatgggtagagccaaacccatctgcccaacccaagggcccgtgcgctccaaccctgcatcgaactgccaacatagtacaccttttagaaaaagattcttgttgcaaaagtaccataggcagtgtgtgtgtaaggtcattgtaaaagtgtagataagcaagaaagtgttataccaccactcagaagtaaccactgttaacatgttggcttatctgctctcaggtgtttctgtgcctgtacatactattcttcttgaataaaaacaggattacacagtgt

SEQ ID NO: 19921 - protein, 216 aa, Homo sapiens
MSALGQITITVSRCWNTERNQTDKNPCLHGAYLQLRETVKNKSTHLKKPLMKQAPPWKDHLTFQPLHPAERKTQVWRWQSGNSSDLETTSSASPWPTGSNRDVVLNTLAESCCGLSELITAPPYAGVSIQGFSQIWVLFPFCGGTFHHNEKDVLGLQDFERESVSTSQSRNISLLTLGQLQNCVIGKLTIIDLLTEHLLGVRHGVICFPWGLPSSS

SEQ ID NO: 19922 - DNA, 1802 bp, Homo sapiens
gaaagagcattccatcatgacccttggactgggtgagagcatcatcctttaattaatgtctgcgctgggtcagataaccatcactgtctccaggtgctggaatacagagaggaaccaaacagataaaaatccttgcctgcacggagcttaccttcagctaagggagacagtcaaaaacaagtcaacacatctaaagaagccactgatgaaacaggctcccccttggaaagaccatctcaccttccaacctctccatcctgcagagaggaaaacccaagtttggcgttggcagtcaggtaattcatcagatctggaaaccacctcatcagcatccccctggccaactggaagcaaccgtgacgttgtgctgaatacacttgcagagtcgtgctgtggtctctccgagctcatcacggcacctccctatgcaggagtttcaattcaaggatttagccaaatttgggtgctatttcccttttgtggagggacttttcatcacaatgagaaggacgtcttaggactccaggactttgagaggcttgcccatggctgagcatgaaccaatcagcacacacttccctgcttctgagcccattaaaacgctggactcagccagactcagacagaagtcaggactaacagctgtgggaaggagctacccacttccggtatccttgactcttcaggattacctgcctgcaggtacgagctacccaccatgggtctcctctccactgagagctggacacttgccaggacgacctgtctgtggaaaggagttacccactttgtgtctcctgagagctcctctgttactcagtgaagctcctctccaccttgctcgccctccagttgtccaggcattccattcttcctggacgcaagacaaaaacttgggacctgccaaatggtggggctgaaggagctataatacaaacaggggtaaaacacaaaccccgctctccataatgagagaagagctgtgacccttcaaggagttcagacctgggggctccccaggccagcgttgtgacaccttctttagggctctgtggttcctggtgtctccaagcttctgggcaccactgcgtttctcagtgcccacaatggaagccgcttgtagtacgcctggtccaccatcagccacggacagagccagcacctggagctggcctccccactgcagccagcatgcctggctgtgtgcagtggccagaaacccttcacactcacacatccctcgccactctgcacatggctcacccttgacaggcatggaatctggccagtagctagagctgaatgcagcctgctgggtcaagtgggtggaatgagcccagcggtcccgaggaaaacttgggcaaaggttccactggccacagaggtttccagctggcagagtgacaccctaaagatcctgtgacattttccgggacactatcatgaccacagactcagcatcaaacagttaaatgaccttcacagaaacccatgagatgaacttaaagaaaagtcatatgagggattcctgcaggtaaaaagcctgccacaatgtagataaccacctctgccttatcacattggaaaattatggctgagctatgccaggattttgtgaaggctgaggcagaagacaaaagagcctggcttaaagatgtatagacccaccaattccactcctatttctaaacccaaagacatgtccaccaaaagacatacgtaagtatgtccataattgcccaaacttgaatcaactgaatgtccagcaatagtcaaatggggaaattaaacattcaatgaag

SEQ ID NO: 19923 - protein, 165 aa, Homo sapiens
MSALGQITITVSRCWNTERNQTDKNPCLHGAYLQLRETVKNKSTHLKKPLMKQAPPWKDHLTFQPLHPAERKTQVWRWQSGNSSDLETTSSASPWPTGSNRDVVLNTLAESCCGLSELITAPPYAGVSIQGFSQIWVLFPFCGGTFHHNEKDVLGLQDFERLAHG

SEQ ID NO: 19924 - DNA, 4690 bp, Homo sapiens
ggcgaggccggcggctgccgggcctccaatctcggcggcggcggcggcaacaggggagcctgggtctcgcggcctgcgagtccgtcgcgtgctgagggagacgcaggaggtggagccggccgggtgctcgagggaaggagactggaagctggttccggcgtgaggagagtctgaaaaaggggagcgcggagaggaggctggaagaggaagatgcctagcacagaccttctgatgttgaaggcctttgagccctacttagagattttggaagtatactccacaaaagccaagaattatgtaaatggacattgcaccaagtatgagccctggcagctaattgcatggagtgtcgtgtggaccctgctgatagtctggggatatgagtttgtcttccagccagagagtttatggtcaaggtttaaaaagaaatgttttaagctcaccaggaagatgcccattattggtcgtaagattcaagacaagttgaacaagaccaaggatgatattagcaagaacatgtcattcctgaaagtggacaaagagtatgtgaaagctttaccctcccagggtctgagctcatctgctgttttggagaaacttaaggagtacagctctatggacgccttctggcaagaggggagagcctctggaacagtgtacagtggggaggagaagctcactgagctccttgtgaaggcttatggagattttgcatggagtaaccccctgcatccagatatcttcccaggactacgcaagatagaggcagaaatcgtgaggatagcttgttccctgttcaatgggggaccagattcgtgtggatgtgtgacttctgggggaacagaaagcatactgatggcctgcaaagcatatcgggatctggcctttgagaaggggatcaaaactccagaaattgtggctccccaaagtgcccatgctgcatttaacaaagcagccagttactttgggatgaagattgtgcgggtcccattgacgaagatgatggaggtggatgtgcgggcaatgagaagagctatctccaggaacactgccatgctcgtctgttctaccccacagtttcctcatggtgtaatagatcctgtccctgaagtggccaagctggctgtcaaatacaaaataccccttcatgtcgacgcttgtctgggaggcttcctcatcgtctttatggagaaagcaggatacccactggagcacccatttgatttccgggtgaaaggtgtaaccagcatttcagctgacacccataagtatggctatgccccaaaaggctcatcattggtgttgtatagtgacaagaagtacaggaactatcagttcttcgtcgatacagattggcagggtggcatctatgcttccccaaccatcgcaggctcacggcctggtggcattagcgcagcctgttgggctgccttgatgcacttcggtgagaacggctatgttgaagctaccaaacagatcatcaaaactgctcgcttcctcaagtcagaactggaaaatatcaaaggcatctttgtttttgggaatccccaattgtcagtcattgctctgggatcccgtgattttgacatctaccgactatcaaacctgatgactgctaaggggtggaacttgaaccagttgcagttcccacccagtattcatttctgcatcacattactacacgcccggaaacgagtagctatacaattcctaaaggacattcgagaatctgtcactcaaatcatgaagaatcctaaagcgaagaccacaggaatgggtgccatctatggcatggcccagacaactgttgacaggaatatggttgcagaattgtcctcagtcttcttggacagcttgtacagcaccgacactgtcacccagggcagccagatgaatggttctccaaaaccccactgaacttggaccctttctagtctcaaggggattccagccttcagaaggttcttgggatatggaacaggccgtgcacaactttgacatctggtcttgctccatagagcacaactcaagatagaccatgagacagcttgagcctcaggattcttgttcttcctcttatcttccttttgtggtttttaatttgaagaccccagagaattccattacataatgattttgcccttgttataaatgttaccctaggaattgttttaaccatttccttttctaaactctctagctttcaactttacttaaacattgtgtggtagctctgacctgtcctgattctttagagaagctggggtacagtttatgagatagctagagcttctttgttatctcaggcaggaggcgtttacataacagatgtttcctcagctgggtgtgaggtatactctaagcaggaggctttttcagccttctctctcttttttttttttttttttttttttgagatggaattttgctcttttgcccagtctggagtgcagtggcatgatctcagctcactgcaacctccacccactgggttcaagcgattcttctgcctcagcctcccgagtagctgggattaccggcacccaccaccacgcctggctaatttttcaattttctttttcagtagagacgggttcaccgtgttggccaggctggtcttgaactcctgacctcaggtgatacccgcccccccgcctcagcctcccaaagtgctgggattacaggcgtgagccaccgtgcctggccctgtctctcttaagagtaggttcattgtctgtcttagagtcacttctattgcaactcattttctttttccagggcacagatcgaccaagctgccgttccctattctgcaggacaggactattctagcatacctgcttcgtccacccaggcagggtttggggtggtctcttctgtgcctgcagtccccatttgacacttggttgccaccatctttggagattattgtttggaatgatgcttccattggctttttcttgttaccatggactaggaagaaaacatggtttccaaataatctgggagcttttggccatggtgccgccttcctgaattggcagtggtcagagcacacctgaaccctatcctgggctggtgatgagcagaaatcagacctttttctatgcttttttgaatatcagagtaggatgaacacccagattcaaatatgtcaccaaagttggtggtggtccttccctgcacccttgcgttaagccattatgtaatgaaaatgtgtttgcttgaaggaacagctcaaagcaccttcacaagttgccttgacttaccctaggtgggtgtgaaagagcacccgtagcaaggaaaattttctctattagtgtgttcttctgcctcttcccccttgattcagctttcagaggtactatggcagttttgcctcaggtgctgaacatttctcagccctggctaaaagggagcagcacagggagagaaacaggataggaaagcagaatggcgagcagcctatggcccagggcctgtaatcccttcccaagactagctgctcagggtggtgcagggacaggaccagaccctgcgcctatttcctgccttctttcccctatagggaactctgtaggctgagccactgtcctgctcttatgacattatatcttgtgcctttctcctcagcagtgagcagtgagctactcctggcccaggccctaggggaaatggatcagtctttgaggtttctatttggggaggggagtacttaagatgagtcaaaagacactttcctctgttccattccccatctcagggactcctgaatattcagcctctccaggctggtgtcttctagtttcccccactgggaatgctggctgggagagccatgactaccagacttttcctcaggctccttggcatgttagtctgaattgttcttgagcactgtactactgacccaacaactgtgactagctggccacgccattcagggctggtgtggcatttatgtgtgtgtgtgtgtgtgtgtgtgtttttcctgtttgcccagcagtgcattgtgggttccaagagtgggtagtgtgtgtatgtgtgtgtgtcagagggagacctggcaggcacctctttgagagtagctgtggtcagagctgtttggtcagtgcattatgttgaatgaggtccaggaacccagagccacccagcagacaccactgtggcttgccagctgccaagatggagaagcatgtgcccctgtagagcgtctccccagaaccagaccccgagccactcgcttcctctgtgctgtgacaacattggtgccaggggagatggtgtttttcaaagggacctactgtagccactttaatttacaattaagagccttagtttgacttaacacttttgtaggcttttcattgtgtatttttgtgtatgtgtgcatatagcagctactctgtagcagaggtgggtagagacacttaatagtatcatgtcgcatgcagatgtcacatcggcctctgcaaaaactgtactgtcttgtttctgcattagacttaagtagtcatgtgaatatactgctatgtcacttttaatattacgagttttatacttggaaaatggtacttgcttcttttaaatctctgtcttctctaacctcccccttcccatttcaatgctcccttcctaatttcagcaataatctcaaaaagcaattaaatagttaaatgaccctaattgt

SEQ ID NO: 19925 - protein, 568 aa, Homo sapiens; identical to SEQ ID NO: 2507

SEQ ID NO: 19926 - DNA, 5774 bp, Homo sapiens
cgaggccggcggctgccgggcctccaatctcggcggcggcggcggcaacaggggagcctgggtctcgcggcctgcgagtccgtcgcgtgctgagggagacgcaggaggtggagccggccgggtgctcgagggaaggagactggaagctggttccggcgtgaggagagtctgaaaaaggggagcgcggagaggaggctggaagaggaagatgcctagcacagaccttctgatgttgaaggcctttgagccctacttagagattttggaagtatactccacaaaagccaagaattatgtaaatggacattgcaccaagtatgagccctggcagctaattgcatggagtgtcgtgtggaccctgctgatagtctggggatatgagtttgtcttccagccagagagtttatggtcaaggtttaaaaagaaatgttttaagctcaccaggaagatgcccattattggtcgtaagattcaagacaagttgaacaagaccaaggatgatattagcaagaacatgtcattcctgaaagtggacaaagagtatgtgaaagctttaccctcccagggtctgagctcatctgctgttttggagaaacttaaggagtacagctctatggacgccttctggcaagaggggagagcctctggaacagtgtacagtggggaggagaagctcactgagctccttgtgaaggcttatggagattttgcatggagtaaccccctgcatccagatatcttcccaggactacgcaagatagaggcagaaatcgtgaggatagcttgttccctgttcaatgggggaccagattcgtgtggatgtgtgacttctgggggaacagaaagcatactgatggcctgcaaagcatatcgggatctggcctttgagaaggggatcaaaactccagaaattgtggctccccaaagtgcccatgctgcatttaacaaagcagccagttactttgggatgaagattgtgcgggtcccattgacgaagatgatggaggtggatgtgcgggcaatgagaagagctatctccaggaacactgccatgctcgtctgttctaccccacagtttcctcatggtgtaatagatcctgtccctgaagtggccaagctggctgtcaaatacaaaataccccttcatgtcgacgcttgtctgggaggcttcctcatcgtctttatggagaaagcaggatacccactggagcacccatttgatttccgggtgaaaggtgtaaccagcatttcagctgacacccataagtatggctatgccccaaaaggctcatcattggtgttgtatagtgacaagaagtacaggaactatcagttcttcgtcgatacagattggcagggtggcatctatgcttccccaaccatcgcaggctcacggcctggtggcattagcgcagcctgttgggctgccttgatgcacttcggtgagaacggctatgttgaagctaccaaacagatcatcaaaactgctcgcttcctcaagtcagaactggaaaatatcaaaggcatctttgtttttgggaatccccaattgtcagtcattgctctgggatcccgtgattttgacatctaccgactatcaaacctgatgactgctaaggggtggaacttgaaccagttgcagttcccacccagtattcatttctgcatcacattactacacgcccggaaacgagtagctatacaattcctaaaggacattcgagaatctgtcactcaaatcatgaagaatcctaaagcgaagaccacaggaatgggtgccatctatggcatggcccagacaactgttgacaggaatatggttgcagaattgtcctcagtcttcttggacagcttgtacagcaccgacactgtcacccagggcagccagatgaatggttctccaaaaccccactgaacttggaccctttctagtctcaaggggattccagccttcagaaggttcttgggatatggaacaggccgtgcacaactttgacatctggtcttgctccatagagcacaactcaagatagaccatgagacagcttgagcctcaggattcttgttcttcctcttatcttccttttgtggtttttaatttgaagaccccagagaattccattacataatgattttgcccttgttataaatgttaccctaggaattgttttaaccatttccttttctaaactctctagctttcaactttacttaaacattgtgtggtagctctgacctgtcctgattctttagagaagctggggtacagtttatgagatagctagagcttctttgttatctcaggcaggaggcgtttacataacagatgtttcctcagctgggtgtgaggtatactctaagcaggaggctttttcagccttctctctcttttttttttttttttttttttttgagatggaattttgctcttttgcccagtctggagtgcagtggcatgatctcagctcactgcaacctccacccactgggttcaagcgattcttctgcctcagcctcccgagtagctgggattaccggcacccaccaccacgcctggctaatttttcaattttctttttcagtagagacgggttcaccgtgttggccaggctggtcttgaactcctgacctcaggtgatacccgcccccccgcctcagcctcccaaagtgctgggattacaggcgtgagccaccgtgcctggccctgtctctcttaagagtaggttcattgtctgtcttagagtcacttctattgcaactcattttctttttccagggcacagatcgaccaagctgccgttccctattctgcaggacaggactattctagcatacctgcttcgtccacccaggcagggtttggggtggtctcttctgtgcctgcagtccccatttgacacttggttgccaccatctttggagattattgtttggaatgatgcttccattggctttttcttgttaccatggactaggaagaaaacatggtttccaaataatctgggagcttttggccatggtgccgccttcctgaattggcagtggtcagagcacacctgaaccctatcctgggctggtgatgagcagaaatcagacctttttctatgcttttttgaatatcagagtaggatgaacacccagattcaaatatgtcaccaaagttggtggtggtccttccctgcacccttgcgttaagccattatgtaatgaaaatgtgtttgcttgaaggaacagctcaaagcaccttcacaagttgccttgacttaccctaggtgggtgtgaaagagcacccgtagcaaggaaaattttctctattagtgtgttcttctgcctcttcccccttgattcagctttcagaggtactatggcagttttgcctcaggtgctgaacatttctcagccctggctaaaagggagcagcacagggagagaaacaggataggaaagcagaatggcgagcagcctatggcccagggcctgtaatcccttcccaagactagctgctcagggtggtgcagggacaggaccagaccctgcgcctatttcctgccttctttcccctatagggaactctgtaggctgagccactgtcctgctcttatgacattatatcttgtgcctttctcctcagcagtgagcagtgagctactcctggcccaggccctaggggaaatggatcagtctttgaggtttctatttggggaggggagtacttaagatgagtcaaaagacactttcctctgttccattccccatctcagggactcctgaatattcagcctctccaggctggtgtcttctagtttcccccactgggaatgctggctgggagagccatgactaccagacttttcctcaggctccttggcatgttagtctgaattgttcttgagcactgtactactgacccaacaactgtgactagctggccacgccattcagggctggtgtggcatttatgtgtgtgtgtgtgtgtgtgtgtgtttttcctgtttgcccagcagtgcattgtgggttccaagagtgggtagtgtgtgtatgtgtgtgtgtcagagggagacctggcaggcacctctttgagagtagctgtggtcagagctgtttggtcagtgcattatgttgaatgaggtccaggaacccagagccacccagcagacaccactgtggcttgccagctgccaagatggagaagcatgtgcccctgtagagcgtctccccagaaccagaccccgagccactcgcttcctctgtgctgtgacaacattggtgccaggggagatggtgtttttcaaagggacctactgtagccactttaatttacaattaagagccttagtttgacttaacacttttgtaggcttttcattgtgtatttttgtgtatgtgtgcatatagcagctactctgtagcagaggtgggtagagacacttaatagtatcatgtcgcatgcagatgtcacatcggcctctgcaaaaactgtactgtcttgtttctgcattagacttaagtagtcatgtgaatatactgctatgtcacttttaatattacgagttttatacttggaaaatggtacttgcttcttttaaatctctgtcttctctaacctcccccttcccatttcaatgctcccttcctaatttcagcaataatctcaaaaagcaattaaatagttaaatgaccctaattgtaattactgtggatggttgcattcatttgattacttgggcacacacgagatgacaaatggggcagtggccatgcttgaatgggctcctggtgagagattgccccctggtggtgaaacaatcgtgtgtgcccactgataccaagaccaatgaaagagacacagttaagcagcaatccatctcatttccaggcacttcaataggtcgctgattggtccttgcaccagcagtggtagtcgtacctatttcagagaggtctgaaattcaggttcttagtttgccagggacaggccctatcttatatttttttccatcttcatcatccacttctgcttacagtttgctgcttacaataacttaatgatggattgagttatctgggtggtctctagccatctgggcagtgtggttctgtctaaccaaagggcattggcctcaaaccctgcatttggtttaggggctaacagagctcctcagataatcttcacacacatgtaactgctggagatcttattctattatgaataagaaacgagaagtttttccaaagtgttagtcaggatctgaaggctgtcattcagataacccagcttttccttttggcttttagcccattcagactttgccagagtcaagccaaggattgcttttttgctacagttttctgccaaatggcctagttcctgagtacctggaaaccagagagaaagaggatccaggatgtacttggatgaggaggcctggcttatctaggaagtcgtgtctggggtgcttattgctgctccatacagctgtacgtcagccccttggccttctctgtaggttcttggcagcaatgagcagctttcactcagtgacacaagtaattactgagtcctaatttgatagccaccaactgtacctgggtaggcaaagtcagatttttgagaacctttttcctgatttgaagttttaattaccttattttcttttatgctttcctctgtcttgtaatcttttctcttcttaatatccttccctataatttcaattatttggattaattttagaataaacctatttatttctaaaaaaaaaaagaaaagaaag

SEQ ID NO: 19927 - protein, 568 aa, Homo sapiens; identical to SEQ ID NO: 2507

SEQ ID NO: 19928 - DNA, 1684 bp, Homo sapiens
agcaggatacccactggagcacccatttgatttccgggtgaaaggtgtaaccagcatttcagcagacaccactgtggcttgccagctgccaagatggagaagcatgtgcccctgtagagcgtctccccagaaccagaccccgagccactcgcttcctctgtgctgtgacaacattggtgccaggggagatggtgtttttcaaagggacctactgtagccactttaatttacaattaagagccttagtttgacttaacacttttgtaggcttttcattgtgtatttttgtgtatgtgtgcatatagcagctactctgtagcagaggtgggtagagacacttaatagtatcatgtcgcatgcagatgtcacatcggcctctgcaaaaactgtactgtcttgtttctgcattagacttaagtagtcatgtgaatatactgctatgtcacttttaatattacgagttttatacttggaaaatggtacttgcttcttttaaatctctgtcttctctaacctcccccttcccatttcaatgctcccttcctaatttcagcaataatctcaaaaagcaattaaatagttaaatgaccctaattgtaattactgtggatggttgcattcatttgattacttgggcacacacgagatgacaaatggggcagtggccatgcttgaatgggctcctggtgagagattgccccctggtggtgaaacaatcgtgtgtgcccactgataccaagaccaatgaaagagacacagttaagcagcaatccatctcatttccaggcacttcaataggtcgctgattggtccttgcaccagcagtggtagtcgtacctatttcagagaggtctgaaattcaggttcttagtttgccagggacaggccctatcttatatttttttccatcttcatcatccacttctgcttacagtttgctgcttacaataacttaatgatggattgagttatctgggtggtctctagccatctgggcagtgtggttctgtctaaccaaagggcattggcctcaaaccctgcatttggtttaggggctaacagagctcctcagataatcttcacacacatgtaactgctggagatcttattctattatgaataagaaacgagaagtttttccaaagtgttagtcaggatctgaaggctgtcattcagataacccagcttttccttttggcttttagcccattcagactttgccagagtcaagccaaggattgcttttttgctacagttttctgccaaatggcctagttcctgagtacctggaaaccagagagaaagaggatccaggatgtacttggatgaggaggcctggcttatctaggaagtcgtgtctggggtgcttattgctgctccatacagctgtacgtcagccccttggccttctctgtaggttcttggcagcaatgagcagctttcactcagtgacacaagtaattactgagtcctaatttgatagccaccaactgtacctgggtaggcaaagtcagatttttgagaacctttttcctgatttgaagttttaattaccttattttcttttatgctttcctctgtcttgtaatcttttctcttcttaatatccttccctataatttcaattatttggattaattttagaataaacctatttatttctaaaaaaaaaaagaaaagaaag

SEQ ID NO: 19929 - protein, 50 aa, Homo sapiens
MGQWPCLNGLLVRDCPLVVKQSCVPTDTKTNERDTVKQQSISFPGTSIGR

SEQ ID NO: 19930 - DNA, 2939 bp, Homo sapiens
agtatggctatgccccaaaaggctcatcattggtgttgtatagtgacaagaagtacaggaaaggaatatggttgcagaattgtcctcagtcttcttggacagcttgtacagcaccgacactgtcacccagggcagccagatgaatggttctccaaaaccccactgaacttggaccctttctagtctcaaggggattccagccttcagaaggttcttgggatatggaacaggccgtgcacaactttgacatctggtcttgctccatagagcacaactcaagatagaccatgagacagcttgagcctcaggattcttgttcttcctcttatcttccttttgtggtttttaatttgaagaccccagagaattccattacataatgattttgcccttgttataaatgttaccctaggaattgttttaaccatttccttttctaaactctctagctttcaactttacttaaacattgtgtggtagctctgacctgtcctgattctttagagaagctggggtacagtttatgagatagctagagcttctttgttatctcaggcaggaggcgtttacataacagatgtttcctcagctgggtgtgaggtatactctaagcaggaggctttttcagccttctctctcttttttttttttttttttttttttgagatggaattttgctcttttgcccagtctggagtgcagtggcatgatctcagctcactgcaacctccacccactgggttcaagcgattcttctgcctcagcctcccgagtagctgggattaccggcacccaccaccacgcctggctaatttttcaattttctttttcagtagagacgggttcaccgtgttggccaggctggtcttgaactcctgacctcaggtgatacccgcccccccgcctcagcctcccaaagtgctgggattacaggcgtgagccaccgtgcctggccctgtctctcttaagagtaggttcattgtctgtcttagagtcacttctattgcaactcattttctttttccagggcacagatcgaccaagctgccgttccctattctgcaggacaggactattctagcatacctgcttcgtccacccaggcagggtttggggtggtctcttctgtgcctgcagtccccatttgacacttggttgccaccatctttggagattattgtttggaatgatgcttccattggctttttcttgttaccatggactaggaagaaaacatggtttccaaataatctgggagcttttggccatggtgccgccttcctgaattggcagtggtcagagcacacctgaaccctatcctgggctggtgatgagcagaaatcagacctttttctatgcttttttgaatatcagagtaggatgaacacccagattcaaatatgtcaccaaagttggtggtggtccttccctgcacccttgcgttaagccattatgtaatgaaaatgtgtttgcttgaaggaacagctcaaagcaccttcacaagttgccttgacttaccctaggtgggtgtgaaagagcacccgtagcaaggaaaattttctctattagtgtgttcttctgcctcttcccccttgattcagctttcagaggtactatggcagttttgcctcaggtgctgaacatttctcagccctggctaaaagggagcagcacagggagagaaacaggataggaaagcagaatggcgagcagcctatggcccagggcctgtaatcccttcccaagactagctgctcagggtggtgcagggacaggaccagaccctgcgcctatttcctgccttctttcccctatagggaactctgtaggctgagccactgtcctgctcttatgacattatatcttgtgcctttctcctcagcagtgagcagtgagctactcctggcccaggccctaggggaaatggatcagtctttgaggtttctatttggggaggggagtacttaagatgagtcaaaagacactttcctctgttccattccccatctcagggactcctgaatattcagcctctccaggctggtgtcttctagtttcccccactgggaatgctggctgggagagccatgactaccagacttttcctcaggctccttggcatgttagtctgaattgttcttgagcactgtactactgacccaacaactgtgactagctggccacgccattcagggctggtgtggcatttatgtgtgtgtgtgtgtgtgtgtgtgtttttcctgtttgcccagcagtgcattgtgggttccaagagtgggtagtgtgtgtatgtgtgtgtgtcagagggagacctggcaggcacctctttgagagtagctgtggtcagagctgtttggtcagtgcattatgttgaatgaggtccaggaacccagagccacccagcagacaccactgtggcttgccagctgccaagatggagaagcatgtgcccctgtagagcgtctccccagaaccagaccccgagccactcgcttcctctgtgctgtgacaacattggtgccaggggagatggtgtttttcaaagggacctactgtagccactttaatttacaattaagagccttagtttgacttaacacttttgtaggcttttcattgtgtatttttgtgtatgtgtgcatatagcagctactctgtagcagaggtgggtagagacacttaatagtatcatgtcgcatgcagatgtcacatcggcctctgcaaaaactgtactgtcttgtttctgcattagacttaagtagtcatgtgaatatactgctatgtcacttttaatattacgagttttatacttggaaaatggtacttgcttcttttaaatctctgtcttctctaacctcccccttcccatttcaatgctcccttcctaatttcagcaataatctcaaaaagcaattaaatagttaaatgaccctaattgt

SEQ ID NO: 19931 - protein, 59 aa, Homo sapiens [sequence omitted]

SEQ ID NO: 19932 - DNA, 4025 bp, Homo sapiens
agtatggctatgccccaaaaggctcatcattggtgttgtatagtgacaagaagtacaggaaaggaatatggttgcagaattgtcctcagtcttcttggacagcttgtacagcaccgacactgtcacccagggcagccagatgaatggttctccaaaaccccactgaacttggaccctttctagtctcaaggggattccagccttcagaaggttcttgggatatggaacaggccgtgcacaactttgacatctggtcttgctccatagagcacaactcaagatagaccatgagacagcttgagcctcaggattcttgttcttcctcttatcttccttttgtggtttttaatttgaagaccccagagaattccattacataatgattttgcccttgttataaatgttaccctaggaattgttttaaccatttccttttctaaactctctagctttcaactttacttaaacattgtgtggtagctctgacctgtcctgattctttagagaagctggggtacagtttatgagatagctagagcttctttgttatctcaggcaggaggcgtttacataacagatgtttcctcagctgggtgtgaggtatactctaagcaggaggctttttcagccttctctctcttttttttttttttttttttttttgagatggaattttgctcttttgcccagtctggagtgcagtggcatgatctcagctcactgcaacctccacccactgggttcaagcgattcttctgcctcagcctcccgagtagctgggattaccggcacccaccaccacgcctggctaatttttcaattttctttttcagtagagacgggttcaccgtgttggccaggctggtcttgaactcctgacctcaggtgatacccgcccccccgcctcagcctcccaaagtgctgggattacaggcgtgagccaccgtgcctggccctgtctctcttaagagtaggttcattgtctgtcttagagtcacttctattgcaactcattttctttttccagggcacagatcgaccaagctgccgttccctattctgcaggacaggactattctagcatacctgcttcgtccacccaggcagggtttggggtggtctcttctgtgcctgcagtccccatttgacacttggttgccaccatctttggagattattgtttggaatgatgcttccattggctttttcttgttaccatggactaggaagaaaacatggtttccaaataatctgggagcttttggccatggtgccgccttcctgaattggcagtggtcagagcacacctgaaccctatcctgggctggtgatgagcagaaatcagacctttttctatgcttttttgaatatcagagtaggatgaacacccagattcaaatatgtcaccaaagttggtggtggtccttccctgcacccttgcgttaagccattatgtaatgaaaatgtgtttgcttgaaggaacagctcaaagcaccttcacaagttgccttgacttaccctaggtgggtgtgaaagagcacccgtagcaaggaaaattttctctattagtgtgttcttctgcctcttcccccttgattcagctttcagaggtactatggcagttttgcctcaggtgctgaacatttctcagccctggctaaaagggagcagcacagggagagaaacaggataggaaagcagaatggcgagcagcctatggcccagggcctgtaatcccttcccaagactagctgctcagggtggtgcagggacaggaccagaccctgcgcctatttcctgccttctttcccctatagggaactctgtaggctgagccactgtcctgctcttatgacattatatcttgtgcctttctcctcagcagtgagcagtgagctactcctggcccaggccctaggggaaatggatcagtctttgaggtttctatttggggaggggagtacttaagatgagtcaaaagacactttcctctgttccattccccatctcagggactcctgaatattcagcctctccaggctggtgtcttctagtttcccccactgggaatgctggctgggagagccatgactaccagacttttcctcaggctccttggcatgttagtctgaattgttcttgagcactgtactactgacccaacaactgtgactagctggccacgccattcagggctggtgtggcatttatgtgtgtgtgtgtgtgtgtgtgtgtttttcctgtttgcccagcagtgcattgtgggttccaagagtgggtagtgtgtgtatgtgtgtgtgtcagagggagacctggcaggcacctctttgagagtagctgtggtcagagctgtttggtcagtgcattatgttgaatgaggtccaggaacccagagccacccagcagacaccactgtggcttgccagctgccaagatggagaagcatgtgcccctgtagagcgtctccccagaaccagaccccgagccactcgcttcctctgtgctgtgacaacattggtgccaggggagatggtgtttttcaaagggacctactgtagccactttaatttacaattaagagccttagtttgacttaacacttttgtaggcttttcattgtgtatttttgtgtatgtgtgcatatagcagctactctgtagcagaggtgggtagagacacttaatagtatcatgtcgcatgcagatgtcacatcggcctctgcaaaaactgtactgtcttgtttctgcattagacttaagtagtcatgtgaatatactgctatgtcacttttaatattacgagttttatacttggaaaatggtacttgcttcttttaaatctctgtcttctctaacctcccccttcccatttcaatgctcccttcctaatttcagcaataatctcaaaaagcaattaaatagttaaatgaccctaattgtaattactgtggatggttgcattcatttgattacttgggcacacacgagatgacaaatggggcagtggccatgcttgaatgggctcctggtgagagattgccccctggtggtgaaacaatcgtgtgtgcccactgataccaagaccaatgaaagagacacagttaagcagcaatccatctcatttccaggcacttcaataggtcgctgattggtccttgcaccagcagtggtagtcgtacctatttcagagaggtctgaaattcaggttcttagtttgccagggacaggccctatcttatatttttttccatcttcatcatccacttctgcttacagtttgctgcttacaataacttaatgatggattgagttatctgggtggtctctagccatctgggcagtgtggttctgtctaaccaaagggcattggcctcaaaccctgcatttggtttaggggctaacagagctcctcagataatcttcacacacatgtaactgctggagatcttattctattatgaataagaaacgagaagtttttccaaagtgttagtcaggatctgaaggctgtcattcagataacccagcttttccttttggcttttagcccattcagactttgccagagtcaagccaaggattgcttttttgctacagttttctgccaaatggcctagttcctgagtacctggaaaccagagagaaagaggatccaggatgtacttggatgaggaggcctggcttatctaggaagtcgtgtctggggtgcttattgctgctccatacagctgtacgtcagccccttggccttctctgtaggttcttggcagcaatgagcagctttcactcagtgacacaagtaattactgagtcctaatttgatagccaccaactgtacctgggtaggcaaagtcagatttttgagaacctttttcctgatttgaagttttaattaccttattttcttttatgctttcctctgtcttgtaatcttttctcttcttaatatccttccctataatttcaattatttggattaattttagaataaacctatttatttctaaaaaaaaaaagaaaagaaag

SEQ ID NO: 19933 - protein, 59 aa, Homo sapiens [sequence omitted]

SEQ ID NO: 19934 - DNA, 1570 bp, Homo sapiens
tcgaccaagctgccgttccctattctgcaggacaggactattctagcatacctgcttcgtccacccaggcagggtttggggtggtctcttctgtgcctgcagtccccatttgacacttggttgccaccatctttggagattattgtttggaatgatgcttccattggctttttcttgttaccatggactaggaagaaaacatggtttccaaataatctgggagcttttggccatggtgccgccttcctgaattggcagtggtcagagcacacctgaaccctatcctgggctggtgatgagcagaaatcagacctttttctatgcttttttgaatatcagagtaggatgaacacccagattcaaatatgtcaccaaagttggtggtggtccttccctgcacccttgcgttaagccattatgtaatgaaaatgtgtttgcttgaaggaacagctcaaagcaccttcacaagttgccttgacttaccctaggtgggtgtgaaagagcacccgtagcaaggaaaattttctctattagtgtgttcttctgcctcttcccccttgattcagctttcagaggtactatggcagttttgcctcaggtgctgaacatttctcagccctggctaaaagggagcagcacagggagagaaacaggataggaaagcagaatggcgagcagcctatggcccagggcctgtaatcccttcccaagactagctgctcagggtggtgcagggacaggaccagaccctgcgcctatttcctgccttctttcccctatagggaactctgtaggctgagccactgtcctgctcttatgacattatatcttgtgcctttctcctcagcagtgagcagtgagctactcctggcccaggccctaggggaaatggatcagtctttgaggtttctatttggggaggggagtacttaagatgagtcaaaagacactttcctctgttccattccccatctcagggactcctgaatattcagcctctccaggctggtgtcttctagtttcccccactgggaatgctggctgggagagccatgactaccagacttttcctcaggctccttggcatgttagtctgaattgttcttgagcactgtactactgacccaacaactgtgactagctggccacgccattcagggctggtgtggcatttatgtgtgtgttgtgtgtgtcagagggagacctggcaggcacctctttgacttaacacttttgtaggcttttcattgtgtatttttgtgtatgtgtgcatatagcagctactctgtagcagaggtgggtagagacacttaatagtatcatgtcgcatgcagatgtcacatcggcctctgcaaaaactgtactgtcttgtttctgcattagacttaagtagtcatgtgaatatactgctatgtcacttttaatattacgagttttatacttggaaaatggtacttgcttcttttaaatctctgtcttctctaacctcccccttcccatttcaatgctcccttcctaatttcagcaataatctcaaaaagcaattaaatagttaaatgaccctaattgt

SEQ ID NO: 19935 - protein, 57 aa, Homo sapiens [sequence omitted]

SEQ ID NO: 19936 - DNA, 1943 bp, Homo sapiens
ctagcatacctgcttcgtccacccaggcagggtttggggtggtctcttctgtgcctgcagtccccatttgacacttggttgccaccatctttggagattattgtttggaatgatgcttccattggctttttcttgttaccatggactaggaagaaaacatggtttccaaataatctgggagcttttggccatggtgccgccttcctgaattggcagtggtcagagcacacctgaaccctatcctgggctggtgatgagcagaaatcagacctttttctatgcttttttgaatatcagagtaggatgaacacccagattcaaatatgtcaccaaagttggtggtggtccttccctgcacccttgcgttaagccattatgtaatgaaaatgtgtttgcttgaaggaacagctcaaagcaccttcacaagttgccttgacttaccctaggtgggtgtgaaagagcacccgtagcaaggaaaattttctctattagtgtgttcttctgcctcttcccccttgattcagctttcagaggtactatggcagttttgcctcaggtgctgaacatttctcagccctggctaaaagggagcaacacttaatagtatcatgtcgcatgcagatgtcacatcggcctctgcaaaaactgtactgtcttgtttctgcattagacttaagtagtcatgtgaatatactgctatgtcacttttaatattacgagttttatacttggaaaatggtacttgcttcttttaaatctctgtcttctctaacctcccccttcccatttcaatgctcccttcctaatttcagcaataatctcaaaaagcaattaaatagttaaatgaccctaattgtaattactgtggatggttgcattcatttgattacttgggcacacacgagatgacaaatggggcagtggccatgcttgaatgggctcctggtgagagattgccccctggtggtgaaacaatcgtgtgtgcccactgataccaagaccaatgaaagagacacagttaagcagcaatccatctcatttccaggcacttcaataggtcgctgattggtccttgcaccagcagtggtagtcgtacctatttcagagaggtctgaaattcaggttcttagtttgccagggacaggccctatcttatatttttttccatcttcatcatccacttctgcttacagtttgctgcttacaataacttaatgatggattgagttatctgggtggtctctagccatctgggcagtgtggttctgtctaaccaaagggcattggcctcaaaccctgcatttggtttaggggctaacagagctcctcagataatcttcacacacatgtaactgctggagatcttattctattatgaataagaaacgagaagtttttccaaagtgttagtcaggatctgaaggctgtcattcagataacccagcttttccttttggcttttagcccattcagactttgccagagtcaagccaaggattgcttttttgctacagttttctgccaaatggcctagttcctgagtacctggaaaccagagagaaagaggatccaggatgtacttggatgaggaggcctggcttatctaggaagtcgtgtctggggtgcttattgctgctccatacagctgtacgtcagccccttggccttctctgtaggttcttggcagcaatgagcagctttcactcagtgacacaagtaattactgagtcctaatttgatagccaccaactgtacctgggtaggcaaagtcagatttttgagaacctttttcctgatttgaagttttaattaccttattttcttttatgctttcctctgtcttgtaatcttttctcttcttaatatccttccctataatttcaattatttggattaattttagaataaacctatttatttctaaaaaaaaaaagaaaagaaag

SEQ ID NO: 19937 - protein, 50 aa, Homo sapiens; identical to SEQ ID NO: 19929

SEQ ID NO: 19938 - DNA, 1284 bp, Homo sapiens
ccattatgtaatgaaaatgtgtttgcttgaaggaacagctcaaagcaccttcacaagttgccttgacttaccctaggtgggtgtgaaagagcacccgtagcaaggaaaattttctctattagtgtgttcttctgcctcttcccccttgattcagctttcagaggtactatggcagttttgcctcaggtgctgaacatttctcagccctggctaaaagggagcagcacagggagagaaacaggataggaaagcagaatggcgagcagcctatggcccagggcctgtaatcccttcccaagactagctgctcagggtggtgcagggacaggaccagaccctgcgcctatttcctgccttctttcccctatagggaactctgtaggctgagccactgtcctgctcttatgacattatatcttgtgcctttctcctcagcagtgagcagtgagctactcctggcccaggccctaggggaaatggatcagtctttgaggtttctatttggggaggggagtacttaagatgagtcaaaagacactttcctctgttccattccccatctcagggactcctgaatattcagcctctccaggctggtgtcttctagtttcccccactgggaatgctggctgggagagccatgactaccagacttttcctcaggctccttggcatgttagtctgaattgttcttgagcactgtactactgacccaacaactgtgactagctggccacgccattcagggctggtgtggcatttatgtgtgtgtgtgtgtgtgtgtgtgtttttcctgtttgcccagcagtgcattgtgggttccaagagtgggtagtgtgtgtatgttgctgtgacaacattggtgccaggggagatggtgtttttcaaagggacctactgtagccactttaatttacaattaagagccttagtttgacttaacacttttgtaggcttttcattgtgtatttttgtgtatgtgtgcatatagcagctactctgtagcagaggtgggtagagacacttaatagtatcatgtcgcatgcagatgtcacatcggcctctgcaaaaactgtactgtcttgtttctgcattagacttaagtagtcatgtgaatatactgctatgtcacttttaatattacgagttttatacttggaaaatggtacttgcttcttttaaatctctgtcttctctaacctcccccttcccatttcaatgctcccttcctaatttcagcaataatctcaaaaagcaattaaatagttaaatgaccctaattgt

SEQ ID NO: 19939 - protein, 46 aa, Homo sapiens
MCVCVCVCVFPVCPAVHCGFQEWVVCVCCCDNIGARGDGVFQRDLL

SEQ ID NO: 19940 - DNA, 2370 bp, Homo sapiens
ccattatgtaatgaaaatgtgtttgcttgaaggaacagctcaaagcaccttcacaagttgccttgacttaccctaggtgggtgtgaaagagcacccgtagcaaggaaaattttctctattagtgtgttcttctgcctcttcccccttgattcagctttcagaggtactatggcagttttgcctcaggtgctgaacatttctcagccctggctaaaagggagcagcacagggagagaaacaggataggaaagcagaatggcgagcagcctatggcccagggcctgtaatcccttcccaagactagctgctcagggtggtgcagggacaggaccagaccctgcgcctatttcctgccttctttcccctatagggaactctgtaggctgagccactgtcctgctcttatgacattatatcttgtgcctttctcctcagcagtgagcagtgagctactcctggcccaggccctaggggaaatggatcagtctttgaggtttctatttggggaggggagtacttaagatgagtcaaaagacactttcctctgttccattccccatctcagggactcctgaatattcagcctctccaggctggtgtcttctagtttcccccactgggaatgctggctgggagagccatgactaccagacttttcctcaggctccttggcatgttagtctgaattgttcttgagcactgtactactgacccaacaactgtgactagctggccacgccattcagggctggtgtggcatttatgtgtgtgtgtgtgtgtgtgtgtgtttttcctgtttgcccagcagtgcattgtgggttccaagagtgggtagtgtgtgtatgttgctgtgacaacattggtgccaggggagatggtgtttttcaaagggacctactgtagccactttaatttacaattaagagccttagtttgacttaacacttttgtaggcttttcattgtgtatttttgtgtatgtgtgcatatagcagctactctgtagcagaggtgggtagagacacttaatagtatcatgtcgcatgcagatgtcacatcggcctctgcaaaaactgtactgtcttgtttctgcattagacttaagtagtcatgtgaatatactgctatgtcacttttaatattacgagttttatacttggaaaatggtacttgcttcttttaaatctctgtcttctctaacctcccccttcccatttcaatgctcccttcctaatttcagcaataatctcaaaaagcaattaaatagttaaatgaccctaattgtaattactgtggatggttgcattcatttgattacttgggcacacacgagatgacaaatggggcagtggccatgcttgaatgggctcctggtgagagattgccccctggtggtgaaacaatcgtgtgtgcccactgataccaagaccaatgaaagagacacagttaagcagcaatccatctcatttccaggcacttcaataggtcgctgattggtccttgcaccagcagtggtagtcgtacctatttcagagaggtctgaaattcaggttcttagtttgccagggacaggccctatcttatatttttttccatcttcatcatccacttctgcttacagtttgctgcttacaataacttaatgatggattgagttatctgggtggtctctagccatctgggcagtgtggttctgtctaaccaaagggcattggcctcaaaccctgcatttggtttaggggctaacagagctcctcagataatcttcacacacatgtaactgctggagatcttattctattatgaataagaaacgagaagtttttccaaagtgttagtcaggatctgaaggctgtcattcagataacccagcttttccttttggcttttagcccattcagactttgccagagtcaagccaaggattgcttttttgctacagttttctgccaaatggcctagttcctgagtacctggaaaccagagagaaagaggatccaggatgtacttggatgaggaggcctggcttatctaggaagtcgtgtctggggtgcttattgctgctccatacagctgtacgtcagccccttggccttctctgtaggttcttggcagcaatgagcagctttcactcagtgacacaagtaattactgagtcctaatttgatagccaccaactgtacctgggtaggcaaagtcagatttttgagaacctttttcctgatttgaagttttaattaccttattttcttttatgctttcctctgtcttgtaatcttttctcttcttaatatccttccctataatttcaattatttggattaattttagaataaacctatttatttctaaaaaaaaaaagaaaagaaag

SEQ ID NO: 19941 - protein, 46 aa, Homo sapiens; identical to SEQ ID NO: 19939

SEQ ID NO: 19942 - DNA, 1217 bp, Homo sapiens
ctgagcttcccaaccagccagaaaagcagacggaaaaccagagaaacctagccctggcggctcaggaccagaggctgcctgggagcatgactgaggacctactagaggtagtgccaacggcggtcagctgcagtgtggctaagaatgggatggacacttattttaaatgtagctccttcgtccagccccagcaatgctgacacacagacaacactgcgccatcactggctaggggtgggcgggaaagaacagcagacaagtcgtttcccctctctaggcctgtttcctcttcaatacacgtgaaagttacggtagggacgtggggtgcatatgatgaagtacataataggaaaaggaaggggggagagtcatgggtactcttcctgagaggttgtggagtaacatatttgcatctgggatttattttgcttttacgccctcactgatgtaataatctcatggagggaaggtccgtaaggctttgagggcagggtgggggaagagtgcttctctgtccccgtcatatgaattacattgcttttgtgatttcccttgtgtgtgtgtggagtgttaaaacccaagacctgagggcctatcggcagacgagcctggaccccacctcctgggcagggtgccacccttgaggcctcccagcctattgctcaaagacctgctgccctttggtcacccacgtccaaagcagccagtggaagctaagttcccctaaaggttggagcccctctgttttgacctataaagagaaatgcccttgggcctctgtttttttccctcttctaggctggcaaagcacacaggctgagcgctgaggagagggaccagctgctgccaaacctgagggctgtggggtggaatgagctggaaggccgtgatgccatcttcaagcagtttcatttcaaagacttcaacagggcctttgggttcatgacaagagtggccctgcaggctgagaaactggaccaccatcctgaatggtttaacgtgtacaacaaggtctcaaggctacaagcctccggtgtgcaacaataccatctgctttcctggttctccagcttgccaactacagatcttgggacttgtcagcctccataatcacatgagccaattccttataagaaatctctttgtgtgtattggttctgtttctctggagaatcataatacacaggcctatcatatcagatatggcagatcccaaa

SEQ ID NO: 19943 - protein, 55 aa, Homo sapiens
MTRVALQAEKLDHHPEWFNVYNKVSRLQASGVQQYHLLSWFSSLPTTDLGTCQPP

SEQ ID NO: 19944 - DNA, 1158 bp, Homo sapiens
gcggggcctacgaccttcctgggccggggaagacagtcgtggaggagtccacggatctcgtccccttggtggcccgattctgctttatactggggtgggagcgagagggaggctgagtttgcgcgctcgtgtgcgtgcctgtccgctgccccttcccgctggcactctgggtacggggtctgcctgggactcacgctctgcgccggtatgctggccccagagccactccccgcgccggcttgaggcccgtgccaggccacgggggcttggtggcgctggagcagccctcctcccgtgagcttcccccacccacccccggggcgggggcgggggcggggcccttgctctgctgtaagctcgcgagcttcatcagaccatttctggtccacaggccttcggagcaggctggcaaagcacacaggctgagcgctgaggagagggaccagctgctgccaaacctgagggctgtggggtggaatgagctggaaggccgtgatgccatcttcaagcagtttcatttcaaagacttcaacagggcctttgggttcatgacaagagtggccctgcaggctgagaaactggaccaccatcctgaatggtttaacgtgtacaacaaggtccacatcacgctgagcacccatgagtgtgccggcctttcagaacgggacataaacctggccagcttcatcgaacaagtagcagtgtccatgacatagaccctgcccttcctctttgaattcttccgggggaaggggtgactgaactgggagtccagggagggagctgaggagcccttaccctcccaccactcccctcccaagacccagccgccgccgttgagggctgagtccttgctgtgggatgtgccagtgtccccaccaacaccaggaatttagaccttttccctgcaccactctcttcatcctgggggctctgttacactaatttgaataaactctcccctttctttgcaacttcccagcaacaataatgattttcttgccaggccgtctcttgctccctaattcatttcccaggaagctgtgatacagggtgaaataaagtcttgtcttagaaaccaggaccctaaaccccacactatgtaatagaaacacatgtgtttttatgtctcaaataaaactattatatcacttggtc

SEQ ID NO: 19945 - protein, 55 aa, Homo sapiens
MTRVALQAEKLDHHPEWFNVYNKVHITLSTHECAGLSERDINLASFIEQVAVSMT

SEQ ID NO: 19946 - DNA, 1010 bp, Homo sapiens
ggcggggtgggattccaacccagaagcgggcatttggagccctcatgcttcaccctagctccctgaaacaagcacggaggatggctctgagcagcgaggaaagtgctggaagcaagcaggccgagcgcgtccctggctggggacgttaatcattaccggagggcggcccgagcgcggccccgccccgggacggcagcctgcgcgcccggccgccgcctgccctctccgctggccacctgctgccgcccgcgccatggctggcaaagcacacaggctgagcgctgaggagagggaccagctgctgccaaacctgagggctgtggggtggaatgagctggaaggccgtgatgccatcttcaagcagtttcatttcaaagacttcaacagggcctttgggttcatgacaagagtggccctgcaggctgagaaactggaccaccatcctgaatggtttaacgtgtacaacaaggtccacatcacgctgagcacccatgagtgtgccggcctttcagaacgggacataaacctggccagcttcatcgaacaagtagcagtgtccatgacatagaccctgcccttcctctttgaattcttccgggggaaggggtgactgaactgggagtccagggagggagctgaggagcccttaccctcccaccactcccctcccaagacccagccgccgccgttgagggctgagtccttgctgtgggatgtgccagtgtccccaccaacaccaggaatttagaccttttccctgcaccactctcttcatcctgggggctctgttacactaatttgaataaactctcccctttctttgcaacttcccagcaacaataatgattttcttgccaggccgtctcttgctccctaattcatttcccaggaagctgtgatacagggtgaaataaagtcttgtcttagaaaccaggaccctaaaccccacactatgtaatagaaacacatgtgtttttatgtctcaaataaaactattatatcacttggtc

SEQ ID NO: 19947 - protein, 104 aa, Homo sapiens; identical to SEQ ID NO: 2509

SEQ ID NO: 19948 - DNA, 1973 bp, Homo sapiens
atatgatctcctgctgtcactccatcgccttccctcccagcaagcttgagatcctctcccccacatggaatctttgaacatcccacctcaaaactgtttcggatgctagaaatccatggcttagaagttccagccctccatgaaccgttgggttgaggttctctgggtcctgggttaaggattctgcagctgcttcaggctgatgagtgatggctgccatcggccttagagaatgtggggcagcccaaagtatggcctcacactttgccgtcgttcaagttccaaactccttattctatagatgaagaagctgatgtggaaggaggggaaggcactgggccgaggagttaagaaagagcagcctgacatgtctcatgcacctcctgtgagctgcacgccagccaccgtgtctggaggaagctgatgtggaaggaggggaaggcatgtgacctccaggagccaatgcactggaccccagggtctcaaatagcaaaggccaacccaagaccagcgaggcccggcagctcaggaggcaggtgaaatggcgtggcaggaagccacaggaatctcacagaggggatgaatcatttcaggctggaagcatcctcttacagaagtttccttttcaccacttgagaggtagaacagagtaaattattagtagtgctggaaaagccagtcgccctcccatgtgagcaatgccgggaacttctcagagagctttcctatctgacattgttcgagacactgggatgccctaaaaaggtggacagtgaggctcagcctgtcctgtttcattaaggaagaaattggggctcagggagatgatctggcctgaggccacacagcccaacctccaggactcctggtttagcacctggtgccttgggtctctcttccctctggggctggaaaagcaggaccgggaactgttttttggcttgtcttccagagaaagagaatcattgtctcgccttctgtgttccactctcctcctcactggtgccttttgtccccgcctgctctgtgccagcattgagcctggggctttccacacaccatctcacgaacctcgcaaaagctacatgaagggggagcgctcattggcccattgtgcaggcaaggaaactaaggctcagagcagttgagggttcaatgccaagactggactccaaatgtctgctctttcctctcagctataagcctcttgccttcaagctctcctgcaccggttattaagccaaagcggcatctgctgtggccatgttttgcgggggagagaaagtcatcgctcagtctcctttgctgaaaatgggtgtaatgatcaaagtactcccttcctacagtccttgggtagactgagatcatggctaggaaacggagcctgacacatgagcagtcttattattttatcgcccttgctgccaccgctcctgttatgttgatctaacacaagacaaaaacagagtcttgagaatctcaacgtgctgtatccaaggcagggactgagggggttgggctgctgccacgaggactggggggaattgagggctcaggggaggcaggaagatgaaggactgttaaggttttacgttttccggcaggatttagtgggagtggagcctgcagagggggtggcacagggctgggaccagcacggggctggattccaagcatcccaaaggccagaccccagtgcctgtgcctctgagcccgggtccagccctgccacccaggccccatctgcctgcattgccatctccttggcttgttaactcggtcagtccctgggattttatcaggcgcctctgaggtgcccatttctgggcagcagcattgcaggaagaggaaaggcctgtgacagagcagggcaccagctcaggtcccaacggggctgagttctagcccagctccctcacttccacgcatgggctcagaacacactggatccacaataaagcttttgatgaatg

SEQ ID NO: 19949 - protein, 38 aa, Homo sapiens [sequence omitted]

SEQ ID NO: 19950 - DNA, 448 bp, Homo sapiens
ggtccccaaagaatttctgcaggctgggactcctgagtgaaatgaagaagtgggattcaacagagagaaatgtgaagtctgccagctagccctgagaagcaggcatgacaagagaggatgcccgtgttacagatgagaaaaacagaggccctgggaggaagcttgcctaatgccactcaggaggtagaggcaaagctgggaaaggccctgggtccccagactgcccctctggaactccacatgcagccacctggctgtcctgcccgggatgccatccgcaggctaggctggcgctcatgcccatgccctgctgtccactgacaccccgcagagcttaacaccccgctgagcctgccctgcagcccttgccaagtctgtccgagtggcctcagtcattggcaagtcacattgctgacatcgcaactgcataaaattaatttatttagtt

SEQ ID NO: 19951 - protein, 67 aa, Homo sapiens
MPVLQMRKTEALGGSLPNATQEVEAKLGKALGPQTAPLELHMQPPGCPARDAIRRLGWRSCPCPAVH

SEQ ID NO: 19952 - DNA, 6897 bp, Homo sapiens
gaactcactccggcgagcgagcggcggcgctcggcattgtggcaggcggctggggccggctagggcgccggagccgcacgcagccgcggggctccgagaggcgcgcactggggctgggactgcgcggcgccgccgctgcgagcgccactgagcggtcgcgcaacttcggaggcacagcgccggagccaggcgagcgctcagagacccggagccagaggggcgcgccggagcctcgttcgagagccggcgccaggcacccaccgcgctccgagtgccaggcggccctccgcgcagcgtggcttccgctgcccccacggaaggcacgggctggcgctgccgggcgccggggaggacggcgaggaggaggcggcggcggcggagacggcggcggcgagactggggccagggagacagccctgggggagaggcgcccgaaccaggccgcgggagcatgggggcccggagcggagctcggggcgcgctgctgctggcactgctgctctgctgggacccgaggctgagccaagcaggcactgattctggcagcgaggtgctccctgactccttcccgtcagcgccagcagagccgctgccctacttcctgcaggagccacaggacgcctacattgtgaagaacaagcctgtggagctccgctgccgcgccttccccgccacacagatctacttcaagtgcaacggcgagtgggtcagccagaacgaccacgtcacacaggaaggcctggatgaggccaccggcctgcgggtgcgcgaggtgcagatcgaggtgtcgcggcagcaggtggaggagctctttgggctggaggattactggtgccagtgcgtggcctggagctccgcgggcaccaccaagagtcgccgagcctacgtccgcatcgcctacctgcgcaagaacttcgatcaggagcctctgggcaaggaggtgcccctggaccatgaggttctcctgcagtgccgcccgccggagggggtgcctgtggccgaggtggaatggctcaagaatgaggatgtcatcgaccccacccaggacaccaacttcctgctcaccatcgaccacaacctcatcatccgccaggcccgcctgtcggacactgccaactatacctgcgtggccaagaacatcgtggccaaacgccggagcaccactgccaccgtcatcgtctacgtgaatggcggctggtccagctgggcagagtggtcaccctgctccaaccgctgtggccgaggctggcagaagcgcacccggacctgcaccaaccccgctccactcaacggaggggccttctgcgagggccaggcattccagaagaccgcctgcaccaccatctgcccagtcgatggggcgtggacggagtggagcaagtggtcagcctgcagcactgagtgtgcccactggcgtagccgcgagtgcatggcgcccccaccccagaacggaggccgtgactgcagcgggacgctgctcgactctaagaactgcacagatgggctgtgcatgcaaaataagaaaactctaagcgaccccaacagccacctgctggaggcctcaggggatgcggcgctgtatgcggggctcgtggtggccatcttcgtggtcgtggcaatcctcatggcggtgggggtggtggtgtaccgccgcaactgccgtgacttcgacacagacatcactgactcatctgctgccctgactggtggtttccaccccgtcaactttaagacggcaaggcccagcaacccgcagctcctacacccctctgtgcctcctgacctgacagccagcgccggcatctaccgcggacccgtgtatgccctgcaggactccaccgacaaaatccccatgaccaactctcctctgctggaccccttacccagccttaaggtcaaggtctacagctccagcaccacgggctctgggccaggcctggcagatggggctgacctgctgggggtcttgccgcctggcacataccctagcgatttcgcccgggacacccacttcctgcacctgcgcagcgccagcctcggttcccagcagctcttgggcctgccccgagacccagggagcagcgtcagcggcacctttggctgcctgggtgggaggctcagcatccccggcacaggggtcagcttgctggtgcccaatggagccattccccagggcaagttctacgagatgtatctactcatcaacaaggcagaaagtaccctcccgctttcagaagggacccagacagtattgagcccctcggtgacctgtggacccacaggcctcctgctgtgccgccccgtcatcctcaccatgccccactgtgccgaagtcagtgcccgtgactggatctttcagctcaagacccaggcccaccagggccactgggaggaggtggtgaccctggatgaggagaccctgaacacaccctgctactgccagctggagcccagggcctgtcacatcctgctggaccagctgggcacctacgtgttcacgggcgagtcctattcccgctcagcagtcaagcggctccagctggccgtcttcgcccccgccctctgcacctccctggagtacagcctccgggtctactgcctggaggacacgcctgtagcactgaaggaggtgctggagctggagcggactctgggcggatacttggtggaggagccgaaaccgctaatgttcaaggacagttaccacaacctgcgcctctccctccatgacctcccccatgcccattggaggagcaagctgctggccaaataccaggagatccccttctatcacatttggagtggcagccagaaggccctccactgcactttcaccctggagaggcacagcttggcctccacagagctcacctgcaagatctgcgtgcggcaagtggaaggggagggccagatattccagctgcataccactctggcagagacacctgctggctccctggacactctctgctctgcccctggcagcactgtcaccacccagctgggaccttatgccttcaagatcccactgtccatccgccagaagatatgcaacagcctagatgcccccaactcacggggcaatgactggcggatgttagcacagaagctctctatggaccggtacctgaattactttgccaccaaagcgagccccacgggtgtgatcctggacctctgggaagctctgcagcaggacgatggggacctcaacagcctggcgagtgccttggaggagatgggcaagagtgagatgctggtggctgtggccaccgacggggactgctgagcctcctgggacagcgggctggcagggactggcaggaggcaggtgcagggaggcctggggcagcctcctgatggggatgtttggcctctgcttcctcccagttcacagccagagttgcctctcctcctcctcttccccaacccccagaccatgaccagccttagaaaatccatgtactctgttgttagagggcccagagttccttctccacccccgctctctctctcttggcctgagatctctgtgcaggaaccaagatggggctgaagcctctggaggcagttggttgggggcgggcaggcaggaggccctccctccacccccccaccctcagcccggcaacttctgggttccatgggttttagttccgttctcgttttcttcctccgttattgatttctcctttctccctaagcccccttctgcttccacgcccttttcctctttgaagagtcaagtacaattcagacaaactgctttctcctgtccaaaagcaaaaaggcaaaggaaagaaagaaagcttcagaccgctagtaaggctcaaagaagaagaaaaacaccaaaaccacaagggaaaagaaaaacccagtttcttaggaaacgcaaacgatttattatccagattatttggataagtcctttttaagaaaaaaaaagaaaatgaaaaacaacacaaaaaaaatagaaaactcttttcttgagtgtggatgagaatgggcacgctcacacttctggccaggagtgaatgtgcctgtgtgtgtgtgtgtgtgtgtgtgtgtgtgtgtacatgtacgcgtgtgcattgaggagagagagactgaacagagagtactttgctgctaacgaatccatcttggactaaattctgacaaggcctcagtttccccagttgtgcagggagtaggtcagacagggttttcactgtctagatttagctggttagattttcctctaaaatcttaagcagatgctgaatccataaagccaaggagtgctgagggctggagtgggtgggccctccctcccacagccccagggagatacatctggactcctgggaatctggattaagaaagttgggatgaaagaggaggactgctcaggccagttgtgagccagggagaatgttccagtctggttttggtctggtggctcctagaaagggatgtggcccagaagtgggactcaaacagagagatgaagtaggggaggggagtcctccacgggcatctctctcctggcggctggatagctttaccctagggtggggccagccctgacaccctcatcccctcctcagcccagcagcctctagagcagcgtggtgctctcttgatggccaggaatccagaatctgcccttccccaaccttggtttctccttctgtaaagcagagtgatggctgagaagtcctctctagctgcagaagcctgagcttcccggtgtcagtcagctctgcaacgtgggagccttggaggcgggtggcctggctgtgcttcatatgcccaggagtggagaaggaggctgagaagctggtttcccagctctgatctccacaggcacctcctataaccctcctctcacccaccccgctacggtctgagagatctgaaataacctttcccagtgggcagggttgccagggttgaggggacagcacataccacccccacccaacctgttcgaggggccctgcatggcacgggatgagtccctgccctgtgcagctgcctggcagtggctgggacaaggatcttgcagccagcacagaggcctcttcaaaggcctctccctcttggcactccaggcaaggcaggtgcccgcttccccaacacctccaggcagtgaccctagggcatgccccagcaggtctccgagcagccactgggacccgtctcagcacatcctggcctttgaaagtctgatatcctgagaggagggcaggttttagggccgcagttccagccagcgtccccagcctggcttccctgccatggactcagtagctcgtggggcttcttaccacccaccagccccgctggggtgcggcctggctgtgggcaaaggaggacttgcctggagatttgagagaagattccttctaccagggctgctgaggggccaggcctgcatcaggggctaggctctggctgggcccggaggctgagactaaggctttcgaccctggtgcctccatgtggatgctgcctcagacaaaggcagtgagccttccctgccaaagtgcccatcccatgggctcggcctcactggtcactgttagcccatgaacacgtgtgggcctcggtcacgtggctttgagggcagtctgaccaggctagaccacacgtgccgtgacagggggtgccattcccctcgcaggctctaatgtgcccacatgtagcctggcagtccaaagaccaagaatcaacttgcaaatctgccattaaactgctgtgcgacttcaggcatatcactgccttctctgggcttcagtgtccttttcatacctagaagtctgcggtctgaggctctttgggttcagacacactgttctaggcttctgtaggggaccttgtgatctgccgtgcccctcctccctgttcttttctgtcctccccaccccaccctcagaagctgcttgctctgcccccaggacaggagcttgacggatgaagtgcagccagccacccaggtgccatttccagtctgacttccagaaatgtgcaccatgtcctagagcacagacccattggctggagcctcctgggagggttcaaaccatcagctctatgagaaatgcccagaaaggctttgccgactccatccgtctgtggaggctgcctgcctccggggtgggatgggtggtttctcctccaattcagacccaagaggtagcccccgagggcatgtacctggtgggaagcagctcaggtacccttgggggttgcagggcccttacgcaggtatttctctctctctcctctctggggtgcgtgtgtgcgtgcgcgtgtgcgtgcctatgcttttctctgtgggcacatcaggatgcccctcggagagcatgtgcacgtgtccccacctgagcgagcgtgtgtgtgtgctcctctgcgtcccaggtttggacgtctagggtttggtgtgcctgtcttctgccctccctgagcccacagggtcagtcaatgtatcttctacgtgcctctccctctgccttctctcacagtgcccccggctccagagctcaggggtaggggttctcctgagggtgcaggggatccttctcatctcctggaccctccagggcactctggtccctattccccagctcctaggcagctgagccgggtcccttaggggaggtgaccaggagctttggtgcagggagctcttggtggggcaaagggctggacccctgccaggtctgtggacatggttatatgcccgggagaggggggtgcagggccccagggatggcccccaatcccacctctgtttattctgtaaactgcaacctataaataacctttagcattcctattgtaacaaaattaatttttatgaaataaattatatttcctagtctaataaaatccgggttgcatttggctgtc

SEQ ID NO: 19953 - protein, 945 aa, Homo sapiens; identical to SEQ ID NO: 2511

SEQ ID NO: 19954 - DNA, 6472 bp, Homo sapiens
gagactggggccagggagacagccctgggggagaggcgcccgaaccaggccgcgggagcatgggggcccggagcggagctcggggcgcgctgctgctggcactgctgctctgctgggacccgaggctgagccaagcaggcactgattctggcagcgaggtgctccctgactccttcccgtcagcgccagcagagccgctgccctacttcctgcaggagccacaggacgcctacattgtgaagaacaagcctgtggagctccgctgccgcgccttccccgccacacagatctacttcaagtgcaacggcgagtgggtcagccagaacgaccacgtcacacaggaaggcctggatgaggccaccggcctgcgggtgcgcgaggtgcagatcgaggtgtcgcggcagcaggtggaggagctctttgggctggaggattactggtgccagtgcgtggcctggagctccgcgggcaccaccaagagtcgccgagcctacgtccgcatcgcctacctgcgcaagaacttcgatcaggagcctctgggcaaggaggtgcccctggaccatgaggttctcctgcagtgccgcccgccggagggggtgcctgtggccgaggtggaatggctcaagaatgaggatgtcatcgaccccacccaggacaccaacttcctgctcaccatcgaccacaacctcatcatccgccaggcccgcctgtcggacactgccaactatacctgcgtggccaagaacatcgtggccaaacgccggagcaccactgccaccgtcatcgtctacgtgaatggcggctggtccagctgggcagagtggtcaccctgctccaaccgctgtggccgaggctggcagaagcgcacccggacctgcaccaaccccgctccactcaacggaggggccttctgcgagggccaggcattccagaagaccgcctgcaccaccatctgcccagtcgatggggcgtggacggagtggagcaagtggtcagcctgcagcactgagtgtgcccactggcgtagccgcgagtgcatggcgcccccaccccagaacggaggccgtgactgcagcgggacgctgctcgactctaagaactgcacagatgggctgtgcatgcaaatgctggaggcctcaggggatgcggcgctgtatgcggggctcgtggtggccatcttcgtggtcgtggcaatcctcatggcggtgggggtggtggtgtaccgccgcaactgccgtgacttcgacacagacatcactgactcatctgctgccctgactggtggtttccaccccgtcaactttaagacggcaaggcccagcaacccgcagctcctacacccctctgtgcctcctgacctgacagccagcgccggcatctaccgcggacccgtgtatgccctgcaggactccaccgacaaaatccccatgaccaactctcctctgctggaccccttacccagccttaaggtcaaggtctacagctccagcaccacgggctctgggccaggcctggcagatggggctgacctgctgggggtcttgccgcctggcacataccctagcgatttcgcccgggacacccacttcctgcacctgcgcagcgccagcctcggttcccagcagctcttgggcctgccccgagacccagggagcagcgtcagcggcacctttggctgcctgggtgggaggctcagcatccccggcacaggggtcagcttgctggtgcccaatggagccattccccagggcaagttctacgagatgtatctactcatcaacaaggcagaaagtaccctcccgctttcagaagggacccagacagtattgagcccctcggtgacctgtggacccacaggcctcctgctgtgccgccccgtcatcctcaccatgccccactgtgccgaagtcagtgcccgtgactggatctttcagctcaagacccaggcccaccagggccactgggaggaggtggtgaccctggatgaggagaccctgaacacaccctgctactgccagctggagcccagggcctgtcacatcctgctggaccagctgggcacctacgtgttcacgggcgagtcctattcccgctcagcagtcaagcggctccagctggccgtcttcgcccccgccctctgcacctccctggagtacagcctccgggtctactgcctggaggacacgcctgtagcactgaaggaggtgctggagctggagcggactctgggcggatacttggtggaggagccgaaaccgctaatgttcaaggacagttaccacaacctgcgcctctccctccatgacctcccccatgcccattggaggagcaagctgctggccaaataccaggagatccccttctatcacatttggagtggcagccagaaggccctccactgcactttcaccctggagaggcacagcttggcctccacagagctcacctgcaagatctgcgtgcggcaagtggaaggggagggccagatattccagctgcataccactctggcagagacacctgctggctccctggacactctctgctctgcccctggcagcactgtcaccacccagctgggaccttatgccttcaagatcccactgtccatccgccagaagatatgcaacagcctagatgcccccaactcacggggcaatgactggcggatgttagcacagaagctctctatggaccggtacctgaattactttgccaccaaagcgagccccacgggtgtgatcctggacctctgggaagctctgcagcaggacgatggggacctcaacagcctggcgagtgccttggaggagatgggcaagagtgagatgctggtggctgtggccaccgacggggactgctgagcctcctgggacagcgggctggcagggactggcaggaggcaggtgcagggaggcctggggcagcctcctgatggggatgtttggcctctgcttcctcccagttcacagccagagttgcctctcctcctcctcttccccaacccccagaccatgaccagccttagaaaatccatgtactctgttgttagagggcccagagttccttctccacccccgctctctctctcttggcctgagatctctgtgcaggaaccaagatggggctgaagcctctggaggcagttggttgggggcgggcaggcaggaggccctccctccacccccccaccctcagcccggcaacttctgggttccatgggttttagttccgttctcgttttcttcctccgttattgatttctcctttctccctaagcccccttctgcttccacgcccttttcctctttgaagagtcaagtacaattcagacaaactgctttctcctgtccaaaagcaaaaaggcaaaggaaagaaagaaagcttcagaccgctagtaaggctcaaagaagaagaaaaacaccaaaaccacaagggaaaagaaaaacccagtttcttaggaaacgcaaacgatttattatccagattatttggataagtcctttttaagaaaaaaaaagaaaatgaaaaacaacacaaaaaaaatagaaaactcttttcttgagtgtggatgagaatgggcacgctcacacttctggccaggagtgaatgtgcctgtgtgtgtgtgtgtgtgtgtgtgtgtgtgtgtacatgtacgcgtgtgcattgaggagagagagactgaacagagagtactttgctgctaacgaatccatcttggactaaattctgacaaggcctcagtttccccagttgtgcagggagtaggtcagacagggttttcactgtctagatttagctggttagattttcctctaaaatcttaagcagatgctgaatccataaagccaaggagtgctgagggctggagtgggtgggccctccctcccacagccccagggagatacatctggactcctgggaatctggattaagaaagttgggatgaaagaggaggactgctcaggccagttgtgagccagggagaatgttccagtctggttttggtctggtggctcctagaaagggatgtggcccagaagtgggactcaaacagagagatgaagtaggggaggggagtcctccacgggcatctctctcctggcggctggatagctttaccctagggtggggccagccctgacaccctcatcccctcctcagcccagcagcctctagagcagcgtggtgctctcttgatggccaggaatccagaatctgcccttccccaaccttggtttctccttctgtaaagcagagtgatggctgagaagtcctctctagctgcagaagcctgagcttcccggtgtcagtcagctctgcaacgtgggagccttggaggcgggtggcctggctgtgcttcatatgcccaggagtggagaaggaggctgagaagctggtttcccagctctgatctccacaggcacctcctataaccctcctctcacccaccccgctacggtctgagagatctgaaataacctttcccagtgggcagggttgccagggttgaggggacagcacataccacccccacccaacctgttcgaggggccctgcatggcacgggatgagtccctgccctgtgcagctgcctggcagtggctgggacaaggatcttgcagccagcacagaggcctcttcaaaggcctctccctcttggcactccaggcaaggcaggtgcccgcttccccaacacctccaggcagtgaccctagggcatgccccagcaggtctccgagcagccactgggacccgtctcagcacatcctggcctttgaaagtctgatatcctgagaggagggcaggttttagggccgcagttccagccagcgtccccagcctggcttccctgccatggactcagtagctcgtggggcttcttaccacccaccagccccgctggggtgcggcctggctgtgggcaaaggaggacttgcctggagatttgagagaagattccttctaccagggctgctgaggggccaggcctgcatcaggggctaggctctggctgggcccggaggctgagactaaggctttcgaccctggtgcctccatgtggatgctgcctcagacaaaggcagtgagccttccctgccaaagtgcccatcccatgggctcggcctcactggtcactgttagcccatgaacacgtgtgggcctcggtcacgtggctttgagggcagtctgaccaggctagaccacacgtgccgtgacagggggtgccattcccctcgcaggctctaatgtgcccacatgtagcctggcagtccaaagaccaagaatcaacttgcaaatctgccattaaactgctgtgcgacttcaggcatatcactgccttctctgggcttcagtgtccttttcatacctagaagtctgcggtctgaggctctttgggttcagacacactgttctaggcttctgtaggggaccttgtgatctgccgtgcccctcctccctgttcttttctgtcctccccaccccaccctcagaagctgcttgctctgcccccaggacaggagcttgacggatgaagtgcagccagccacccaggtgccatttccagtctgacttccagaaatgtgcaccatgtcctagagcacagacccattggctggagcctcctgggagggttcaaaccatcagctctatgagaaatgcccagaaaggctttgccgactccatccgtctgtggaggctgcctgcctccggggtgggatgggtggtttctcctccaattcagacccaagaggtagcccccgagggcatgtacctggtgggaagcagctcaggtacccttgggggttgcagggcccttacgcaggtatttctctctctctcctctctggggtgcgtgtgtgcgtgcgcgtgtgcgtgcctatgcttttctctgtgggcacatcaggatgcccctcggagagcatgtgcacgtgtccccacctgagcgagcgtgtgtgtgtgctcctctgcgtcccaggtttggacgtctagggtttggtgtgcctgtcttctgccctccctgagcccacagggtcagtcaatgtatcttctacgtgcctctccctctgccttctctcacagtgcccccggctccagagctcaggggtaggggttctcctgagggtgcaggggatccttctcatctcctggaccctccagggcactctggtccctattccccagctcctaggcagctgagccgggtcccttaggggaggtgaccaggagctttggtgcagggagctcttggtggggcaaagggctggacccctgccaggtctgtggacatggttatatgcccgggagaggggggtgcagggccccagggatggcccccaatcccacctctgtttattctgtaaactgcaacctataaataacctttagcattcctattgtaacaaaattaatttttatgaaataaattatatttcctagtctaataaaatccgggttgcatttggctgtc

SEQ ID NO: 19955 - protein, 934 aa, Homo sapiens
MGARSGARGALLLALLLCWDPRLSQAGTDSGSEVLPDSFPSAPAEPLPYFLQEPQDAYIVKNKPVELRCRAFPATQIYFKCNGEWVSQNDHVTQEGLDEATGLRVREVQIEVSRQQVEELFGLEDYWCQCVAWSSAGTTKSRRAYVRIAYLRKNFDQEPLGKEVPLDHEVLLQCRPPEGVPVAEVEWLKNEDVIDPTQDTNFLLTIDHNLIIRQARLSDTANYTCVAKNIVAKRRSTTATVIVYVNGGWSSWAEWSPCSNRCGRGWQKRTRTCTNPAPLNGGAFCEGQAFQKTACTTICPVDGAWTEWSKWSACSTECAHWRSRECMAPPPQNGGRDCSGTLLDSKNCTDGLCMQMLEASGDAALYAGLVVAIFVVVAILMAVGVVVYRRNCRDFDTDITDSSAALTGGFHPVNFKTARPSNPQLLHPSVPPDLTASAGIYRGPVYALQDSTDKIPMTNSPLLDPLPSLKVKVYSSSTTGSGPGLADGADLLGVLPPGTYPSDFARDTHFLHLRSASLGSQQLLGLPRDPGSSVSGTFGCLGGRLSIPGTGVSLLVPNGAIPQGKFYEMYLLINKAESTLPLSEGTQTVLSPSVTCGPTGLLLCRPVILTMPHCAEVSARDWIFQLKTQAHQGHWEEVVTLDEETLNTPCYCQLEPRACHILLDQLGTYVFTGESYSRSAVKRLQLAVFAPALCTSLEYSLRVYCLEDTPVALKEVLELERTLGGYLVEEPKPLMFKDSYHNLRLSLHDLPHAHWRSKLLAKYQEIPFYHIWSGSQKALHCTFTLERHSLASTELTCKICVRQVEGEGQIFQLHTTLAETPAGSLDTLCSAPGSTVTTQLGPYAFKIPLSIRQKICNSLDAPNSRGNDWRMLAQKLSMDRYLNYFATKASPTGVILDLWEALQQDDGDLNSLASALEEMGKSEMLVAVATDGDC

SEQ ID NO: 19956 - DNA, 470 bp, Homo sapiens
agggtagaatccagccccacaagcggcggcgatgctaatcaggccgctaagatggaaaagcatccccgaagaccgggaggaacgccgcggggacctgtggcttagcgcgctccgcccgggcttgtctgcccgcgggggcgcagcggctgaggcggctccgggccggagttccaatcaagcgccacccaactcccagtcgggggccgaggccagcgccgggatgccagcttcccccaaaaagatcctgcctcagggaaatgcatggagccggcggaaaagcccgcggcgcccccggcggatcgcagaccctaagggggcgggaggtggcgccccagtcccaacctcttgagccaacccagtgggtgggaagtgcccttaccctaggccttccgcaaagtgttctctccttgtattattctaattacggtatttttaatttccttaaaaaaataagaaacagaaaagcacag

SEQ ID NO: 19957 - protein, 105 aa, Homo sapiens
MLIRPLRWKSIPEDREERRGDLWLSALRPGLSARGGAAAEAAPGRSSNQAPPNSQSGAEASAGMPASPKKILPQGNAWSRRKSPRRPRRIADPKGAGGGAPVPTS

SEQ ID NO: 19958 - DNA, 645 bp, Homo sapiens
ccctcctcaaacacacatccatcctccggcacacacccagtccatgcctcgcccccacacacacctgacaccccagtgcaacaccacacccaccctcccctccctgcaaactcccacctccgcccacctgcttaatacacattctcaccccccacacactccttaatacatactctcacacccacaagcctgccttcttggagaagtgagccgagccgtgcagcgccgcgaagggcatccccgaagaccgggaggaacgccgcggggacctgtggcttagcgcgctccgcccgggcttgtctgcccgcgggggcgcagcggctgaggcggctccgggccggagttccaatcaagcgccacccaactcccagtcgggggccgaggccagcgccgggatgccagcttcccccaaaaagatcctgcctcagggaaatgcatggagccggcggaaaagcccgcggcgcccccggcggatcgcagaccctaagggggcgggaggtggcgccccagtcccaacctcttgagccaacccagtgggtgggaagtgcccttaccctaggccttccgcaaagtgttctctccttgtattattctaattacggtatttttaatttccttaaaaaaataagaaacagaaaagcacag

SEQ ID NO: 19959 - protein, 70 aa, Homo sapiens
MHGAGGKARGAPGGSQTLRGREVAPQSQPLEPTQWVGSALTLGLPQSVLSLYYSNYGIFNFLKKIRNRKA

SEQ ID NO: 19960 - DNA, 684 bp, Homo sapiens
gtgaatgtgcctgtgtgtgtgtgtgtgtgtgtgtgtgtgtgtgtacatgtacgcgtgtgcattgaggagagagagactgaacagagagtactttgctgctaacgaatccatcttggactaaattctgacaaggcctcagtttccccagttgtgcagggagtaggtcagacagggttttcactgtctagatttagctggttagattttcctctaaaatcttaagcagatgctgaatccataaagccaaggagtgctgagggctggagtgggtgggccctccctcccacagccccagggagatacatctggactcctgggaatctggattaagaaagttgggatgaaagaggaggactgctcaggccagttgtgagccagggagaatgttccagtctggttttggtctggtggctcctagaaagggatgtggcccagaagtgggactcaaacagagagatgaagtaggggaggggagtcctccacgggcatctctctcctggcggtggacccctgccaggtctgtggacatggttatatgcccgggagaggggggtgcagggccccagggatggcccccaatcccacctctgtttattctgtaaactgcaacctataaataacctttagcattcctattgtaacaaaattaatttttatgaaataaattatatttcctagtctaat

SEQ ID NO: 19961 - protein, 72 aa, Homo sapiens
MFQSGFGLVAPRKGCGPEVGLKQRDEVGEGSPPRASLSWRWTPARSVDMVICPGEGGAGPQGWPPIPPLFIL

SEQ ID NO: 19962 - DNA, 2506 bp, Homo sapiens
gtgaatgtgcctgtgtgtgtgtgtgtgtgtgtgtgtgtgtgtgtacatgtacgcgtgtgcattgaggagagagagactgaacagagagtactttgctgctaacgaatccatcttggactaaattctgacaaggcctcagtttccccagttgtgcagggagtaggtcagacagggttttcactgtctagatttagctggttagattttcctctaaaatcttaagcagatgctgaatccataaagccaaggagtgctgagggctggagtgggtgggccctccctcccacagccccagggagatacatctggactcctgggaatctggattaagaaagttgggatgaaagaggaggactgctcaggccagttgtgagccagggagaatgttccagtctggttttggtctggtggctcctagaaagggatgtggcccagaagtgggactcaaacagagagatgaagtaggggaggggagtcctccacgggcatctctctcctggcggctggatagctttaccctagggtggggccagccctgacaccctcatcccctcctcagcccagcagcctctagagcagcgtggtgctctcttgatggccaggaatccagaatctgcccttccccaaccttggtttctccttctgtaaagcagagtgatggctgagaagtcctctctagctgcagaagcctgagcttcccggtgtcagtcagctctgcaacgtgggagccttggaggcgggtggcctggctgtgcttcatatgcccaggagtggagaaggaggctgagaagctggtttcccagctctgatctccacaggcacctcctataaccctcctctcacccaccccgctacggtctgagagatctgaaataacctggcttccctgccatggactcagtagctcgtggggcttcttaccacccaccagccccgctggggtgcggcctggctgtgggcaaaggaggacttgcctggagatttgagagaagattccttctaccagggctgctgaggggccaggcctgcatcaggggctaggctctggctgggcccggaggctgagactaaggctttcgaccctggtgcctccatgtggatgctgcctcagacaaaggcagtgagccttccctgccaaagtgcccatcccatgggctcggcctcactggtcactgttagcccatgaacacgtgtgggcctcggtcacgtggctttgagggcagtctgaccaggctagaccacacgtgccgtgacagggggtgccattcccctcgcaggctctaatgtgcccacatgtagcctggcagtccaaagaccaagaatcaacttgcaaatctgccattaaactgctgtgcgacttcaggcatatcactgccttctctgggcttcagtgtccttttcatacctagaagtctgcggtctgaggctctttgggttcagacacactgttctaggcttctgtaggggaccttgtgatctgccgtgcccctcctccctgttcttttctgtcctccccaccccaccctcagaagctgcttgctctgcccccaggacaggagcttgacggatgaagtgcagccagccacccaggtgccatttccagtctgacttccagaaatgtgcaccatgtcctagagcacagacccattggctggagcctcctgggagggttcaaaccatcagctctatgagaaatgcccagaaaggctttgccgactccatccgtctgtggaggctgcctgcctccggggtgggatgggtggtttctcctccaattcagacccaagaggtagcccccgagggcatgtacctggtgggaagcagctcaggtacccttgggggttgcagggcccttacgcaggtatttctctctctctcctctctggggtgcgtgtgtgcgtgcgcgtgtgcgtgcctatgcttttctctgtgggcacatcaggatgcccctcggagagcatgtgcacgtgtccccacctgagcgagcgtgtgtgtgtgctcctctgcgtcccaggtttggacgtctagggtttggtgtgcctgtcttctgccctccctgagcccacagggtcagtcaatgtatcttctacgtgcctctccctctgccttctctcacagtgcccccggctccagagctcaggggtaggggttctcctgagggtgcaggggatccttctcatctcctggaccctccagggcactctggtccctattccccagctcctaggcagctgagccgggtcccttaggggaggtgaccaggagctttggtgcagggagctcttggtggggcaaagggctggacccctgccaggtctgtggacatggttatatgcccgggagaggggggtgcagggccccagggatggcccccaatcccacctctgtttattctgtaaactgcaacctataaataacctttagcattcctattgtaacaaaattaatttttatgaaataaattatatttcctagtctaataaaatccgggttgcatttggctgtc

SEQ ID NO: 19963 - protein, 137 aa, Homo sapiens [sequence omitted]

SEQ ID NO: 19964 - DNA, 262 bp, Homo sapiens
cctcatcccctcctcagcccagcagcctctagagcagcgtggtgctcttcttggtggggcaaagggctggacccctgccaggtctgtggacatggttatatgcccgggagaggggggtgcagggccccagggatggcccccaatcccacctctgtttattctgtaaactgcaacctataaataacctttagcattcctattgtaacaaaattaatttttatgaaataaattatatttcctagtctaataaaatccgggttgc

SEQ ID NO: 19965 - protein, 52 aa, Homo sapiens [sequence omitted]

SEQ ID NO: 19966 - DNA, 1470 bp, Homo sapiens
ctgggacaaggatcttgcagccagcacagaggcctcttcaaaggcctctccctcttggcactccaggcaaggcaggtgcccgcttccccaacacctccaggcagtgaccctagggcatgccccagcaggtctccgagcagccactgggacccgtctcagcacatcctggcctttgaaagtctgatatcctgagaggagggcaggttttagggccgcagttccagccagcgtccccagcctggcttccctgccatggactcagtagctcgtggggcttcttaccacccaccagccccgctggggtgcggcctggctgtgggcaaaggaggacttgcctggagatttgagagaagattccttctaccagggctgctgaggggccaggcctgcatcaggggctaggctctggctgggcccggaggctgagactaaggctttcgaccctggtgcctccatgtggatgctgcctcagacaaaggcagtgagccttccctgccaaagtgcccatcccatgggctcggcctcactggtcactgttagcccatgaacacgtgtgggcctcggtcacgtggctttgagggcagtctgaccaggctagaccacacgtgccgtgacagggggtgccattcccctcgcaggctctaatgtgcccacatgtagcctggcagtccaaagaccaagaatcaacttgcaaatctgccattaaactgctgtgcgacttcaggcatatcactgccttctctgggcttcagtgtccttttcatacctagaagtctgcggtctgaggctctttgggttcagacacactgttctaggcttctgtaggggaccttgtgatctgccgtgcccctcctccctgttcttttctgtcctccccaccccaccctcagaagctgcttgctctgcccccaggacaggagcttgacggatgaagtgcagccagccacccaggtgccatttccagtctgacttccagaaatgtgcaccatgtcctagagcacagacccattggctggagcctcctgggagggttcaaaccatcagctctatgagaaatgcccagaaaggctttgccgactccatccgtctgtggaggctgcctgcctccggggtgggatgggtggtttctcctgagggtgcaggggatccttctcatctcctggaccctccagggcactctggtccctattccccagctcctaggcagctgagccgggtcccttaggggaggtgaccaggagctttggtgcagggagctcttggtggggcaaagggctggacccctgccaggtctgtggacatggttatatgcccgggagaggggggtgcagggccccagggatggcccccaatcccacctctgtttattctgtaaactgcaacctataaataacctttagcattcctattgtaacaaaattaatttttatgaaataaattatatttcctagtctaataaaatccgggttg

SEQ ID NO: 19967 - protein, 98 aa, Homo sapiens
MKCSQPPRCHFQSDFQKCAPCPRAQTHWLEPPGRVQTISSMRNAQKGFADSIRLWRLPASGVGWVVSPEGAGDPSHLLDPPGHSGPYSPAPRQLSRVP

SEQ ID NO: 19968 - DNA, 1094 bp, Homo sapiens
cttggtgcaactcctgcctccatcccccttgctggggtcccctcatccacttgagggcgcctgagggccaggagcagcaggcaaggagcctgggtctaggctaagggggtgtgtgcccacctcctccctgacccttaacactcctgtcctgcccagaccaacagagagagctgtccctgagaccccggagagaagcagctgccgaaagctgcagcctttccgcactctgagaccatgatcttcctcctgccaggggagagccacccacaggccatgtccagccccacttccctcagcccccagggcttccttctggcccctctgaggattccctagggctgccccgcagaggggcttccccaagctctgttttgaagcctgcaatgtggaaaagtgagaagtcagagggaacaggacaggtgcagccgggctctgaggccacacctcacacctcgctgttccccaacatcccctgagcagtgtgagctcatctcaccagatgagaagaggccctgtgcatttcttttgtttgtttgttgctgttttcccccacccatccagttctcctcagcaaagcaaattccttaacacctttggtggagaatttcttacccagacttggggctgtgatgcccttcagtgcgtggtgagtgcagcgtgtgtgcgtgtgcctgtgtgtgaacctgggggccatcctggtggcctgggagcgtgaggagaggccccctgtgtgctgggtgagtggtgggtgtggggtcaatgcagtgaggctctctgggtgaggctcccaacctggcagtccccagcctcccagcatctgtgagcgtctgttggactttacagaagagcctcatcctgtctgcccctcactctgccctggaatcaacatcttccgagtccttcttgggggaaatagcagagccccacttaactccataaactggtcccgccccgcctccacttggggaccctgcctcgtgtcgtctttatctgcctattactcagcctaaggaaacaagtacactccacacatgcataaaggaaatcaaatgttatttttaagaaaatggaaaataaaaactttataaacacca

SEQ ID NO: 19969 - protein, 71 aa, Homo sapiens
MRRGPVHFFCLFVAVFPHPSSSPQQSKFLNTFGGEFLTQTWGCDALQCVVSAACVRVPVCEPGGHPGGLGA

SEQ ID NO: 19970 - DNA, 1126 bp, Homo sapiens
ggtggcggcagaggaggagggcagcagctgagaggccagggacagggtgcctcgccaagctgtctgaggtctgtcccaggtggcccaggtggtgcaggtagaacagggtgaggagagggggtcggctcagcaggaggaggctgtggctgcagagcctgggggagcttttaggtgttgagatggggcagctctgaatcctagaccctggaatagcctgtcccttttctctgggtctcgtggtggagccatgatctgggctgctctcttggggacactgggtggtggttacacagttgacctctgcctggctcccccttggtgcaactcctgcctccatcccccttgctggggtcccctcatccacttgagggcgcctgagggccaggagcagcaggcaaggagcctgggtctaggctaagggggtgtgtgcccacctcctccctgacccttaacactcctgtcctgcccagaccaacagagagagctgtccctgagaccccggagagaagcagctgccgaaagctgcagcctttccgcactctgagaccatgatcttcctcctgccaggggagagccacccacaggccatgtccagccccacttccctcagcccccagggcttccttctggcccctctgaggattccctagggctgccccgcagaggggcttccccaagctctgttttgaagcctgcaatgtggaaaagtgagaagtcagagggaacaggacaggtgcagccgggctctgaggccacacctcacacctcgctgttccccaacatcccctgagcagtgtgagctcatctcaccagatgagaagaggccctgtgcatttcttttgtttgtttgttgctgttttcccccacccatccagttctcctcagcaaagcaaattccttaacacctttggtggagaatttcttacccagacttggggctgtgatgcccttcagtgcgtgcccccatcctctcacgtcccgccccgcctccacttggggaccctgcctcgtgtcgtctttatctgcctattactcagcctaaggaaacaagtacactccacacatgcataaaggaaatcaaatgttatttttaagaaaatggaaaataaaaactttataaacacca

SEQ ID NO: 19971 - protein, 85 aa, Homo sapiens
MRRGPVHFFCLFVAVFPHPSSSPQQSKFLNTFGGEFLTQTWGCDALQCVPPSSHVPPRLHLGTLPRVVFICLLLSLRKQVHSTHA

SEQ ID NO: 19972 - DNA, 4662 bp, Homo sapiens
gaaaaggccctggtcagaacctggctttagcaggcagctgtggcagaagcagttcttagcgaaggccgaggaattgttagatgctccataggcggtgctgtgtcctatcaggagaactgagaaaagtccactgggtgtaagctggagcaacaggcgtgcctgagcagcaagcagctggcggtgcgatgcgagggcccctgcccctgccccacggagcaggctgccacctccaccgccgatggcaaaccagagacttgcaccggtcaggacctggctgacctgggagatcggctgcgggactggttccagctccttcatgagaactccaagcagaatggctcagccagcagtgtagccggcccggccagcgggctggacaagagcctgggggccagctgcaaggactccattggctggatgttctccaagctggacaccagtgctgacctcttcctggaccagacggagctggccgccatcaacctggacaagtacgaggtctgcatccgtcccttcttcaactcctgtgacacctacaaggatggccgggtctctactgctgagtggtgcttctgcttctggagggagaagcccccctgcctggcagagctggagcgcatccagatccaggaggccgccaagaagaagccaggcatcttcatcccgagctgcgacgaggatggctactaccggaagatgcagtgtgaccagagcagcggtgactgctggtgtgtggaccagctgggcctggagctgactggcacgcgcacgcatgggagccccgactgcgatgacatcgtgggcttctcgggggactttggaagcggtgtcggctgggaggatgaggaggagaaggagacggaggaagcaggcgaggaggccgaggaggaggagggcgaggcaggcgaggctgacgacgggggctacatctggtagacgccctcaggagccggctgccgggggggactcaacagcagagctctgagcagcagcaggcaacttcgagaacggatccagaaatgcagtcagaaggaccctgctccacctggggggactgggagtgtgagtgtgcatggcatgtgtgtggcacagatggctgggacgggtgacagtgtgagtgcatgtgtgcatgcatgtgtgtatgtgtgtgtgtgtgtggcatgcgctgacaaatgtgtccttgatccacactgctcctggcagagtgagtcacccaaaggccccttcggcctccttgtagctgttttctttccttttgttgttggttttaaaatacattcacacacaaatacaaattgacaggtcaaaatccatgaaatgagatcccccagccgtgtcctccagcccagccctgaccccttggtttctaccctggctccccttggtttctaccctggctcaaccgacccctgtctgcccttctccctcttgcttctgaggtcaagctctggcctgcgagcctgtccccattgcaaaggggagggaggggcagggagctgtctaccagctgaggtcctcccaaaactgggccgatgtggtgtgacatccccaccagcctcagatgagacgggccaggacgcccagccacagcaagccctgtccctttgccggatccccaaacactagagaagctctcctaacccaaggcggagaatgaaggtggtggcggcagaggaggagggcagcagctgagaggccagggacagggtgcctcgccaagctgtctgaggtctgtcccaggtggcccaggtggtgcaggtagaacagggtgaggagagggggtcggctcagcaggaggaggctgtggctgcagagcctgggggagcttttaggtgttgagatggggcagctctgaatcctagaccctggaatagcctgtcccttttctctgggtctcgtggtggagccatgatctgggctgctctcttggggacactgggtggtggttacacagttgacctctgcctggctcccccttggtgcaactcctgcctccatcccccttgctggggtcccctcatccacttgagggcgcctgagggccaggagcagcaggcaaggagcctgggtctaggctaagggggtgtgtgcccacctcctccctgacccttaacactcctgtcctgcccagaccaacagagagagctgtccctgagaccccggagagaagcagctgccgaaagctgcagcctttccgcactctgagaccatgatcttcctcctgccaggggagagccacccacaggccatgtccagccccacttccctcagcccccagggcttccttctggcccctctgaggattccctagggctgccccgcagaggggcttccccaagctctgttttgaagcctgcaatgtggaaaagtgagaagtcagagggaacaggacaggtgcagccgggctctgaggccacacctcacacctcgctgttccccaacatcccctgagcagtgtgagctcatctcaccagatgagaagaggccctgtgcatttcttttgtttgtttgttgctgttttcccccacccatccagttctcctcagcaaagcaaattccttaacacctttggtggagaatttcttacccagacttggggctgtgatgcccttcagtgcgtggtgagtgcagcgtgtgtgcgtgtgcctgtgtgtgaacctgggggccatcctggtggcctgggagcgtgaggagaggccccctgtgtgctgggtgagtggtgggtgtggggtcaatgcagtgaggctctctgggtgaggctcccaacctggcagtccccagcctcccagcatctgtgagcgtctgttggactttacagaagagcctcatcctgtctgcccctcactctgccctggaatcaacatcttccgagtccttcttgggggaaatagcagagccccacttaactccataaactgcttcccattccgcagcccagttctgattgttgaggtgtcgcgtcgttccaggtcccccagtcccctctttctcctgtcctctctctgtccttcacctccccactccagccccggctcagttcagggaaatgctgttccacatcagccctctgctctctgaggcagccgcgcctctgactcggagctacttgaaacttctgctcttgctaggattggagtctacctatctcttccatttgtcccagctggagttctggaactttcctcctcggggtgggggtgggggttgttaaggatgctggggggcctggggaaggaaggagttcagaggaagggtgtcccctgtcctcttgatgtcaccctccgctcctgggacacgtgctctctctgtctctgggtcttctggctgtgcacgtttgtgtgtccttgtaaatatgttttaggaagaaagcaaaagggactgaactagcctctggtaggattgcaggggtccagccttgcctgtttccgaagcccccacactgcctttcgccctactgagactggtcccctcaaaaggtagacaaaacagcagctccctgtggagctgaagggcggcctcaaagtggctttttgttagacaaggttaaggtttcctcatgagcaaggttgcagatcggtccttcctcagctccttgatttgtgaccttgaccaaggggcctgccacccagcccctccagtgccctctcctcgatgcctcgctccttcctgcccccactcccctggcttaggcaggtaggggaattagggccatgctggaagaagcttaaccatgtgttcaaagaacggtttcttgcttgcttggtcctggaactccccttggctgccccaggcctccttggcccatgggtgctgggggaggtggatgtcagatctggtaggttgcagcagagaaaataaatgtgccttgagagaccactcagagagggtccaagggtgatggagaaggaagcatggcctgggagcttggaagggaggggtggtgggtggcggcatcttgactgccccctgttgtcccacacgtggggggtggtcaccccccttcactccagcccgcctgccttcagccttccatgagcttcacctgcttccaacttcactttggagggggtggggtccgttggcatcaacacggggaccctctgcttcaccaaagcccgagccctcagcccctggggagaacaaatggctgagctttgatacctggggtcgtcgagaggctgcgggctggcggcagtcccaggggagagacaccacagaaggagacccagacatcccgaggaagttcccagcagagcaaactgctttccagcctgaagcctgcttaaactgtgtgatgtgcaataactgagcttagagttaggaattgtgttcaagtgcttggatttccgtctgtagatttaactgctgaaattgtatctctcagtaattttagatgtcttttaaaaaattgaaaaacaaagtgttagactgtgtgcgtgtgcgttgatgggcactcaagagtcccgtgagtcatccagccctgcctttcccctgcgcccccatcctctcacgtcccgccccgcctccacttggggaccctgcctcgtgtcgtctttatctgcctattactcagcctaaggaaacaagtacactccacacatgcataaaggaaatcaaatgttatttttaagaaaatggaaaataaaaactttataaacacca

SEQ ID NO: 19973 - protein, 172 aa, Homo sapiens [sequence omitted]

SEQ ID NO: 19974 - DNA, 4637 bp, Homo sapiens
acctgcagccctggctggaactacctgagagttggagccagaccctgtctgtccctgacctcggacaggtgcaggtggggagtggggcctggaagagacactatggtcagtgtaagctggagcaacaggcgtgcctgagcagcaagcagctggcggtgcgatgcgagggcccctgcccctgccccacggagcaggctgccacctccaccgccgatggcaaaccagagacttgcaccggtcaggacctggctgacctgggagatcggctgcgggactggttccagctccttcatgagaactccaagcagaatggctcagccagcagtgtagccggcccggccagcgggctggacaagagcctgggggccagctgcaaggactccattggctggatgttctccaagctggacaccagtgctgacctcttcctggaccagacggagctggccgccatcaacctggacaagtacgaggtctgcatccgtcccttcttcaactcctgtgacacctacaaggatggccgggtctctactgctgagtggtgcttctgcttctggagggagaagcccccctgcctggcagagctggagcgcatccagatccaggaggccgccaagaagaagccaggcatcttcatcccgagctgcgacgaggatggctactaccggaagatgcagtgtgaccagagcagcggtgactgctggtgtgtggaccagctgggcctggagctgactggcacgcgcacgcatgggagccccgactgcgatgacatcgtgggcttctcgggggactttggaagcggtgtcggctgggaggatgaggaggagaaggagacggaggaagcaggcgaggaggccgaggaggaggagggcgaggcaggcgaggctgacgacgggggctacatctggtagacgccctcaggagccggctgccgggggggactcaacagcagagctctgagcagcagcaggcaacttcgagaacggatccagaaatgcagtcagaaggaccctgctccacctggggggactgggagtgtgagtgtgcatggcatgtgtgtggcacagatggctgggacgggtgacagtgtgagtgcatgtgtgcatgcatgtgtgtatgtgtgtgtgtgtgtggcatgcgctgacaaatgtgtccttgatccacactgctcctggcagagtgagtcacccaaaggccccttcggcctccttgtagctgttttctttccttttgttgttggttttaaaatacattcacacacaaatacaaattgacaggtcaaaatccatgaaatgagatcccccagccgtgtcctccagcccagccctgaccccttggtttctaccctggctccccttggtttctaccctggctcaaccgacccctgtctgcccttctccctcttgcttctgaggtcaagctctggcctgcgagcctgtccccattgcaaaggggagggaggggcagggagctgtctaccagctgaggtcctcccaaaactgggccgatgtggtgtgacatccccaccagcctcagatgagacgggccaggacgcccagccacagcaagccctgtccctttgccggatccccaaacactagagaagctctcctaacccaaggcggagaatgaaggtggtggcggcagaggaggagggcagcagctgagaggccagggacagggtgcctcgccaagctgtctgaggtctgtcccaggtggcccaggtggtgcaggtagaacagggtgaggagagggggtcggctcagcaggaggaggctgtggctgcagagcctgggggagcttttaggtgttgagatggggcagctctgaatcctagaccctggaatagcctgtcccttttctctgggtctcgtggtggagccatgatctgggctgctctcttggggacactgggtggtggttacacagttgacctctgcctggctcccccttggtgcaactcctgcctccatcccccttgctggggtcccctcatccacttgagggcgcctgagggccaggagcagcaggcaaggagcctgggtctaggctaagggggtgtgtgcccacctcctccctgacccttaacactcctgtcctgcccagaccaacagagagagctgtccctgagaccccggagagaagcagctgccgaaagctgcagcctttccgcactctgagaccatgatcttcctcctgccaggggagagccacccacaggccatgtccagccccacttccctcagcccccagggcttccttctggcccctctgaggattccctagggctgccccgcagaggggcttccccaagctctgttttgaagcctgcaatgtggaaaagtgagaagtcagagggaacaggacaggtgcagccgggctctgaggccacacctcacacctcgctgttccccaacatcccctgagcagtgtgagctcatctcaccagatgagaagaggccctgtgcatttcttttgtttgtttgttgctgttttcccccacccatccagttctcctcagcaaagcaaattccttaacacctttggtggagaatttcttacccagacttggggctgtgatgcccttcagtgcgtggtgagtgcagcgtgtgtgcgtgtgcctgtgtgtgaacctgggggccatcctggtggcctgggagcgtgaggagaggccccctgtgtgctgggtgagtggtgggtgtggggtcaatgcagtgaggctctctgggtgaggctcccaacctggcagtccccagcctcccagcatctgtgagcgtctgttggactttacagaagagcctcatcctgtctgcccctcactctgccctggaatcaacatcttccgagtccttcttgggggaaatagcagagccccacttaactccataaactgcttcccattccgcagcccagttctgattgttgaggtgtcgcgtcgttccaggtcccccagtcccctctttctcctgtcctctctctgtccttcacctccccactccagccccggctcagttcagggaaatgctgttccacatcagccctctgctctctgaggcagccgcgcctctgactcggagctacttgaaacttctgctcttgctaggattggagtctacctatctcttccatttgtcccagctggagttctggaactttcctcctcggggtgggggtgggggttgttaaggatgctggggggcctggggaaggaaggagttcagaggaagggtgtcccctgtcctcttgatgtcaccctccgctcctgggacacgtgctctctctgtctctgggtcttctggctgtgcacgtttgtgtgtccttgtaaatatgttttaggaagaaagcaaaagggactgaactagcctctggtaggattgcaggggtccagccttgcctgtttccgaagcccccacactgcctttcgccctactgagactggtcccctcaaaaggtagacaaaacagcagctccctgtggagctgaagggcggcctcaaagtggctttttgttagacaaggttaaggtttcctcatgagcaaggttgcagatcggtccttcctcagctccttgatttgtgaccttgaccaaggggcctgccacccagcccctccagtgccctctcctcgatgcctcgctccttcctgcccccactcccctggcttaggcaggtaggggaattagggccatgctggaagaagcttaaccatgtgttcaaagaacggtttcttgcttgcttggtcctggaactccccttggctgccccaggcctccttggcccatgggtgctgggggaggtggatgtcagatctggtaggttgcagcagagaaaataaatgtgccttgagagaccactcagagagggtccaagggtgatggagaaggaagcatggcctgggagcttggaagggaggggtggtgggtggcggcatcttgactgccccctgttgtcccacacgtggggggtggtcaccccccttcactccagcccgcctgccttcagccttccatgagcttcacctgcttccaacttcactttggagggggtggggtccgttggcatcaacacggggaccctctgcttcaccaaagcccgagccctcagcccctggggagaacaaatggctgagctttgatacctggggtcgtcgagaggctgcgggctggcggcagtcccaggggagagacaccacagaaggagacccagacatcccgaggaagttcccagcagagcaaactgctttccagcctgaagcctgcttaaactgtgtgatgtgcaataactgagcttagagttaggaattgtgttcaagtgcttggatttccgtctgtagatttaactgctgaaattgtatctctcagtaattttagatgtcttttaaaaaattgaaaaacaaagtgttagactgtgtgcgtgtgcgttgatgggcactcaagagtcccgtgagtcatccagccctgcctttcccctgcgcccccatcctctcacgtcccgccccgcctccacttggggaccctgcctcgtgtcgtctttatctgcctattactcagcctaaggaaacaagtacactccacacatgcataaaggaaatcaaatgttatttttaagaaaatggaaaataaaaactttataaacacca

SEQ ID NO: 19975 - protein, 172 aa, Homo sapiens [sequence omitted]

SEQ ID NO: 19976 - DNA, 5329 bp, Homo sapiens
agttgttatacggcttttgtcttaacgaagccacccattacggtatgatgatgtcaaacgtgatgctgatgctacagttacagcccctgctggcgcagcctctctgattctctctccctctccgcgtccagtgctgggctttttcagacaagtgcatctcctaaccaggtcacatttcagccgcgacccactctccgccagtcaccggaggcagaccgcgggaggagagctgaggacagccgcgtgcgcttcgccagcagcggggtgggaggaaggacattaaaatactgcagaagtcaagacccccccaggtcgaacccagaccacgatgcgcgccccgggctgcgggcggctggtgctgccgctgctgctcctggccgcggcagccctggccgaaggcgacgccaaggggctcaaggagggcgagacccccggcaatttcatggaggacgagcaatggctgtcgtccatctcgcagtacagcggcaagatcaagcactggaaccgcttccgagacgaagtggaggatgactatatcaagagctgggaggacaatcagcaaggagatgaagccctggataccaccaaggacccctgccagaaggtgaagtgcagccgccacaaggtgtgcattgcccagggctaccagcgggccatgtgcatcagtcgcaagaagctggagcacaggatcaagcagccgaccgtgaaactccatggaaacaaagactccatctgcaagccctgccacatggcccagcttgcctctgtctgcggctcagatggccacacttacagctctgtgtgtaagctggagcaacaggcgtgcctgagcagcaagcagctggcggtgcgatgcgagggcccctgcccctgccccacggagcaggctgccacctccaccgccgatggcaaaccagagacttgcaccggtcaggacctggctgacctgggagatcggctgcgggactggttccagctccttcatgagaactccaagcagaatggctcagccagcagtgtagccggcccggccagcgggctggacaagagcctgggggccagctgcaaggactccattggctggatgttctccaagctggacaccagtgctgacctcttcctggaccagacggagctggccgccatcaacctggacaagtacgaggtctgcatccgtcccttcttcaactcctgtgacacctacaaggatggccgggtctctactgctgagtggtgcttctgcttctggagggagaagcccccctgcctggcagagctggagcgcatccagatccaggaggccgccaagaagaagccaggcatcttcatcccgagctgcgacgaggatggctactaccggaagatgcagtgtgaccagagcagcggtgactgctggtgtgtggaccagctgggcctggagctgactggcacgcgcacgcatgggagccccgactgcgatgacatcgtgggcttctcgggggactttggaagcggtgtcggctgggaggatgaggaggagaaggagacggaggaagcaggcgaggaggccgaggaggaggagggcgaggcaggcgaggctgacgacgggggctacatctggtagacgccctcaggagccggctgccgggggggactcaacagcagagctctgagcagcagcaggcaacttcgagaacggatccagaaatgcagtcagaaggaccctgctccacctggggggactgggagtgtgagtgtgcatggcatgtgtgtggcacagatggctgggacgggtgacagtgtgagtgcatgtgtgcatgcatgtgtgtatgtgtgtgtgtgtgtggcatgcgctgacaaatgtgtccttgatccacactgctcctggcagagtgagtcacccaaaggccccttcggcctccttgtagctgttttctttccttttgttgttggttttaaaatacattcacacacaaatacaaattgacaggtcaaaatccatgaaatgagatcccccagccgtgtcctccagcccagccctgaccccttggtttctaccctggctccccttggtttctaccctggctcaaccgacccctgtctgcccttctccctcttgcttctgaggtcaagctctggcctgcgagcctgtccccattgcaaaggggagggaggggcagggagctgtctaccagctgaggtcctcccaaaactgggccgatgtggtgtgacatccccaccagcctcagatgagacgggccaggacgcccagccacagcaagccctgtccctttgccggatccccaaacactagagaagctctcctaacccaaggcggagaatgaaggtggtggcggcagaggaggagggcagcagctgagaggccagggacagggtgcctcgccaagctgtctgaggtctgtcccaggtggcccaggtggtgcaggtagaacagggtgaggagagggggtcggctcagcaggaggaggctgtggctgcagagcctgggggagcttttaggtgttgagatggggcagctctgaatcctagaccctggaatagcctgtcccttttctctgggtctcgtggtggagccatgatctgggctgctctcttggggacactgggtggtggttacacagttgacctctgcctggctcccccttggtgcaactcctgcctccatcccccttgctggggtcccctcatccacttgagggcgcctgagggccaggagcagcaggcaaggagcctgggtctaggctaagggggtgtgtgcccacctcctccctgacccttaacactcctgtcctgcccagaccaacagagagagctgtccctgagaccccggagagaagcagctgccgaaagctgcagcctttccgcactctgagaccatgatcttcctcctgccaggggagagccacccacaggccatgtccagccccacttccctcagcccccagggcttccttctggcccctctgaggattccctagggctgccccgcagaggggcttccccaagctctgttttgaagcctgcaatgtggaaaagtgagaagtcagagggaacaggacaggtgcagccgggctctgaggccacacctcacacctcgctgttccccaacatcccctgagcagtgtgagctcatctcaccagatgagaagaggccctgtgcatttcttttgtttgtttgttgctgttttcccccacccatccagttctcctcagcaaagcaaattccttaacacctttggtggagaatttcttacccagacttggggctgtgatgcccttcagtgcgtggtgagtgcagcgtgtgtgcgtgtgcctgtgtgtgaacctgggggccatcctggtggcctgggagcgtgaggagaggccccctgtgtgctgggtgagtggtgggtgtggggtcaatgcagtgaggctctctgggtgaggctcccaacctggcagtccccagcctcccagcatctgtgagcgtctgttggactttacagaagagcctcatcctgtctgcccctcactctgccctggaatcaacatcttccgagtccttcttgggggaaatagcagagccccacttaactccataaactgcttcccattccgcagcccagttctgattgttgaggtgtcgcgtcgttccaggtcccccagtcccctctttctcctgtcctctctctgtccttcacctccccactccagccccggctcagttcagggaaatgctgttccacatcagccctctgctctctgaggcagccgcgcctctgactcggagctacttgaaacttctgctcttgctaggattggagtctacctatctcttccatttgtcccagctggagttctggaactttcctcctcggggtgggggtgggggttgttaaggatgctggggggcctggggaaggaaggagttcagaggaagggtgtcccctgtcctcttgatgtcaccctccgctcctgggacacgtgctctctctgtctctgggtcttctggctgtgcacgtttgtgtgtccttgtaaatatgttttaggaagaaagcaaaagggactgaactagcctctggtaggattgcaggggtccagccttgcctgtttccgaagcccccacactgcctttcgccctactgagactggtcccctcaaaaggtagacaaaacagcagctccctgtggagctgaagggcggcctcaaagtggctttttgttagacaaggttaaggtttcctcatgagcaaggttgcagatcggtccttcctcagctccttgatttgtgaccttgaccaaggggcctgccacccagcccctccagtgccctctcctcgatgcctcgctccttcctgcccccactcccctggcttaggcaggtaggggaattagggccatgctggaagaagcttaaccatgtgttcaaagaacggtttcttgcttgcttggtcctggaactccccttggctgccccaggcctccttggcccatgggtgctgggggaggtggatgtcagatctggtaggttgcagcagagaaaataaatgtgccttgagagaccactcagagagggtccaagggtgatggagaaggaagcatggcctgggagcttggaagggaggggtggtgggtggcggcatcttgactgccccctgttgtcccacacgtggggggtggtcaccccccttcactccagcccgcctgccttcagccttccatgagcttcacctgcttccaacttcactttggagggggtggggtccgttggcatcaacacggggaccctctgcttcaccaaagcccgagccctcagcccctggggagaacaaatggctgagctttgatacctggggtcgtcgagaggctgcgggctggcggcagtcccaggggagagacaccacagaaggagacccagacatcccgaggaagttcccagcagagcaaactgctttccagcctgaagcctgcttaaactgtgtgatgtgcaataactgagcttagagttaggaattgtgttcaagtgcttggatttccgtctgtagatttaactgctgaaattgtatctctcagtaattttagatgtcttttaaaaaattgaaaaacaaagtgttagactgtgtgcgtgtgcgttgatgggcactcaagagtcccgtgagtcatccagccctgcctttcccctgcgcccccatcctctcacgtcccgccccgcctccacttggggaccctgcctcgtgtcgtctttatctgcctattactcagcctaaggaaacaagtacactccacacatgcataaaggaaatcaaatgttatttttaagaaaatggaaaataaaaactttataaacacca

SEQ ID NO: 19977 - protein, 424 aa, Homo sapiens; identical to SEQ ID NO: 2513

SEQ ID NO: 19978 - DNA, 2931 bp, Homo sapiens
gaaaaggccctggtcagaacctggctttagcaggcagctgtggcagaagcagttcttagcgaaggccgaggaattgttagatgctccataggcggtgctgtgtcctatcaggagaactgagaaaagtccactgggtgtaagctggagcaacaggcgtgcctgagcagcaagcagctggcggtgcgatgcgagggcccctgcccctgccccacggagcaggctgccacctccaccgccgatggcaaaccagagacttgcaccggtcaggacctggctgacctgggagatcggctgcgggactggttccagctccttcatgagaactccaagcagaatggctcagccagcagtgtagccggcccggccagcgggctggacaagagcctgggggccagctgcaaggactccattggctggatgttctccaagctggacaccagtgctgacctcttcctggaccagacggagctggccgccatcaacctggacaagtacgaggtctgcatccgtcccttcttcaactcctgtgacacctacaaggatggccgggtctctactgctgagtggtgcttctgcttctggagggagaagcccccctgcctggcagagctggagcgcatccagatccaggaggccgccaagaagaagccaggcatcttcatcccgagctgcgacgaggatggctactaccggaagatgcagtgtgaccagagcagcggtgactgctggtgtgtggaccagctgggcctggagctgactggcacgcgcacgcatgggagccccgactgcgatgacatcgtgggcttctcgggggactttggaagcggtgtcggctgggaggatgaggaggagaaggagacggaggaagcaggcgaggaggccgaggaggaggagggcgaggcaggcgaggctgacgacgggggctacatctggtagacgccctcaggagccggctgccgggggggactcaacagcagagctctgagcagcagcaggcaacttcgagaacggatccagaaatgcagtcagaaggaccctgctccacctggggggactgggagtgtgagtgtgcatggcatgtgtgtggcacagatggctgggacgggtgacagtgtgagtgcatgtgtgcatgcatgtgtgtatgtgtgtgtgtgtgtggcatgcgctgacaaatgtgtccttgatccacactgctcctggcagagtgagtcacccaaaggccccttcggcctccttgtagctgttttctttccttttgttgttggttttaaaatacattcacacacaaatacaaattgacaggtcaaaatccatgaaatgagatcccccagccgtgtcctccagcccagccctgaccccttggtttctaccctggctccccttggtttctaccctggctcaaccgacccctgtctgcccttctccctcttgcttctgaggtcaagctctggcctgcgagcctgtccccattgcaaaggggagggaggggcagggagctgtctaccagctgaggtcctcccaaaactgggccgatgtggtgtgacatccccaccagcctcagatgagacgggccaggacgcccagccacagcaagccctgtccctttgccggatccccaaacactagagaagctctcctaacccaaggcggagaatgaaggtggtggcggcagaggaggagggcagcagctgagaggccagggacagggtgcctcgccaagctgtctgaggtctgtcccaggtggcccaggtggtgcaggtagaacagggtgaggagagggggtcggctcagcaggaggaggctgtggctgcagagcctgggggagcttttaggtgttgagatggggcagctctgaatcctagaccctggaatagcctgtcccttttctctgggtctcgtggtggagccatgatctgggctgctctcttggggacactgggtggtggttacacagttgacctctgcctggctcccccttggtgcaactcctgcctccatcccccttgctggggtcccctcatccacttgagggcgcctgagggccaggagcagcaggcaaggagcctgggtctaggctaagggggtgtgtgcccacctcctccctgacccttaacactcctgtcctgcccagaccaacagagagagctgtccctgagaccccggagagaagcagctgccgaaagctgcagcctttccgcactctgagaccatgatcttcctcctgccaggggagagccacccacaggccatgtccagccccacttccctcagcccccagggcttccttctggcccctctgaggattccctagggctgccccgcagaggggcttccccaagctctgttttgaagcctgcaatgtggaaaagtgagaagtcagagggaacaggacaggtgcagccgggctctgaggccacacctcacacctcgctgttccccaacatcccctgagcagtgtgagctcatctcaccagatgagaagaggccctgtgcatttcttttgtttgtttgttgctgttttcccccacccatccagttctcctcagcaaagcaaattccttaacacctttggtggagaatttcttacccagacttggggctgtgatgcccttcagtgcgtggtgagtgcagcgtgtgtgcgtgtgcctgtgtgtgaacctgggggccatcctggtggcctgggagcgtgaggagaggccccctgtgtgctgggtgagtggtgggtgtggggtcaatgcagtgaggctctctgggtgaggctcccaacctggcagtccccagcctcccagcatctgtgagcgtctgttggactttacagaagagcctcatcctgtctgcccctcactctgccctggaatcaacatcttccgagtccttcttgggggaaatagcagagccccacttaactccataaactgcttcccattccgc

SEQ ID NO: 19979 - protein, 172 aa, Homo sapiens [sequence omitted]

SEQ ID NO: 19980 - DNA, 2906 bp, Homo sapiens
acctgcagccctggctggaactacctgagagttggagccagaccctgtctgtccctgacctcggacaggtgcaggtggggagtggggcctggaagagacactatggtcagtgtaagctggagcaacaggcgtgcctgagcagcaagcagctggcggtgcgatgcgagggcccctgcccctgccccacggagcaggctgccacctccaccgccgatggcaaaccagagacttgcaccggtcaggacctggctgacctgggagatcggctgcgggactggttccagctccttcatgagaactccaagcagaatggctcagccagcagtgtagccggcccggccagcgggctggacaagagcctgggggccagctgcaaggactccattggctggatgttctccaagctggacaccagtgctgacctcttcctggaccagacggagctggccgccatcaacctggacaagtacgaggtctgcatccgtcccttcttcaactcctgtgacacctacaaggatggccgggtctctactgctgagtggtgcttctgcttctggagggagaagcccccctgcctggcagagctggagcgcatccagatccaggaggccgccaagaagaagccaggcatcttcatcccgagctgcgacgaggatggctactaccggaagatgcagtgtgaccagagcagcggtgactgctggtgtgtggaccagctgggcctggagctgactggcacgcgcacgcatgggagccccgactgcgatgacatcgtgggcttctcgggggactttggaagcggtgtcggctgggaggatgaggaggagaaggagacggaggaagcaggcgaggaggccgaggaggaggagggcgaggcaggcgaggctgacgacgggggctacatctggtagacgccctcaggagccggctgccgggggggactcaacagcagagctctgagcagcagcaggcaacttcgagaacggatccagaaatgcagtcagaaggaccctgctccacctggggggactgggagtgtgagtgtgcatggcatgtgtgtggcacagatggctgggacgggtgacagtgtgagtgcatgtgtgcatgcatgtgtgtatgtgtgtgtgtgtgtggcatgcgctgacaaatgtgtccttgatccacactgctcctggcagagtgagtcacccaaaggccccttcggcctccttgtagctgttttctttccttttgttgttggttttaaaatacattcacacacaaatacaaattgacaggtcaaaatccatgaaatgagatcccccagccgtgtcctccagcccagccctgaccccttggtttctaccctggctccccttggtttctaccctggctcaaccgacccctgtctgcccttctccctcttgcttctgaggtcaagctctggcctgcgagcctgtccccattgcaaaggggagggaggggcagggagctgtctaccagctgaggtcctcccaaaactgggccgatgtggtgtgacatccccaccagcctcagatgagacgggccaggacgcccagccacagcaagccctgtccctttgccggatccccaaacactagagaagctctcctaacccaaggcggagaatgaaggtggtggcggcagaggaggagggcagcagctgagaggccagggacagggtgcctcgccaagctgtctgaggtctgtcccaggtggcccaggtggtgcaggtagaacagggtgaggagagggggtcggctcagcaggaggaggctgtggctgcagagcctgggggagcttttaggtgttgagatggggcagctctgaatcctagaccctggaatagcctgtcccttttctctgggtctcgtggtggagccatgatctgggctgctctcttggggacactgggtggtggttacacagttgacctctgcctggctcccccttggtgcaactcctgcctccatcccccttgctggggtcccctcatccacttgagggcgcctgagggccaggagcagcaggcaaggagcctgggtctaggctaagggggtgtgtgcccacctcctccctgacccttaacactcctgtcctgcccagaccaacagagagagctgtccctgagaccccggagagaagcagctgccgaaagctgcagcctttccgcactctgagaccatgatcttcctcctgccaggggagagccacccacaggccatgtccagccccacttccctcagcccccagggcttccttctggcccctctgaggattccctagggctgccccgcagaggggcttccccaagctctgttttgaagcctgcaatgtggaaaagtgagaagtcagagggaacaggacaggtgcagccgggctctgaggccacacctcacacctcgctgttccccaacatcccctgagcagtgtgagctcatctcaccagatgagaagaggccctgtgcatttcttttgtttgtttgttgctgttttcccccacccatccagttctcctcagcaaagcaaattccttaacacctttggtggagaatttcttacccagacttggggctgtgatgcccttcagtgcgtggtgagtgcagcgtgtgtgcgtgtgcctgtgtgtgaacctgggggccatcctggtggcctgggagcgtgaggagaggccccctgtgtgctgggtgagtggtgggtgtggggtcaatgcagtgaggctctctgggtgaggctcccaacctggcagtccccagcctcccagcatctgtgagcgtctgttggactttacagaagagcctcatcctgtctgcccctcactctgccctggaatcaacatcttccgagtccttcttgggggaaatagcagagccccacttaactccataaactgcttcccattccgc

SEQ ID NO: 19981 - protein, 172 aa, Homo sapiens [sequence omitted]

SEQ ID NO: 19982 - DNA, 1312 bp, Homo sapiens
gaaaaggccctggtcagaacctggctttagcaggcagctgtggcagaagcagttcttagcgaaggccgaggaattgttagatgctccataggcggtgctgtgtcctatcaggagaactgagaaaagtccactgggtgtaagctggagcaacaggcgtgcctgagcagcaagcagctggcggtgcgatgcgagggcccctgcccctgccccacggagcaggctgccacctccaccgccgatggcaaaccagagacttgcaccggtcaggacctggctgacctgggagatcggctgcgggactggttccagctccttcatgagaactccaagcagaatggctcagccagcagtgtagccggcccggccagcgggctggacaagagcctgggggccagctgcaaggactccattggctggatgttctccaagctggacaccagtgctgacctcttcctggaccagacggagctggccgccatcaacctggacaagtacgaggtctgcatccgtcccttcttcaactcctgtgacacctacaaggatggccgggtctctactgctgagtggtgcttctgcttctggagggagaagcccccctgcctggcagagctggagcgcatccagatccaggaggccgccaagaagaagccaggcatcttcatcccgagctgcgacgaggatggctactaccggaagatgcagtgtgaccagagcagcggtgactgctggtgtgtggaccagctgggcctggagctgactggcacgcgcacgcatgggagccccgactgcgatgacatcgtgggcttctcgggggactttggaagcggtgtcggctgggaggatgaggaggagaaggagacggaggaagcaggcgaggaggccgaggaggaggagggcgaggcaggcgaggctgacgacgggggctacatctggtagacgccctcaggagccggctgccgggggggactcaacagcagagctctgagcagcagcaggcaacttcgagaacggatccagaaatgcagtcagaaggaccctgctccacctggggggactgggagtgtgagtgtgcatggcatgtgtgtggcacagatggctgggacgggtgacagtgtgagtgcatgtgtgcatgcatgtgtgtatgtgtgtgtgtgtgtggcatgcgctgacaaatgtgtccttgatccacactgctcctggcagagtgagtcacccaaaggccccttcggcctccttgtagctgttttctttccttttgttgttggttttaaaatacattcacacacaaatacaaattgacaggtcaaaatcc

SEQ ID NO: 19983 - protein, 172 aa, Homo sapiens [sequence omitted]

SEQ ID NO: 19984 - DNA, 1287 bp, Homo sapiens
acctgcagccctggctggaactacctgagagttggagccagaccctgtctgtccctgacctcggacaggtgcaggtggggagtggggcctggaagagacactatggtcagtgtaagctggagcaacaggcgtgcctgagcagcaagcagctggcggtgcgatgcgagggcccctgcccctgccccacggagcaggctgccacctccaccgccgatggcaaaccagagacttgcaccggtcaggacctggctgacctgggagatcggctgcgggactggttccagctccttcatgagaactccaagcagaatggctcagccagcagtgtagccggcccggccagcgggctggacaagagcctgggggccagctgcaaggactccattggctggatgttctccaagctggacaccagtgctgacctcttcctggaccagacggagctggccgccatcaacctggacaagtacgaggtctgcatccgtcccttcttcaactcctgtgacacctacaaggatggccgggtctctactgctgagtggtgcttctgcttctggagggagaagcccccctgcctggcagagctggagcgcatccagatccaggaggccgccaagaagaagccaggcatcttcatcccgagctgcgacgaggatggctactaccggaagatgcagtgtgaccagagcagcggtgactgctggtgtgtggaccagctgggcctggagctgactggcacgcgcacgcatgggagccccgactgcgatgacatcgtgggcttctcgggggactttggaagcggtgtcggctgggaggatgaggaggagaaggagacggaggaagcaggcgaggaggccgaggaggaggagggcgaggcaggcgaggctgacgacgggggctacatctggtagacgccctcaggagccggctgccgggggggactcaacagcagagctctgagcagcagcaggcaacttcgagaacggatccagaaatgcagtcagaaggaccctgctccacctggggggactgggagtgtgagtgtgcatggcatgtgtgtggcacagatggctgggacgggtgacagtgtgagtgcatgtgtgcatgcatgtgtgtatgtgtgtgtgtgtgtggcatgcgctgacaaatgtgtccttgatccacactgctcctggcagagtgagtcacccaaaggccccttcggcctccttgtagctgttttctttccttttgttgttggttttaaaatacattcacacacaaatacaaattgacaggtcaaaatcc

SEQ ID NO: 19985 - protein, 172 aa, Homo sapiens [sequence omitted]

SEQ ID NO: 19986 - DNA, 2123 bp, Homo sapiens
tcttgctctccatcctttgagggagctcagggacatttcgggattctggatttcttggtctgcaactccctgtgtgccaggcggggctgggccccgctgcggctggctggcgtttggcgctctcatcgagggagcgcttcgctttgaaatctacccactccttttttttttttttttttaaaccaggtatgatgatgtcaaacgtgatgctgatgctacagttacagcccctgctggcgcagcctctctgattctctctccctctccgcgtccagtgctgggctttttcagacaagtgcatctcctaaccaggtcacatttcagccgcgacccactctccgccagtcaccggaggcagaccgcgggaggagagctgaggacagccgcgtgcgcttcgccagcagcggggtgggaggaaggacattaaaatactgcagaagtcaagacccccccaggtcgaacccagaccacgatgcgcgccccgggctgcgggcggctggtgctgccgctgctgctcctggccgcggcagccctggccgaaggcgacgccaaggggctcaaggagggcgagacccccggcaatttcatggaggacgagcaatggctgtcgtccatctcgcagtacagcggcaagatcaagcactggaaccgcttccgagacgaagtggaggatgactatatcaagagctgggaggacaatcagcaaggagatgaagccctggataccaccaaggacccctgccagaaggtgaagtgcagccgccacaaggtgtgcattgcccagggctaccagcgggccatgtgcatcagtcgcaagaagctggagcacaggatcaagcagccgaccgtgaaactccatggaaacaaagactccatctgcaagccctgccacatggcccagcttgcctctgtctgcggctcagatggccacacttacagctctgtgtgtaagctggagcaacaggcgtgcctgagcagcaagcagctggcggtgcgatgcgagggcccctgcccctgccccacggagcaggctgccacctccaccgccgatggcaaaccagagacttgcaccggtcaggacctggctgacctgggagatcggctgcgggactggttccagctccttcatgagaactccaagcagaatggctcagccagcagtgtagccggcccggccagcgggctggacaagagcctgggggccagctgcaaggactccattggctggatgttctccaagctggacaccagtgctgacctcttcctggaccagacggagctggccgccatcaacctggacaagtacgaggtctgcatccgtcccttcttcaactcctgtgacacctacaaggatggccgggtctctactgctgagtggtgcttctgcttctggagggagaagcccccctgcctggcagagctggagcgcatccagatccaggaggccgccaagaagaagccaggcatcttcatcccgagctgcgacgaggatggctactaccggaagatgcagtgtgaccagagcagcggtgactgctggtgtgtggaccagctgggcctggagctgactggcacgcgcacgcatgggagccccgactgcgatgacatcgtgggcttctcgggggactttggaagcggtgtcggctgggaggatgaggaggagaaggagacggaggaagcaggcgaggaggccgaggaggaggagggcgaggcaggcgaggctgacgacgggggctacatctggtagacgccctcaggagccggctgccgggggggactcaacagcagagctctgagcagcagcaggcaacttcgagaacggatccagaaatgcagtcagaaggaccctgctccacctggggggactgggagtgtgagtgtgcatggcatgtgtgtggcacagatggctgggacgggtgacagtgtgagtgcatgtgtgcatgcatgtgtgtatgtgtgtgtgtgtgtggcatgcgctgacaaatgtgtccttgatccacactgctcctggcagagtgagtcacccaaaggccccttcggcctccttgtagctgttttctttccttttgttgttggttttaaaatacattcacacacaaatacaaattgacaggtcaaaatcc

SEQ ID NO: 19987 - protein, 424 aa, Homo sapiens; identical to SEQ ID NO: 2513

SEQ ID NO: 19988 - DNA, 2741 bp, Homo sapiens
agaataaggaaggagaagaaggagaggacatggagggaggaagaatgtgaggaggcaggggtgggaggctggggctccccagcattcccgcctccctctgctggtccgtggtgagggaggagtgagggcctcctgtggctgacattcttccagggaactctgcacagtcctgctgatatcatcagtttcttttgctgctgccttgaaaagtaaacaaaaaagggctgcaacactgcaactccatcaggggcatgggaagatgagggtggggatggggtgaaggaacaggaatccaacaaatattaagaggacaaactttggtaggaaaatgatagaccaagcaaagtaaaaggcaaacaactttaatggttattttgctaaagataaaactctgggtggtaaaggaattaaaggcagagtctcaaagagatatttgcacccccgtgtctgtattagcactactcccaatagtcaagaggaagcaagccaagtgttcactgatggaggaacagagtgtggtacgcacatgtaacggaacattccattatatgtataatacaggaaggaaatcctgtcacctgacacaacatggatgaaccttgaggacattatgctaagtgaaataagccagtcacaaaaagacaagtcactgtatgattccacttatatgagatactgagaatagtcaaaaccagagagacagaaagcagaatggtggctgcgggggctgggaggagtgggaattactgtttaatgggtacagtttccattttacaagctgagaagcctatggagatggacggcggtgacggccacacagcattatgaatgtattaacagttaacgttactgaactgtgcacttaaaaatggtgaagacagtatgttttatgagtattttacgacaatttaaaaattaaaagaaaaaaaaccagaacacactaagggttataggcacaaattctccttatgcccaccaccatctcagctggtagtatgacgggtgtagacaccattagaggcaatggtgaatctatggggaaccacccaggaaagtcaccatccaaatgtccacatccctgcttggcaattaaaacgaagacacttttcttcagcacctggtgaagatgtttagtttctagtgctttccaagatccacctcaggagaagtcaatttgtccacaggaagcgtagtttccaaagctgtctacggtgaacctctgagagatgtgaattgaattcagctttagggagccaaagtagaagttctcaaacaactttaaaatatttcggccatcaaatgattctctttccttgaagatatatttgccttccgctgtgtagagattgtacctgccttcagcattggggtctttcctgaatagtgtattcataactgtagcatgcagtttcacactattccactctttcactattagtccagatgcctgaaaacgttccagcactcgatcaactaattcttgtagcctggagaaattggagaaaagtaatgcagaaatcttagtaaacttctgaacatgcgattaccaattcaacaatgtttatggagcatgtgctctgtgctaatcaccatacaaagccctgcatcacaggaggaagaataagagactcatctcccaccatcatggagctaaagatcagtcttgtttgtctgcttaacagatagtagaaataaatgatggcaatatattatggtgagcgtgaagggagtgatcaactctacatggagagggccaggtttccacaggaggtttagacatagtctggaatgatcattaaagatttgcaaataacaccagggaaggaggggcacttcaagtagaagaagaaacagcaagtgcaaagatgccaaggcatgcaagatcacagcatattcaaaaaactgtcaattatttacaatacagttatgacagagagtgacagaaaagggacaatggagatgagctaagtctataagcagtggtcagattagggaagccacagaaagactttcaaaagggaattatgtggtctgatgtccatttttgaaagctgactcaatagcagagtgggaagggctttagaagaggaacagctacagaggtcagtcagctaggtggctacttcaacagtcaacatcactatgatgtgtcaggcacagttctaagcactttttatctgttaaatcatttaatcctcataaccaattattatccctatttaccaatacagaagccaaggcacagagaagttacaaaacttgaccaacttcacaaaactaagtggcaaatccaaaattagaaggggccgggtgcagtggctcatgtctgtgatcccagcactttggaaggctgaggcaggctgatcacttgaggtcaggagtttgagaccagcctggccaacatggtgaaaccccatctctactaaaaatacaaaaactagccaggtggtagtggcgcgtgcatggtggctcacacctgtcatcccagcactttgggaggccaaagagggaagatcacttgaggccagaagttcaagatccacttgagcaatatagcaatacctcgtctctacaagaaaaattttttaaattagctgggcatggtggcatgcacttgtagtcccagcaactcgggaggctgaagcaggaggatagcttgaccccaggagttcaaggctgcagtgagctgtgattgtgccactgcactctagcctgggcagcagagtgagatcacgtctctt

SEQ ID NO: 19989 - protein, 76 aa, Homo sapiens [sequence omitted]

SEQ ID NO: 19990 - DNA, 3175 bp, Homo sapiens
agaataaggaaggagaagaaggagaggacatggagggaggaagaatgtgaggaggcaggggtgggaggctggggctccccagcattcccgcctccctctgctggtccgtggtgagggaggagtgagggcctcctgtggctgacattcttccagggaactctgcacagtcctgctgatatcatcagtttcttttgctgctgccttgaaaagtaaacaaaaaagggctgcaacactgcaactccatcaggggcatgggaagatgagggtggggatggggtgaaggaacaggaatccaacaaatattaagaggacaaactttggtaggaaaatgatagaccaagcaaagtaaaaggcaaacaactttaatggttattttgctaaagataaaactctgggtggtaaaggaattaaaggcagagtctcaaagagatatttgcacccccgtgtctgtattagcactactcccaatagtcaagaggaagcaagccaagtgttcactgatggaggaacagagtgtggtacgcacatgtaacggaacattccattatatgtataatacaggaaggaaatcctgtcacctgacacaacatggatgaaccttgaggacattatgctaagtgaaataagccagtcacaaaaagacaagtcactgtatgattccacttatatgagatactgagaatagtcaaaaccagagagacagaaagcagaatggtggctgcgggggctgggaggagtgggaattactgtttaatgggtacagtttccattttacaagctgagaagcctatggagatggacggcggtgacggccacacagcattatgaatgtattaacagttaacgttactgaactgtgcacttaaaaatggtgaagacagtatgttttatgagtattttacgacaatttaaaaattaaaagaaaaaaaaccagaacacactaagggttataggcacaaattctccttatgcccaccaccatctcagctggtagtatgacgggtgtagacaccattagaggcaatggtgaatctatggggaaccacccaggaaagtcaccatccaaatgtccacatccctgcttggcaattaaaacgaagacacttttcttcagcacctggtgaagatgtttagtttctagtgctttccaagatccacctcaggagaagtcaatttgtccacaggaagcgtagtttccaaagctgtctacggtgaacctctgagagatgtgaattgaattcagctttagggagccaaagtagaagttctcaaacaactgtaatcccagctacttgggaggctgaggcaggagaatcacttgaacccgggaggcacaggttgcagtgagcggagattgcatcattgtactccagcctgggcaacaaggcaaagctctttaaaatatttcggccatcaaatgattctctttccttgaagatatatttgccttccgctgtgtagagattgtacctgccttcagcattggggtctttcctgaatagtgtattcataactgtagcatgcagtttcacactattccactctttcactattagtccagatgcctgaaaacgttccagcactcgatcaactaattcttgtagcctgttggagccatctttcatatggactttggcgtaaagaacatccaccatgccaggatcatcattcatgtattctatccctgccatctccacttctaggggtttacccccagaaatatcattaatgaattcctctttacactgctgtagcatctcacatgtctgctggatctcttcctcactcaaaagcaccaacatcccaatagttagatgaagctttttaggattctggaaaatgctgctgtcaaccccatgatccatggagcacttcgccagtacttcctcctggaatctcaggaatccttcctgaacctcaacttcattgaggaaaaaggcaaggaagtgagtgaagggctgctttcttcgaaaagtgtccaaaagaacatcaatccgtgttcgggctgaaattacaccatttcgatgctggccagtgattacaatttccccgtcttgtccaggtttaggaatgctaatagaagttttggtctccatttctattttcttcctagtgtcccctctctttccaactatatgctctttctatctagcaagataattaagacaatgagggatatttaatacacttaaccatccagaaaaaaaaaagcccctaagtacttttagaggtgctagaaattcataccaaacaatcagttccagttgtctgttaaagcacagttaaaataacaacttaaccaatatggttctcagaccaacatactgctgaaggggggaatccaatttccacaggccactgcccaacaaaatgcacatcgctcactgcgaagccaagcttctggtcacatcacttaatgaatcaataatttaggaaacaaaggttccttacaggctagctgaggttaaattcaaccaatattcctaccacgtacagcttagatagtcttgaagcccaaaatacttaaaagttccaaagaaaacaagttgatccttactaaatacactaatgttcaagccaacgtgggcgcggtggctcacgtctgtaatcccagcactttaggaggccgaggcggatcatctgaggccaggagttcgagaccagccaggccaacatgatgaaaccccgtctctactgaaaatacagaaagtagccgggtgtggtggcgggcgcctgtagtcccaactactgggaaagctgaggcacgagaatggcttaagcctgagaggcggaggttgcagtgagctgagatcgcgccactgcactccagcctgggcgacagagcgagacttcgtctcaaaaaaataaataaaataataattgatgagttgtgcgcttacagaaccaagaagaggtttcgtgagaaataacaacacagaaggtaaaccgacatggatggaggaaaagggcacatcattagcaatactcgatgacatcacaacccagtggcctattccccgaggcctctaaagttctcaacgaaaaaagactttcaaaggaaaagcttaaaaaaaaaatgttccccacaaaaacagactaagatgaaagtcgggccctcagaccacgagctccggaagaacaggcagttgtcgcggagacagcaaatgcagcatct

SEQ ID NO: 19991 - protein, 64 aa, Homo sapiens
MKLFRILENAAVNPMIHGALRQYFLLESQESFLNLNFIEEKGKEVSEGLLSSKSVQKNINPCSG

SEQ ID NO: 19992 - DNA, 2387 bp, Homo sapiens
agaataaggaaggagaagaaggagaggacatggagggaggaagaatgtgaggaggcaggggtgggaggctggggctccccagcattcccgcctccctctgctggtccgtggtgagggaggagtgagggcctcctgtggctgacattcttccagggaactctgcacagtcctgctgatatcatcagtttcttttgctgctgccttgaaaagtaaacaaaaaagggctgcaacactgcaactccatcaggggcatgggaagatgagggtggggatggggtgaaggaacaggaatccaacaaatattaagaggacaaactttggtaggaaaatgatagaccaagcaaagtaaaaggcaaacaactttaatggttattttgctaaagataaaactctgggtggtaaaggaattaaaggcagagtctcaaagagatatttgcacccccgtgtctgtattagcactactcccaatagtcaagaggaagcaagccaagtgttcactgatggaggaacagagtgtggtacgcacatgtaacggaacattccattatatgtataatacaggaaggaaatcctgtcacctgacacaacatggatgaaccttgaggacattatgctaagtgaaataagccagtcacaaaaagacaagtcactgtatgattccacttatatgagatactgagaatagtcaaaaccagagagacagaaagcagaatggtggctgcgggggctgggaggagtgggaattactgtttaatgggtacagtttccattttacaagctgagaagcctatggagatggacggcggtgacggccacacagcattatgaatgtattaacagttaacgttactgaactgtgcacttaaaaatggtgaagacagtatgttttatgagtattttacgacaatttaaaaattaaaagaaaaaaaaccagaacacactaagggttataggcacaaattctccttatgcccaccaccatctcagctggtagtatgacgggtgtagacaccattagaggcaatggtgaatctatggggaaccacccaggaaagtcaccatccaaatgtccacatccctgcttggcaattaaaacgaagacacttttcttcagcacctggtgaagatgtttagtttctagtgctttccaagatccacctcaggagaagtcaatttgtccacaggaagcgtagtttccaaagctgtctacggtgaacctctgagagatgtgaattgaattcagctttagggagccaaagtagaagttctcaaacaactttaaaatatttcggccatcaaatgattctctttccttgaagatatatttgccttccgctgtgtagagattgtacctgccttcagcattggggtctttcctgaatagtgtattcataactgtagcatgcagtttcacactattccactctttcactattagtccagatgcctgaaaacgttccagcactcgatcaactaattcttgtagcctgttggagccatctttcatatggactttggcgtaaagaacatccaccatgccaggatcatcattcatgtattctatccctgccatctccacttctaggggtttacccccagaaatatcattaatgaattcctctttacactgctgtagcatctcacatgtctgctggatctcttcctcactcaaaagcaccaacatcccaatagttagatgaagctttttaggattctggaaaatgctgctgtcaaccccatgatccatggagcacttcgccagtacttcctcctggaatctcaggaatccttcctgaacctcaacttcattgaggaaaaaggcaaggaagtgagtgaagggctgctttcttcgaaaagtgtccaaaagaacatcaatccgtgttcgggctgaaattacaccatttcgatgctggccagtgattacaatttccccgtcttgtccaggtttaggaatgctaatagaagttttggtctccatttctattttcttcctagtgtcccctctctttccaactatatgcttatagagcaagctgggggccctcaaagtagaccggaatccttgtggggtctgctccacctcgtaggcatcacagggctcatcagcacactccatggagccttgatagaagtcctcttcatcttcttcatgttgataggtctgttcttggactggattcttcctgtaattccggccatcaattcttataagctgtggacgcagaacttccatgacactttctccaaatgatattccaattatgcccgtgagggaagccgaggccctgaatcatcaaagagaaggagaagaggactaggcggctgcaggtaaaccaaggtagggcgaggaggaggacccggaattcctctacgcgagcgcgttctct

SEQ ID NO: 19993 - protein, 114 aa, Homo sapiens
MLASDYNFPVLSRFRNANRSFGLHFYFLPSVPSLSNYMLIEQAGGPQSRPESLWGLLHLVGITGLISTLHGALIEVLFIFFMLIGLFLDWILPVIPAINSYKLWTQNFHDTFSK

SEQ ID NO: 19994 - DNA, 2616 bp, Homo sapiens
agaataaggaaggagaagaaggagaggacatggagggaggaagaatgtgaggaggcaggggtgggaggctggggctccccagcattcccgcctccctctgctggtccgtggtgagggaggagtgagggcctcctgtggctgacattcttccagggaactctgcacagtcctgctgatatcatcagtttcttttgctgctgccttgaaaagtaaacaaaaaagggctgcaacactgcaactccatcaggggcatgggaagatgagggtggggatggggtgaaggaacaggaatccaacaaatattaagaggacaaactttggtaggaaaatgatagaccaagcaaagtaaaaggcaaacaactttaatggttattttgctaaagataaaactctgggtggtaaaggaattaaaggcagagtctcaaagagatatttgcacccccgtgtctgtattagcactactcccaatagtcaagaggaagcaagccaagtgttcactgatggaggaacagagtgtggtacgcacatgtaacggaacattccattatatgtataatacaggaaggaaatcctgtcacctgacacaacatggatgaaccttgaggacattatgctaagtgaaataagccagtcacaaaaagacaagtcactgtatgattccacttatatgagatactgagaatagtcaaaaccagagagacagaaagcagaatggtggctgcgggggctgggaggagtgggaattactgtttaatgggtacagtttccattttacaagctgagaagcctatggagatggacggcggtgacggccacacagcattatgaatgtattaacagttaacgttactgaactgtgcacttaaaaatggtgaagacagtatgttttatgagtattttacgacaatttaaaaattaaaagaaaaaaaaccagaacacactaagggttataggcacaaattctccttatgcccaccaccatctcagctggtagtatgacgggtgtagacaccattagaggcaatggtgaatctatggggaaccacccaggaaagtcaccatccaaatgtccacatccctgcttggcaattaaaacgaagacacttttcttcagcacctggtgaagatgtttagtttctagtgctttccaagatccacctcaggagaagtcaatttgtccacaggaagcgtagtttccaaagctgtctacggtgaacctctgagagatgtgaattgaattcagctttagggagccaaagtagaagttctcaaacaaccactagctctctgtgtcccaagcccttctcgattctaggattttcctggtaggctctgagaatatgcatcagagacacctgtaatcccagctacttgggaggctgaggcaggagaatcacttgaacccgggaggcacaggttgcagtgagcggagattgcatcattgtactccagcctgggcaacaaggcaaagctctttaaaatatttcggccatcaaatgattctctttccttgaagatatatttgccttccgctgtgtagagattgtacctgccttcagcattggggtctttcctgaatagtgtattcataactgtagcatgcagtttcacactattccactctttcactattagtccagatgcctgaaaacgttccagcactcgatcaactaattcttgtagcctgttggagccatctttcatatggactttggcgtaaagaacatccaccatgccaggatcatcattcatgtattctatccctgccatctccacttctaggggtttacccccagaaatatcattaatgaattcctctttacactgctgtagcatctcacatgtctgctggatctcttcctcactcaaaagcaccaacatcccaatagttagatgaagctttttaggattctggaaaatgctgctgtcaaccccatgatccatggagcacttcgccagtacttcctcctggaatctcaggaatccttcctgaacctcaacttcattgaggaaaaaggcaaggaagtgagtgaagggctgctttcttcgaaaagtgtccaaaagaacatcaatccgtgttcgggctgaaattacaccatttcgatgctggccagtgattacaatttccccgtcttgtccaggtttaggaatgctaatagaagttttggtctccatttctattttcttcctagtgtcccctctctttccaactatatgcctggacttccaagtataaatattctgacaatccaaagttatcttctggaacccacagtcgtttgatgtgttcaagtgaatgagattatagagcaagctgggggccctcaaagtagaccggaatccttgtggggtctgctccacctcgtaggcatcacagggctcatcagcacactccatggagccttgatagaagtcctcttcatcttcttcatgttgataggtctgttcttggactggattcttcctgtaattccggccatcaattcttataagctgtggacgcagaacttccatgacactttctccaaatgatattccaattatgccctgcagggactagaaaaatggagaaggtaggaggagaaacaggagactgctgcagcagacgtgcgatag

SEQ ID NO: 19995 - protein, 64 aa, Homo sapiens; identical to SEQ ID NO: 19991

SEQ ID NO: 19996 - DNA, 2357 bp, Homo sapiens
agaataaggaaggagaagaaggagaggacatggagggaggaagaatgtgaggaggcaggggtgggaggctggggctccccagcattcccgcctccctctgctggtccgtggtgagggaggagtgagggcctcctgtggctgacattcttccagggaactctgcacagtcctgctgatatcatcagtttcttttgctgctgccttgaaaagtaaacaaaaaagggctgcaacactgcaactccatcaggggcatgggaagatgagggtggggatggggtgaaggaacaggaatccaacaaatattaagaggacaaactttggtaggaaaatgatagaccaagcaaagtaaaaggcaaacaactttaatggttattttgctaaagataaaactctgggtggtaaaggaattaaaggcagagtctcaaagagatatttgcacccccgtgtctgtattagcactactcccaatagtcaagaggaagcaagccaagtgttcactgatggaggaacagagtgtggtacgcacatgtaacggaacattccattatatgtataatacaggaaggaaatcctgtcacctgacacaacatggatgaaccttgaggacattatgctaagtgaaataagccagtcacaaaaagacaagtcactgtatgattccacttatatgagatactgagaatagtcaaaaccagagagacagaaagcagaatggtggctgcgggggctgggaggagtgggaattactgtttaatgggtacagtttccattttacaagctgagaagcctatggagatggacggcggtgacggccacacagcattatgaatgtattaacagttaacgttactgaactgtgcacttaaaaatggtgaagacagtatgttttatgagtattttacgacaatttaaaaattaaaagaaaaaaaaccagaacacactaagggttataggcacaaattctccttatgcccaccaccatctcagctggtagtatgacgggtgtagacaccattagaggcaatggtgaatctatggggaaccacccaggaaagtcaccatccaaatgtccacatccctgcttggcaattaaaacgaagacacttttcttcagcacctggtgaagatgtttagtttctagtgctttccaagatccacctcaggagaagtcaatttgtccacaggaagcgtagtttccaaagctgtctacggtgaacctctgagagatgtgaattgaattcagctttagggagccaaagtagaagttctcaaacaactttaaaatatttcggccatcaaatgattctctttccttgaagatatatttgccttccgctgtgtagagattgtacctgccttcagcattggggtctttcctgaatagtgtattcataactgtagcatgcagtttcacactattccactctttcactattagtccagatgcctgaaaacgttccagcactcgatcaactaattcttgtagcctgttggagccatctttcatatggactttggcgtaaagaacatccaccatgccaggatcatcattcatgtattctatccctgccatctccacttctaggggtttacccccagaaatatcattaatgaattcctctttacactgctgtagcatctcacatgtctgctggatctcttcctcactcaaaagcaccaacatcccaatagttagatgaagctttttaggattctggaaaatgctgctgtcaaccccatgatccatggagcacttcgccagtacttcctcctggaatctcaggaatccttcctgaacctcaacttcattgaggaaaaaggcaaggaagtgagtgaagggctgctttcttcgaaaagtgtccaaaagaacatcaatccgtgttcgggctgaaattacaccatttcgatgctggccagtgattacaatttccccgtcttgtccaggtttaggaatgctaatagaagttttggtctccatttctattttcttcctagtgtcccctctctttccaactatatgcttatagagcaagctgggggccctcaaagtagaccggaatccttgtggggtctgctccacctcgtaggcatcacagggctcatcagcacactccatggagccttgatagaagtcctcttcatcttcttcatgttgataggtctgttcttggactggattcttcctgtaattccggccatcaattcttataagctgtggacgcagaacttccatgacactttctccaaatgatattccaattatgccctgcagggactagaaaaatggagaaggtaggaggagaaacaggagactgctgcagcagacgtgcgataggaaatttccccaggccgggttt

SEQ ID NO: 19997 - protein, 114 aa, Homo sapiens; identical to SEQ ID NO: 19993

SEQ ID NO: 19998 - DNA, 2975 bp, Homo sapiens
agaataaggaaggagaagaaggagaggacatggagggaggaagaatgtgaggaggcaggggtgggaggctggggctccccagcattcccgcctccctctgctggtccgtggtgagggaggagtgagggcctcctgtggctgacattcttccagggaactctgcacagtcctgctgatatcatcagtttcttttgctgctgccttgaaaagtaaacaaaaaagggctgcaacactgcaactccatcaggggcatgggaagatgagggtggggatggggtgaaggaacaggaatccaacaaatattaagaggacaaactttggtaggaaaatgatagaccaagcaaagtaaaaggcaaacaactttaatggttattttgctaaagataaaactctgggtggtaaaggaattaaaggcagagtctcaaagagatatttgcacccccgtgtctgtattagcactactcccaatagtcaagaggaagcaagccaagtgttcactgatggaggaacagagtgtggtacgcacatgtaacggaacattccattatatgtataatacaggaaggaaatcctgtcacctgacacaacatggatgaaccttgaggacattatgctaagtgaaataagccagtcacaaaaagacaagtcactgtatgattccacttatatgagatactgagaatagtcaaaaccagagagacagaaagcagaatggtggctgcgggggctgggaggagtgggaattactgtttaatgggtacagtttccattttacaagctgagaagcctatggagatggacggcggtgacggccacacagcattatgaatgtattaacagttaacgttactgaactgtgcacttaaaaatggtgaagacagtatgttttatgagtattttacgacaatttaaaaattaaaagaaaaaaaaccagaacacactaagggttataggcacaaattctccttatgcccaccaccatctcagctggtagtatgacgggtgtagacaccattagaggcaatggtgaatctatggggaaccacccaggaaagtcaccatccaaatgtccacatccctgcttggcaattaaaacgaagacacttttcttcagcacctggtgaagatgtttagtttctagtgctttccaagatccacctcaggagaagtcaatttgtccacaggaagcgtagtttccaaagctgtctacggtgaacctctgagagatgtgaattgaattcagctttagggagccaaagtagaagttctcaaacaactttaaaatatttcggccatcaaatgattctctttccttgaagatatatttgccttccgctgtgtagagattgtacctgccttcagcattggggtctttcctgaatagtgtattcataactgtagcatgcagtttcacactattccactctttcactattagtccagatgcctgaaaacgttccagcactcgatcaactaattcttgtagcctgttggagccatctttcatatggactttggcgtaaagaacatccaccatgccaggatcatcattcatgtattctatccctgccatctccacttctaggggtttacccccagaaatatcattaatgaattcctctttacactgctgtagcatctcacatgtctgctggatctcttcctcactcaaaagcaccaacatcccaatagttagatgaagctttttaggattctggaaaatgctgctgtcaaccccatgatccatggagcacttcgccagtacttcctcctggaatctcaggaatccttcctgaacctcaacttcattgaggaaaaaggcaaggaagtgagtgaagggctgctttcttcgaaaagtgtccaaaagaacatcaatccgtgttcgggctgaaattacaccatttcgatgctggccagtgattacaatttccccgtcttgtccaggtttaggaatgctaatagaagttttggtctccatttctattttcttcctagtgtcccctctctttccaactatatgcttatagagcaagctgggggccctcaaagtagaccggaatccttgtggggtctgctccacctcgtaggcatcacagggctcatcagcacactccatggagccttgatagaagtcctcttcatcttcttcatgttgataggtctgttcttggactggattcttcctgtaattccggccatcaattcttataagctgtggacgcagaacttccatgacactttctccaaatgatattccaattatgcccctgcttcgaggtggtttggagaggaagaggaaagctgtgtctttctgcaatatcgtgagggaagccgaggccctgaatcatcaaagagaaggagaagaggactaggcggctgcaggtgcagtggctcacgcctgtaatcccagcactttgggaggccaaggcaggtggatcacctgaggtcgggagttcaagaccagcctgaccaacatggagaaaccccatctctactagaaatacaaaattagccaggcatggtggtgcatgcctgtaatcccagctactcgggaggctgaagcaggagaatcgcttaaatccgggaggcagaggttgctgtgagccgagatcgcgccatttccagcctgggcaacaagagggaaactccgtctcaaaaaaaaaaaaaaaaaagaagagaaaagaaaacataagtttcagccaggcatgtgaagtaagaactctgctagagaggaaatggctgcttcatcatcatcctcctcagctggtggggtcagtggaagttctgtcactggatctggtttcagtgtctcagaccttgccccaccacggaaagcccttttcacctaccccaaaggagctggagagatgttagaaggtgatctcatgctgctttctgaataattggattcagatctgcaatgcatattaattgtaaagaagctattaagtggattaaagatgagtttgccctga

SEQ ID NO: 19999 - protein, 114 aa, Homo sapiens; identical to SEQ ID NO: 19993

SEQ ID NO: 20000 - DNA, 3250 bp, Homo sapiens
agaataaggaaggagaagaaggagaggacatggagggaggaagaatgtgaggaggcaggggtgggaggctggggctccccagcattcccgcctccctctgctggtccgtggtgagggaggagtgagggcctcctgtggctgacattcttccagggaactctgcacagtcctgctgatatcatcagtttcttttgctgctgccttgaaaagtaaacaaaaaagggctgcaacactgcaactccatcaggggcatgggaagatgagggtggggatggggtgaaggaacaggaatccaacaaatattaagaggacaaactttggtaggaaaatgatagaccaagcaaagtaaaaggcaaacaactttaatggttattttgctaaagataaaactctgggtggtaaaggaattaaaggcagagtctcaaagagatatttgcacccccgtgtctgtattagcactactcccaatagtcaagaggaagcaagccaagtgttcactgatggaggaacagagtgtggtacgcacatgtaacggaacattccattatatgtataatacaggaaggaaatcctgtcacctgacacaacatggatgaaccttgaggacattatgctaagtgaaataagccagtcacaaaaagacaagtcactgtatgattccacttatatgagatactgagaatagtcaaaaccagagagacagaaagcagaatggtggctgcgggggctgggaggagtgggaattactgtttaatgggtacagtttccattttacaagctgagaagcctatggagatggacggcggtgacggccacacagcattatgaatgtattaacagttaacgttactgaactgtgcacttaaaaatggtgaagacagtatgttttatgagtattttacgacaatttaaaaattaaaagaaaaaaaaccagaacacactaagggttataggcacaaattctccttatgcccaccaccatctcagctggtagtatgacgggtgtagacaccattagaggcaatggtgaatctatggggaaccacccaggaaagtcaccatccaaatgtccacatccctgcttggcaattaaaacgaagacacttttcttcagcacctggtgaagatgtttagtttctagtgctttccaagatccacctcaggagaagtcaatttgtccacaggaagcgtagtttccaaagctgtctacggtgaacctctgagagatgtgaattgaattcagctttagggagccaaagtagaagttctcaaacaactttaaaatatttcggccatcaaatgattctctttccttgaagatatatttgccttccgctgtgtagagattgtacctgccttcagcattggggtctttcctgaatagtgtattcataactgtagcatgcagtttcacactattccactctttcactattagtccagatgcctgaaaacgttccagcactcgatcaactaattcttgtagcctgttggagccatctttcatatggactttggcgtaaagaacatccaccatgccaggatcatcattcatgtattctatccctgccatctccacttctaggggtttacccccagaaatatcattaatgaattcctctttacactgctgtagcatctcacatgtctgctggatctcttcctcactcaaaagcaccaacatcccaatagttagatgaagctttttaggattctggaaaatgctgctgtcaaccccatgatccatggagcacttcgccagtacttcctcctggaatctcaggaatccttcctgaacctcaacttcattgaggaaaaaggcaaggaagtgagtgaagggctgctttcttcgaaaagtgtccaaaagaacatcaatccgtgttcgggctgaaattacaccatttcgatgctggccagtgattacaatttccccgtcttgtccaggtttaggaatgctaatagaagttttggtctccatttctattttcttcctagtgtcccctctctttccaactatatgcttatagagcaagctgggggccctcaaagtagaccggaatccttgtggggtctgctccacctcgtaggcatcacagggctcatcagcacactccatggagccttgatagaagtcctcttcatcttcttcatgttgataggtctgttcttggactggattcttcctgtaattccggccatcaattcttataagctgtggacgcagaacttccatgacactttctccaaatgatattccaattatgcccctgcttcgaggtggtttggagaggaagaggaaagctgtgtctttctgcaatatcgtgagggaagccgaggccctgaatcatcaaagagaaggagaagaggactaggcggctgcaggtgcagtggctcacgcctgtaatcccagcactttgggaggccaaggcaggtggatcacctgaggtcgggagttcaagaccagcctgaccaacatggagaaaccccatctctactagaaatacaaaattagccaggcatggtggtgcatgcctgtaatcccagctactcgggaggctgaagcaggagaatcgcttaaatccgggaggcagaggttgctgtgagccgagatcgcgccatttccagcctgggcaacaagagggaaactccgtctcaaaaaaaaaaaaaaaaaagaagagaaaagaaaacataagtttcagccaggcatgtgaagtaagaactctgctagagaggaaatggctgcttcatcatcatcctcctcagctggtggggtcagtggaagttctgtcactggatctggtttcagtgtctcagaccttgccccaccacggaaagcccttttcacctaccccaaaggagctggagagatgttagaagatggctctgagagattcctctgcgaatctgtttttagctatcaagtggcatccacgcttaaacaggtgaaacatgatcagcaagttgctcggatggaaaaactagctggtttggtagaagagctggaggctgacgagtggcggtttaagcccatcgagcagctgctgggattcaccccctcttcaggttgatactgcctggatggtcacctctggtgcgcagcaagtgcaaagccagtgggggactttctcacagcttacatagccatccagagatccacagctacgtcactgaattgttaatgcacatttgtacttggtttctctgtatctattcacaggcaacaaatacttatatgtgtgatctttcaggg

SEQ ID NO: 20001 - protein, 114 aa, Homo sapiens; identical to SEQ ID NO: 19993

SEQ ID NO: 20002 - DNA, 3081 bp, Homo sapiens
agaataaggaaggagaagaaggagaggacatggagggaggaagaatgtgaggaggcaggggtgggaggctggggctccccagcattcccgcctccctctgctggtccgtggtgagggaggagtgagggcctcctgtggctgacattcttccagggaactctgcacagtcctgctgatatcatcagtttcttttgctgctgccttgaaaagtaaacaaaaaagggctgcaacactgcaactccatcaggggcatgggaagatgagggtggggatggggtgaaggaacaggaatccaacaaatattaagaggacaaactttggtaggaaaatgatagaccaagcaaagtaaaaggcaaacaactttaatggttattttgctaaagataaaactctgggtggtaaaggaattaaaggcagagtctcaaagagatatttgcacccccgtgtctgtattagcactactcccaatagtcaagaggaagcaagccaagtgttcactgatggaggaacagagtgtggtacgcacatgtaacggaacattccattatatgtataatacaggaaggaaatcctgtcacctgacacaacatggatgaaccttgaggacattatgctaagtgaaataagccagtcacaaaaagacaagtcactgtatgattccacttatatgagatactgagaatagtcaaaaccagagagacagaaagcagaatggtggctgcgggggctgggaggagtgggaattactgtttaatgggtacagtttccattttacaagctgagaagcctatggagatggacggcggtgacggccacacagcattatgaatgtattaacagttaacgttactgaactgtgcacttaaaaatggtgaagacagtatgttttatgagtattttacgacaatttaaaaattaaaagaaaaaaaaccagaacacactaagggttataggcacaaattctccttatgcccaccaccatctcagctggtagtatgacgggtgtagacaccattagaggcaatggtgaatctatggggaaccacccaggaaagtcaccatccaaatgtccacatccctgcttggcaattaaaacgaagacacttttcttcagcacctggtgaagatgtttagtttctagtgctttccaagatccacctcaggagaagtcaatttgtccacaggaagcgtagtttccaaagctgtctacggtgaacctctgagagatgtgaattgaattcagctttagggagccaaagtagaagttctcaaacaactttaaaatatttcggccatcaaatgattctctttccttgaagatatatttgccttccgctgtgtagagattgtacctgccttcagcattggggtctttcctgaatagtgtattcataactgtagcatgcagtttcacactattccactctttcactattagtccagatgcctgaaaacgttccagcactcgatcaactaattcttgtagcctgttggagccatctttcatatggactttggcgtaaagaacatccaccatgccaggatcatcattcatgtattctatccctgccatctccacttctaggggtttacccccagaaatatcattaatgaattcctctttacactgctgtagcatctcacatgtctgctggatctcttcctcactcaaaagcaccaacatcccaatagttagatgaagctttttaggattctggaaaatgctgctgtcaaccccatgatccatggagcacttcgccagtacttcctcctggaatctcaggaatccttcctgaacctcaacttcattgaggaaaaaggcaaggaagtgagtgaagggctgctttcttcgaaaagtgtccaaaagaacatcaatccgtgttcgggctgaaattacaccatttcgatgctggccagtgattacaatttccccgtcttgtccaggtttaggaatgctaatagaagttttggtctccatttctattttcttcctagtgtcccctctctttccaactatatgcttatagagcaagctgggggccctcaaagtagaccggaatccttgtggggtctgctccacctcgtaggcatcacagggctcatcagcacactccatggagccttgatagaagtcctcttcatcttcttcatgttgataggtctgttcttggactggattcttcctgtaattccggccatcaattcttataagctgtggacgcagaacttccatgacactttctccaaatgatattccaattatgcccctgcttcgaggtggtttggagaggaagaggaaagctgtgtctttctgcaatatcgtgagggaagccgaggccctgaatcatcaaagagaaggagaagaggactaggcggctgcaggtgcagtggctcacgcctgtaatcccagcactttgggaggccaaggcaggtggatcacctgaggtcgggagttcaagaccagcctgaccaacatggagaaaccccatctctactagaaatacaaaattagccaggcatggtggtgcatgcctgtaatcccagctactcgggaggctgaagcaggagaatcgcttaaatccgggaggcagaggttgctgtgagccgagatcgcgccatttccagcctgggcaacaagagggaaactccgtctcaaaaaaaaaaaaaaaaaagaagagaaaagaaaacataagtttcagccaggcatgatggctctgagagattcctctgcgaatctgtttttagctatcaagtggcatccacgcttaaacaggtgaaacatgatcagcaagttgctcggatggaaaaactagctggtttggtagaagagctggaggctgacgagtggcggtttaagcccatcgagcagctgctgggattcaccccctcttcaggttgatactgcctggatggtcacctctggtgcgcagcaagtgcaaagccagtgggggactttctcacagcttacatagccatccagagatccacagctacgtcactgaattgttaatgcacatttgtacttggtttctctgtatctattcacaggcaacaaatacttatatgtgtgatctttcaggg

SEQ ID NO: 20003 - protein, 114 aa, Homo sapiens; identical to SEQ ID NO: 19993

SEQ ID NO: 20004 - DNA, 3175 bp, Homo sapiens
agaataaggaaggagaagaaggagaggacatggagggaggaagaatgtgaggaggcaggggtgggaggctggggctccccagcattcccgcctccctctgctggtccgtggtgagggaggagtgagggcctcctgtggctgacattcttccagggaactctgcacagtcctgctgatatcatcagtttcttttgctgctgccttgaaaagtaaacaaaaaagggctgcaacactgcaactccatcaggggcatgggaagatgagggtggggatggggtgaaggaacaggaatccaacaaatattaagaggacaaactttggtaggaaaatgatagaccaagcaaagtaaaaggcaaacaactttaatggttattttgctaaagataaaactctgggtggtaaaggaattaaaggcagagtctcaaagagatatttgcacccccgtgtctgtattagcactactcccaatagtcaagaggaagcaagccaagtgttcactgatggaggaacagagtgtggtacgcacatgtaacggaacattccattatatgtataatacaggaaggaaatcctgtcacctgacacaacatggatgaaccttgaggacattatgctaagtgaaataagccagtcacaaaaagacaagtcactgtatgattccacttatatgagatactgagaatagtcaaaaccagagagacagaaagcagaatggtggctgcgggggctgggaggagtgggaattactgtttaatgggtacagtttccattttacaagctgagaagcctatggagatggacggcggtgacggccacacagcattatgaatgtattaacagttaacgttactgaactgtgcacttaaaaatggtgaagacagtatgttttatgagtattttacgacaatttaaaaattaaaagaaaaaaaaccagaacacactaagggttataggcacaaattctccttatgcccaccaccatctcagctggtagtatgacgggtgtagacaccattagaggcaatggtgaatctatggggaaccacccaggaaagtcaccatccaaatgtccacatccctgcttggcaattaaaacgaagacacttttcttcagcacctggtgaagatgtttagtttctagtgctttccaagatccacctcaggagaagtcaatttgtccacaggaagcgtagtttccaaagctgtctacggtgaacctctgagagatgtgaattgaattcagctttagggagccaaagtagaagttctcaaacaactttaaaatatttcggccatcaaatgattctctttccttgaagatatatttgccttccgctgtgtagagattgtacctgccttcagcattggggtctttcctgaatagtgtattcataactgtagcatgcagtttcacactattccactctttcactattagtccagatgcctgaaaacgttccagcactcgatcaactaattcttgtagcctgttggagccatctttcatatggactttggcgtaaagaacatccaccatgccaggatcatcattcatgtattctatccctgccatctccacttctaggggtttacccccagaaatatcattaatgaattcctctttacactgctgtagcatctcacatgtctgctggatctcttcctcactcaaaagcaccaacatcccaatagttagatgaagctttttaggattctggaaaatgctgctgtcaaccccatgatccatggagcacttcgccagtacttcctcctggaatctcaggaatccttcctgaacctcaacttcattgaggaaaaaggcaaggaagtgagtgaagggctgctttcttcgaaaagtgtccaaaagaacatcaatccgtgttcgggctgaaattacaccatttcgatgctggccagtgattacaatttccccgtcttgtccaggtttaggaatgctaatagaagttttggtctccatttctattttcttcctagtgtcccctctctttccaactatatgcttatagagcaagctgggggccctcaaagtagaccggaatccttgtggggtctgctccacctcgtaggcatcacagggctcatcagcacactccatggagccttgatagaagtcctcttcatcttcttcatgttgataggtctgttcttggactggattcttcctgtaattccggccatcaattcttataagctgtggacgcagaacttccatgacactttctccaaatgatattccaattatgcccctgcttcgaggtggtttggagaggaagaggaaagctgtgtctttctgcaatatcgtgagggaagccgaggccctgaatcatcaaagagaaggagaagaggactaggcggctgcaggtgcagtggctcacgcctgtaatcccagcactttgggaggccaaggcaggtggatcacctgaggtcgggagttcaagaccagcctgaccaacatggagaaaccccatctctactagaaatacaaaattagccaggcatggtggtgcatgcctgtaatcccagctactcgggaggctgaagcaggagaatcgcttaaatccgggaggcagaggttgctgtgagccgagatcgcgccatttccagcctgggcaacaagagggaaactccgtctcaaaaaaaaaaaaaaaaaagaagagaaaagaaaacataagtttcagccaggcatgtgaagtaagaactctgctagagaggaaatggctgcttcatcatcatcctcctcagctggtggggtcagtggaagttctgtcactggatctggtttcagtgtctcagaccttgccccaccacggaaagcccttttcacctaccccaaaggagctggagagatgttagaagatcagcaagttgctcggatggaaaaactagctggtttggtagaagagctggaggctgacgagtggcggtttaagcccatcgagcagctgctgggattcaccccctcttcaggttgatactgcctggatggtcacctctggtgcgcagcaagtgcaaagccagtgggggactttctcacagcttacatagccatccagagatccacagctacgtcactgaattgttaatgcacatttgtacttggtttctctgtatctattcacaggcaacaaatacttatatgtgtgatctttcaggg

SEQ ID NO: 20005 - protein, 114 aa, Homo sapiens; identical to SEQ ID NO: 19993

SEQ ID NO: 20006 - DNA, 3709 bp, Homo sapiens
agaataaggaaggagaagaaggagaggacatggagggaggaagaatgtgaggaggcaggggtgggaggctggggctccccagcattcccgcctccctctgctggtccgtggtgagggaggagtgagggcctcctgtggctgacattcttccagggaactctgcacagtcctgctgatatcatcagtttcttttgctgctgccttgaaaagtaaacaaaaaagggctgcaacactgcaactccatcaggggcatgggaagatgagggtggggatggggtgaaggaacaggaatccaacaaatattaagaggacaaactttggtaggaaaatgatagaccaagcaaagtaaaaggcaaacaactttaatggttattttgctaaagataaaactctgggtggtaaaggaattaaaggcagagtctcaaagagatatttgcacccccgtgtctgtattagcactactcccaatagtcaagaggaagcaagccaagtgttcactgatggaggaacagagtgtggtacgcacatgtaacggaacattccattatatgtataatacaggaaggaaatcctgtcacctgacacaacatggatgaaccttgaggacattatgctaagtgaaataagccagtcacaaaaagacaagtcactgtatgattccacttatatgagatactgagaatagtcaaaaccagagagacagaaagcagaatggtggctgcgggggctgggaggagtgggaattactgtttaatgggtacagtttccattttacaagctgagaagcctatggagatggacggcggtgacggccacacagcattatgaatgtattaacagttaacgttactgaactgtgcacttaaaaatggtgaagacagtatgttttatgagtattttacgacaatttaaaaattaaaagaaaaaaaaccagaacacactaagggttataggcacaaattctccttatgcccaccaccatctcagctggtagtatgacgggtgtagacaccattagaggcaatggtgaatctatggggaaccacccaggaaagtcaccatccaaatgtccacatccctgcttggcaattaaaacgaagacacttttcttcagcacctggtgaagatgtttagtttctagtgctttccaagatccacctcaggagaagtcaatttgtccacaggaagcgtagtttccaaagctgtctacggtgaacctctgagagatgtgaattgaattcagctttagggagccaaagtagaagttctcaaacaactttaaaatatttcggccatcaaatgattctctttccttgaagatatatttgccttccgctgtgtagagattgtacctgccttcagcattggggtctttcctgaatagtgtattcataactgtagcatgcagtttcacactattccactctttcactattagtccagatgcctgaaaacgttccagcactcgatcaactaattcttgtagcctgttggagccatctttcatatggactttggcgtaaagaacatccaccatgccaggatcatcattcatgtattctatccctgccatctccacttctaggggtttacccccagaaatatcattaatgaattcctctttacactgctgtagcatctcacatgtctgctggatctcttcctcactcaaaagcaccaacatcccaatagttagatgaagctttttaggattctggaaaatgctgctgtcaaccccatgatccatggagcacttcgccagtacttcctcctggaatctcaggaatccttcctgaacctcaacttcattgaggaaaaaggcaaggaagtgagtgaagggctgctttcttcgaaaagtgtccaaaagaacatcaatccgtgttcgggctgaaattacaccatttcgatgctggccagtgattacaatttccccgtcttgtccaggtttaggaatgctaatagaagttttggtctccatttctattttcttcctagtgtcccctctctttccaactatatgcttatagagcaagctgggggccctcaaagtagaccggaatccttgtggggtctgctccacctcgtaggcatcacagggctcatcagcacactccatggagccttgatagaagtcctcttcatcttcttcatgttgataggtctgttcttggactggattcttcctgtaattccggccatcaattcttataagctgtggacgcagaacttccatgacactttctccaaatgatattccaattatgcccctgcttcgaggtggtttggagaggaagaggaaagctgtgtctttctgcaatatcgtgagggaagccgaggccctgaatcatcaaagagaaggagaagaggactaggcggctgcaggtgcagtggctcacgcctgtaatcccagcactttgggaggccaaggcaggtggatcacctgaggtcgggagttcaagaccagcctgaccaacatggagaaaccccatctctactagaaatacaaaattagccaggcatggtggtgcatgcctgtaatcccagctactcgggaggctgaagcaggagaatcgcttaaatccgggaggcagaggttgctgtgagccgagatcgcgccatttccagcctgggcaacaagagggaaactccgtctcaaaaaaaaaaaaaaaaaagaagagaaaagaaaacataagtttcagccaggcatgtgaagtaagaactctgctagagaggaaatggctgcttcatcatcatcctcctcagctggtggggtcagtggaagttctgtcactggatctggtttcagtgtctcagaccttgccccaccacggaaagcccttttcacctaccccaaaggagctggagagatgttagaagatggctctgagagattcctctgcgaatctgtttttagctatcaagtggcatccacgcttaaacaggtgaaacatgatcagcaagttgctcggatggaaaaactagctggtttggtagaagagctggaggctgacgagtggcggtttaagcccatcgagcagctgctgggattcaccccctcttcaggttgatactgcctggatggtcacctctggtgcgcagcaagtgcaaagccagtgggggactttctcacagcttacatagccatccagagatccacagctacgtcactgaattgttaatgcacatttgtacttggtttctctgtatctattcacaggcaacaaatacttatatgtgtgatctttcagggaatgttttgtttatttgtttttaaaagtattgggaatcagattaagacaatcagtttcagagaaccaggaggtttggggttaagagatactcaaaaattttcacaagccaagtagggcatatatcagatttggccaactgaatggcgtctgtcctgtcatccatatggtgcctggaaatatttaccagtcaaggtcaaggtcagcatctgtggttaaaaatatagcattctgacctaaaaaagttattttgcagatgaatgtgttttcaactcaggacctatccaaatgaggaatttttaaatattcttttttttttcctatttttagacatcaattctatagattctgactttttctaacctcttatagacatgccaaatgctggcaaaaagaagtgctttttggatatggcagcacttgtaaaaataaagcagtaagcaaaatccttttaaacacag

SEQ ID NO: 20007 - protein, 114 aa, Homo sapiens; identical to SEQ ID NO: 19993

SEQ ID NO: 20008 - DNA, 3540 bp, Homo sapiens
agaataaggaaggagaagaaggagaggacatggagggaggaagaatgtgaggaggcaggggtgggaggctggggctccccagcattcccgcctccctctgctggtccgtggtgagggaggagtgagggcctcctgtggctgacattcttccagggaactctgcacagtcctgctgatatcatcagtttcttttgctgctgccttgaaaagtaaacaaaaaagggctgcaacactgcaactccatcaggggcatgggaagatgagggtggggatggggtgaaggaacaggaatccaacaaatattaagaggacaaactttggtaggaaaatgatagaccaagcaaagtaaaaggcaaacaactttaatggttattttgctaaagataaaactctgggtggtaaaggaattaaaggcagagtctcaaagagatatttgcacccccgtgtctgtattagcactactcccaatagtcaagaggaagcaagccaagtgttcactgatggaggaacagagtgtggtacgcacatgtaacggaacattccattatatgtataatacaggaaggaaatcctgtcacctgacacaacatggatgaaccttgaggacattatgctaagtgaaataagccagtcacaaaaagacaagtcactgtatgattccacttatatgagatactgagaatagtcaaaaccagagagacagaaagcagaatggtggctgcgggggctgggaggagtgggaattactgtttaatgggtacagtttccattttacaagctgagaagcctatggagatggacggcggtgacggccacacagcattatgaatgtattaacagttaacgttactgaactgtgcacttaaaaatggtgaagacagtatgttttatgagtattttacgacaatttaaaaattaaaagaaaaaaaaccagaacacactaagggttataggcacaaattctccttatgcccaccaccatctcagctggtagtatgacgggtgtagacaccattagaggcaatggtgaatctatggggaaccacccaggaaagtcaccatccaaatgtccacatccctgcttggcaattaaaacgaagacacttttcttcagcacctggtgaagatgtttagtttctagtgctttccaagatccacctcaggagaagtcaatttgtccacaggaagcgtagtttccaaagctgtctacggtgaacctctgagagatgtgaattgaattcagctttagggagccaaagtagaagttctcaaacaactttaaaatatttcggccatcaaatgattctctttccttgaagatatatttgccttccgctgtgtagagattgtacctgccttcagcattggggtctttcctgaatagtgtattcataactgtagcatgcagtttcacactattccactctttcactattagtccagatgcctgaaaacgttccagcactcgatcaactaattcttgtagcctgttggagccatctttcatatggactttggcgtaaagaacatccaccatgccaggatcatcattcatgtattctatccctgccatctccacttctaggggtttacccccagaaatatcattaatgaattcctctttacactgctgtagcatctcacatgtctgctggatctcttcctcactcaaaagcaccaacatcccaatagttagatgaagctttttaggattctggaaaatgctgctgtcaaccccatgatccatggagcacttcgccagtacttcctcctggaatctcaggaatccttcctgaacctcaacttcattgaggaaaaaggcaaggaagtgagtgaagggctgctttcttcgaaaagtgtccaaaagaacatcaatccgtgttcgggctgaaattacaccatttcgatgctggccagtgattacaatttccccgtcttgtccaggtttaggaatgctaatagaagttttggtctccatttctattttcttcctagtgtcccctctctttccaactatatgcttatagagcaagctgggggccctcaaagtagaccggaatccttgtggggtctgctccacctcgtaggcatcacagggctcatcagcacactccatggagccttgatagaagtcctcttcatcttcttcatgttgataggtctgttcttggactggattcttcctgtaattccggccatcaattcttataagctgtggacgcagaacttccatgacactttctccaaatgatattccaattatgcccctgcttcgaggtggtttggagaggaagaggaaagctgtgtctttctgcaatatcgtgagggaagccgaggccctgaatcatcaaagagaaggagaagaggactaggcggctgcaggtgcagtggctcacgcctgtaatcccagcactttgggaggccaaggcaggtggatcacctgaggtcgggagttcaagaccagcctgaccaacatggagaaaccccatctctactagaaatacaaaattagccaggcatggtggtgcatgcctgtaatcccagctactcgggaggctgaagcaggagaatcgcttaaatccgggaggcagaggttgctgtgagccgagatcgcgccatttccagcctgggcaacaagagggaaactccgtctcaaaaaaaaaaaaaaaaaagaagagaaaagaaaacataagtttcagccaggcatgatggctctgagagattcctctgcgaatctgtttttagctatcaagtggcatccacgcttaaacaggtgaaacatgatcagcaagttgctcggatggaaaaactagctggtttggtagaagagctggaggctgacgagtggcggtttaagcccatcgagcagctgctgggattcaccccctcttcaggttgatactgcctggatggtcacctctggtgcgcagcaagtgcaaagccagtgggggactttctcacagcttacatagccatccagagatccacagctacgtcactgaattgttaatgcacatttgtacttggtttctctgtatctattcacaggcaacaaatacttatatgtgtgatctttcagggaatgttttgtttatttgtttttaaaagtattgggaatcagattaagacaatcagtttcagagaaccaggaggtttggggttaagagatactcaaaaattttcacaagccaagtagggcatatatcagatttggccaactgaatggcgtctgtcctgtcatccatatggtgcctggaaatatttaccagtcaaggtcaaggtcagcatctgtggttaaaaatatagcattctgacctaaaaaagttattttgcagatgaatgtgttttcaactcaggacctatccaaatgaggaatttttaaatattcttttttttttcctatttttagacatcaattctatagattctgactttttctaacctcttatagacatgccaaatgctggcaaaaagaagtgctttttggatatggcagcacttgtaaaaataaagcagtaagcaaaatccttttaaacacag

SEQ ID NO: 20009 - protein, 114 aa, Homo sapiens; identical to SEQ ID NO: 19993

SEQ ID NO: 20010 - DNA, 3634 bp, Homo sapiens
agaataaggaaggagaagaaggagaggacatggagggaggaagaatgtgaggaggcaggggtgggaggctggggctccccagcattcccgcctccctctgctggtccgtggtgagggaggagtgagggcctcctgtggctgacattcttccagggaactctgcacagtcctgctgatatcatcagtttcttttgctgctgccttgaaaagtaaacaaaaaagggctgcaacactgcaactccatcaggggcatgggaagatgagggtggggatggggtgaaggaacaggaatccaacaaatattaagaggacaaactttggtaggaaaatgatagaccaagcaaagtaaaaggcaaacaactttaatggttattttgctaaagataaaactctgggtggtaaaggaattaaaggcagagtctcaaagagatatttgcacccccgtgtctgtattagcactactcccaatagtcaagaggaagcaagccaagtgttcactgatggaggaacagagtgtggtacgcacatgtaacggaacattccattatatgtataatacaggaaggaaatcctgtcacctgacacaacatggatgaaccttgaggacattatgctaagtgaaataagccagtcacaaaaagacaagtcactgtatgattccacttatatgagatactgagaatagtcaaaaccagagagacagaaagcagaatggtggctgcgggggctgggaggagtgggaattactgtttaatgggtacagtttccattttacaagctgagaagcctatggagatggacggcggtgacggccacacagcattatgaatgtattaacagttaacgttactgaactgtgcacttaaaaatggtgaagacagtatgttttatgagtattttacgacaatttaaaaattaaaagaaaaaaaaccagaacacactaagggttataggcacaaattctccttatgcccaccaccatctcagctggtagtatgacgggtgtagacaccattagaggcaatggtgaatctatggggaaccacccaggaaagtcaccatccaaatgtccacatccctgcttggcaattaaaacgaagacacttttcttcagcacctggtgaagatgtttagtttctagtgctttccaagatccacctcaggagaagtcaatttgtccacaggaagcgtagtttccaaagctgtctacggtgaacctctgagagatgtgaattgaattcagctttagggagccaaagtagaagttctcaaacaactttaaaatatttcggccatcaaatgattctctttccttgaagatatatttgccttccgctgtgtagagattgtacctgccttcagcattggggtctttcctgaatagtgtattcataactgtagcatgcagtttcacactattccactctttcactattagtccagatgcctgaaaacgttccagcactcgatcaactaattcttgtagcctgttggagccatctttcatatggactttggcgtaaagaacatccaccatgccaggatcatcattcatgtattctatccctgccatctccacttctaggggtttacccccagaaatatcattaatgaattcctctttacactgctgtagcatctcacatgtctgctggatctcttcctcactcaaaagcaccaacatcccaatagttagatgaagctttttaggattctggaaaatgctgctgtcaaccccatgatccatggagcacttcgccagtacttcctcctggaatctcaggaatccttcctgaacctcaacttcattgaggaaaaaggcaaggaagtgagtgaagggctgctttcttcgaaaagtgtccaaaagaacatcaatccgtgttcgggctgaaattacaccatttcgatgctggccagtgattacaatttccccgtcttgtccaggtttaggaatgctaatagaagttttggtctccatttctattttcttcctagtgtcccctctctttccaactatatgcttatagagcaagctgggggccctcaaagtagaccggaatccttgtggggtctgctccacctcgtaggcatcacagggctcatcagcacactccatggagccttgatagaagtcctcttcatcttcttcatgttgataggtctgttcttggactggattcttcctgtaattccggccatcaattcttataagctgtggacgcagaacttccatgacactttctccaaatgatattccaattatgcccctgcttcgaggtggtttggagaggaagaggaaagctgtgtctttctgcaatatcgtgagggaagccgaggccctgaatcatcaaagagaaggagaagaggactaggcggctgcaggtgcagtggctcacgcctgtaatcccagcactttgggaggccaaggcaggtggatcacctgaggtcgggagttcaagaccagcctgaccaacatggagaaaccccatctctactagaaatacaaaattagccaggcatggtggtgcatgcctgtaatcccagctactcgggaggctgaagcaggagaatcgcttaaatccgggaggcagaggttgctgtgagccgagatcgcgccatttccagcctgggcaacaagagggaaactccgtctcaaaaaaaaaaaaaaaaaagaagagaaaagaaaacataagtttcagccaggcatgtgaagtaagaactctgctagagaggaaatggctgcttcatcatcatcctcctcagctggtggggtcagtggaagttctgtcactggatctggtttcagtgtctcagaccttgccccaccacggaaagcccttttcacctaccccaaaggagctggagagatgttagaagatcagcaagttgctcggatggaaaaactagctggtttggtagaagagctggaggctgacgagtggcggtttaagcccatcgagcagctgctgggattcaccccctcttcaggttgatactgcctggatggtcacctctggtgcgcagcaagtgcaaagccagtgggggactttctcacagcttacatagccatccagagatccacagctacgtcactgaattgttaatgcacatttgtacttggtttctctgtatctattcacaggcaacaaatacttatatgtgtgatctttcagggaatgttttgtttatttgtttttaaaagtattgggaatcagattaagacaatcagtttcagagaaccaggaggtttggggttaagagatactcaaaaattttcacaagccaagtagggcatatatcagatttggccaactgaatggcgtctgtcctgtcatccatatggtgcctggaaatatttaccagtcaaggtcaaggtcagcatctgtggttaaaaatatagcattctgacctaaaaaagttattttgcagatgaatgtgttttcaactcaggacctatccaaatgaggaatttttaaatattcttttttttttcctatttttagacatcaattctatagattctgactttttctaacctcttatagacatgccaaatgctggcaaaaagaagtgctttttggatatggcagcacttgtaaaaataaagcagtaagcaaaatccttttaaacacag

SEQ ID NO: 20011 - protein, 114 aa, Homo sapiens; identical to SEQ ID NO: 19993

SEQ ID NO: 20012 - DNA, 3603 bp, Homo sapiens
agaataaggaaggagaagaaggagaggacatggagggaggaagaatgtgaggaggcaggggtgggaggctggggctccccagcattcccgcctccctctgctggtccgtggtgagggaggagtgagggcctcctgtggctgacattcttccagggaactctgcacagtcctgctgatatcatcagtttcttttgctgctgccttgaaaagtaaacaaaaaagggctgcaacactgcaactccatcaggggcatgggaagatgagggtggggatggggtgaaggaacaggaatccaacaaatattaagaggacaaactttggtaggaaaatgatagaccaagcaaagtaaaaggcaaacaactttaatggttattttgctaaagataaaactctgggtggtaaaggaattaaaggcagagtctcaaagagatatttgcacccccgtgtctgtattagcactactcccaatagtcaagaggaagcaagccaagtgttcactgatggaggaacagagtgtggtacgcacatgtaacggaacattccattatatgtataatacaggaaggaaatcctgtcacctgacacaacatggatgaaccttgaggacattatgctaagtgaaataagccagtcacaaaaagacaagtcactgtatgattccacttatatgagatactgagaatagtcaaaaccagagagacagaaagcagaatggtggctgcgggggctgggaggagtgggaattactgtttaatgggtacagtttccattttacaagctgagaagcctatggagatggacggcggtgacggccacacagcattatgaatgtattaacagttaacgttactgaactgtgcacttaaaaatggtgaagacagtatgttttatgagtattttacgacaatttaaaaattaaaagaaaaaaaaccagaacacactaagggttataggcacaaattctccttatgcccaccaccatctcagctggtagtatgacgggtgtagacaccattagaggcaatggtgaatctatggggaaccacccaggaaagtcaccatccaaatgtccacatccctgcttggcaattaaaacgaagacacttttcttcagcacctggtgaagatgtttagtttctagtgctttccaagatccacctcaggagaagtcaatttgtccacaggaagcgtagtttccaaagctgtctacggtgaacctctgagagatgtgaattgaattcagctttagggagccaaagtagaagttctcaaacaactttaaaatatttcggccatcaaatgattctctttccttgaagatatatttgccttccgctgtgtagagattgtacctgccttcagcattggggtctttcctgaatagtgtattcataactgtagcatgcagtttcacactattccactctttcactattagtccagatgcctgaaaacgttccagcactcgatcaactaattcttgtagcctgttggagccatctttcatatggactttggcgtaaagaacatccaccatgccaggatcatcattcatgtattctatccctgccatctccacttctaggggtttacccccagaaatatcattaatgaattcctctttacactgctgtagcatctcacatgtctgctggatctcttcctcactcaaaagcaccaacatcccaatagttagatgaagctttttaggattctggaaaatgctgctgtcaaccccatgatccatggagcacttcgccagtacttcctcctggaatctcaggaatccttcctgaacctcaacttcattgaggaaaaaggcaaggaagtgagtgaagggctgctttcttcgaaaagtgtccaaaagaacatcaatccgtgttcgggctgaaattacaccatttcgatgctggccagtgattacaatttccccgtcttgtccaggtttaggaatgctaatagaagttttggtctccatttctattttcttcctagtgtcccctctctttccaactatatgcttatagagcaagctgggggccctcaaagtagaccggaatccttgtggggtctgctccacctcgtaggcatcacagggctcatcagcacactccatggagccttgatagaagtcctcttcatcttcttcatgttgataggtctgttcttggactggattcttcctgtaattccggccatcaattcttataagctgtggacgcagaacttccatgacactttctccaaatgatattccaattatgcccctgcttcgaggtggtttggagaggaagaggaaagctgtgtctttctgcaatatcgtgagggaagccgaggccctgaatcatcaaagagaaggagaagaggactaggcggctgcaggtgcagtggctcacgcctgtaatcccagcactttgggaggccaaggcaggtggatcacctgaggtcgggagttcaagaccagcctgaccaacatggagaaaccccatctctactagaaatacaaaattagccaggcatggtggtgcatgcctgtaatcccagctactcgggaggctgaagcaggagaatcgcttaaatccgggaggcagaggttgctgtgagccgagatcgcgccatttccagcctgggcaacaagagggaaactccgtctcaaaaaaaaaaaaaaaaaagaagagaaaagaaaacataagtttcagccaggcatgtgaagtaagaactctgctagagaggaaatggctgcttcatcatcatcctcctcagctggtggggtcagtggaagttctgtcactggatctggtttcagtgtctcagaccttgccccaccacggaaagcccttttcacctaccccaaaggagctggagagatgttagaagatggctctgagagattcctctgcgaatctgtttttagctatcaagtggcatccacgcttaaacaggtgaaacatgatcagcaagttgctcggatggaaaaactagctggtgcgcagcaagtgcaaagccagtgggggactttctcacagcttacatagccatccagagatccacagctacgtcactgaattgttaatgcacatttgtacttggtttctctgtatctattcacaggcaacaaatacttatatgtgtgatctttcagggaatgttttgtttatttgtttttaaaagtattgggaatcagattaagacaatcagtttcagagaaccaggaggtttggggttaagagatactcaaaaattttcacaagccaagtagggcatatatcagatttggccaactgaatggcgtctgtcctgtcatccatatggtgcctggaaatatttaccagtcaaggtcaaggtcagcatctgtggttaaaaatatagcattctgacctaaaaaagttattttgcagatgaatgtgttttcaactcaggacctatccaaatgaggaatttttaaatattcttttttttttcctatttttagacatcaattctatagattctgactttttctaacctcttatagacatgccaaatgctggcaaaaagaagtgctttttggatatggcagcacttgtaaaaataaagcagtaagcaaaatccttttaaacacag

SEQ ID NO: 20013 - protein, 114 aa, Homo sapiens; identical to SEQ ID NO: 19993

SEQ ID NO: 20014 - DNA, 3778 bp, Homo sapiens
agaataaggaaggagaagaaggagaggacatggagggaggaagaatgtgaggaggcaggggtgggaggctggggctccccagcattcccgcctccctctgctggtccgtggtgagggaggagtgagggcctcctgtggctgacattcttccagggaactctgcacagtcctgctgatatcatcagtttcttttgctgctgccttgaaaagtaaacaaaaaagggctgcaacactgcaactccatcaggggcatgggaagatgagggtggggatggggtgaaggaacaggaatccaacaaatattaagaggacaaactttggtaggaaaatgatagaccaagcaaagtaaaaggcaaacaactttaatggttattttgctaaagataaaactctgggtggtaaaggaattaaaggcagagtctcaaagagatatttgcacccccgtgtctgtattagcactactcccaatagtcaagaggaagcaagccaagtgttcactgatggaggaacagagtgtggtacgcacatgtaacggaacattccattatatgtataatacaggaaggaaatcctgtcacctgacacaacatggatgaaccttgaggacattatgctaagtgaaataagccagtcacaaaaagacaagtcactgtatgattccacttatatgagatactgagaatagtcaaaaccagagagacagaaagcagaatggtggctgcgggggctgggaggagtgggaattactgtttaatgggtacagtttccattttacaagctgagaagcctatggagatggacggcggtgacggccacacagcattatgaatgtattaacagttaacgttactgaactgtgcacttaaaaatggtgaagacagtatgttttatgagtattttacgacaatttaaaaattaaaagaaaaaaaaccagaacacactaagggttataggcacaaattctccttatgcccaccaccatctcagctggtagtatgacgggtgtagacaccattagaggcaatggtgaatctatggggaaccacccaggaaagtcaccatccaaatgtccacatccctgcttggcaattaaaacgaagacacttttcttcagcacctggtgaagatgtttagtttctagtgctttccaagatccacctcaggagaagtcaatttgtccacaggaagcgtagtttccaaagctgtctacggtgaacctctgagagatgtgaattgaattcagctttagggagccaaagtagaagttctcaaacaactttaaaatatttcggccatcaaatgattctctttccttgaagatatatttgccttccgctgtgtagagattgtacctgccttcagcattggggtctttcctgaatagtgtattcataactgtagcatgcagtttcacactattccactctttcactattagtccagatgcctgaaaacgttccagcactcgatcaactaattcttgtagcctgttggagccatctttcatatggactttggcgtaaagaacatccaccatgccaggatcatcattcatgtattctatccctgccatctccacttctaggggtttacccccagaaatatcattaatgaattcctctttacactgctgtagcatctcacatgtctgctggatctcttcctcactcaaaagcaccaacatcccaatagttagatgaagctttttaggattctggaaaatgctgctgtcaaccccatgatccatggagcacttcgccagtacttcctcctggaatctcaggaatccttcctgaacctcaacttcattgaggaaaaaggcaaggaagtgagtgaagggctgctttcttcgaaaagtgtccaaaagaacatcaatccgtgttcgggctgaaattacaccatttcgatgctggccagtgattacaatttccccgtcttgtccaggtttaggaatgctaatagaagttttggtctccatttctattttcttcctagtgtcccctctctttccaactatatgcttatagagcaagctgggggccctcaaagtagaccggaatccttgtggggtctgctccacctcgtaggcatcacagggctcatcagcacactccatggagccttgatagaagtcctcttcatcttcttcatgttgataggtctgttcttggactggattcttcctgtaattccggccatcaattcttataagctgtggacgcagaacttccatgacactttctccaaatgatattccaattatgcccctgcttcgaggtggtttggagaggaagaggaaagctgtgtctttctgcaatatcgtgagggaagccgaggccctgaatcatcaaagagaaggagaagaggactaggcggctgcaggtgcagtggctcacgcctgtaatcccagcactttgggaggccaaggcaggtggatcacctgaggtcgggagttcaagaccagcctgaccaacatggagaaaccccatctctactagaaatacaaaattagccaggcatggtggtgcatgcctgtaatcccagctactcgggaggctgaagcaggagaatcgcttaaatccgggaggcagaggttgctgtgagccgagatcgcgccatttccagcctgggcaacaagagggaaactccgtctcaaaaaaaaaaaaaaaaaagaagagaaaagaaaacataagtttcagccaggcatgtgaagtaagaactctgctagagaggaaatggctgcttcatcatcatcctcctcagctggtggggtcagtggaagttctgtcactggatctggtttcagtgtctcagaccttgccccaccacggaaagcccttttcacctaccccaaaggagctggagagatgttagaagatggctctgagagattcctctgcgaatctgtttttagctatcaagtggcatccacgcttaaacaggtgaaacatgatcagcaagttgctcggatggaaaaactagctggtttggtagaagagctggaggctgacgagtggcggtttaagcccatcgagcagctgctgggattcaccccctcttcaggttgatactgcctggatggtcacctctggtgcgcagcaagtgcaaagccagtgggggactttctcacagcttacatagccatccagagatccacagctacgtcactgaattgttaatgcacatttgtacttggtttctctgtatctattcacaggcaacaaatacttatatgtgtgatctttcagggaatgttttgtttatttgtttttaaaagtattgggaatcagattaagacaatcagtttcagagaaccaggaggtttggggttaagagatactcaaaaattttcacaagccaagtagggcatatatcagatttggccaactgaatggcgtctgtcctgtcatccatatggtgcctggaaatatttaccagtcaaggtcaaggtcagcatctgtggttaaaaatatagcattctgacctaaaaaagttattttgcagatgaatgtgttttcaactcaggacctatccaaatgaggaatttttaaatattcttttttttttcctatttttagacatcaattctatagattctgactttttctaacctcttatagacatgccaaatgctggcaaaaagaagtgctttttggatatggcagcacttgtaaaaataaagcagtaagcaaaatccttttaaacacagaaatcctgagttcttctcattggtggactcaagcaattctgtagcaaataaatcctttgaaagagctcc

SEQ ID NO: 20015 - protein, 114 aa, Homo sapiens; identical to SEQ ID NO: 19993

SEQ ID NO: 20016 - DNA, 3609 bp, Homo sapiens
agaataaggaaggagaagaaggagaggacatggagggaggaagaatgtgaggaggcaggggtgggaggctggggctccccagcattcccgcctccctctgctggtccgtggtgagggaggagtgagggcctcctgtggctgacattcttccagggaactctgcacagtcctgctgatatcatcagtttcttttgctgctgccttgaaaagtaaacaaaaaagggctgcaacactgcaactccatcaggggcatgggaagatgagggtggggatggggtgaaggaacaggaatccaacaaatattaagaggacaaactttggtaggaaaatgatagaccaagcaaagtaaaaggcaaacaactttaatggttattttgctaaagataaaactctgggtggtaaaggaattaaaggcagagtctcaaagagatatttgcacccccgtgtctgtattagcactactcccaatagtcaagaggaagcaagccaagtgttcactgatggaggaacagagtgtggtacgcacatgtaacggaacattccattatatgtataatacaggaaggaaatcctgtcacctgacacaacatggatgaaccttgaggacattatgctaagtgaaataagccagtcacaaaaagacaagtcactgtatgattccacttatatgagatactgagaatagtcaaaaccagagagacagaaagcagaatggtggctgcgggggctgggaggagtgggaattactgtttaatgggtacagtttccattttacaagctgagaagcctatggagatggacggcggtgacggccacacagcattatgaatgtattaacagttaacgttactgaactgtgcacttaaaaatggtgaagacagtatgttttatgagtattttacgacaatttaaaaattaaaagaaaaaaaaccagaacacactaagggttataggcacaaattctccttatgcccaccaccatctcagctggtagtatgacgggtgtagacaccattagaggcaatggtgaatctatggggaaccacccaggaaagtcaccatccaaatgtccacatccctgcttggcaattaaaacgaagacacttttcttcagcacctggtgaagatgtttagtttctagtgctttccaagatccacctcaggagaagtcaatttgtccacaggaagcgtagtttccaaagctgtctacggtgaacctctgagagatgtgaattgaattcagctttagggagccaaagtagaagttctcaaacaactttaaaatatttcggccatcaaatgattctctttccttgaagatatatttgccttccgctgtgtagagattgtacctgccttcagcattggggtctttcctgaatagtgtattcataactgtagcatgcagtttcacactattccactctttcactattagtccagatgcctgaaaacgttccagcactcgatcaactaattcttgtagcctgttggagccatctttcatatggactttggcgtaaagaacatccaccatgccaggatcatcattcatgtattctatccctgccatctccacttctaggggtttacccccagaaatatcattaatgaattcctctttacactgctgtagcatctcacatgtctgctggatctcttcctcactcaaaagcaccaacatcccaatagttagatgaagctttttaggattctggaaaatgctgctgtcaaccccatgatccatggagcacttcgccagtacttcctcctggaatctcaggaatccttcctgaacctcaacttcattgaggaaaaaggcaaggaagtgagtgaagggctgctttcttcgaaaagtgtccaaaagaacatcaatccgtgttcgggctgaaattacaccatttcgatgctggccagtgattacaatttccccgtcttgtccaggtttaggaatgctaatagaagttttggtctccatttctattttcttcctagtgtcccctctctttccaactatatgcttatagagcaagctgggggccctcaaagtagaccggaatccttgtggggtctgctccacctcgtaggcatcacagggctcatcagcacactccatggagccttgatagaagtcctcttcatcttcttcatgttgataggtctgttcttggactggattcttcctgtaattccggccatcaattcttataagctgtggacgcagaacttccatgacactttctccaaatgatattccaattatgcccctgcttcgaggtggtttggagaggaagaggaaagctgtgtctttctgcaatatcgtgagggaagccgaggccctgaatcatcaaagagaaggagaagaggactaggcggctgcaggtgcagtggctcacgcctgtaatcccagcactttgggaggccaaggcaggtggatcacctgaggtcgggagttcaagaccagcctgaccaacatggagaaaccccatctctactagaaatacaaaattagccaggcatggtggtgcatgcctgtaatcccagctactcgggaggctgaagcaggagaatcgcttaaatccgggaggcagaggttgctgtgagccgagatcgcgccatttccagcctgggcaacaagagggaaactccgtctcaaaaaaaaaaaaaaaaaagaagagaaaagaaaacataagtttcagccaggcatgatggctctgagagattcctctgcgaatctgtttttagctatcaagtggcatccacgcttaaacaggtgaaacatgatcagcaagttgctcggatggaaaaactagctggtttggtagaagagctggaggctgacgagtggcggtttaagcccatcgagcagctgctgggattcaccccctcttcaggttgatactgcctggatggtcacctctggtgcgcagcaagtgcaaagccagtgggggactttctcacagcttacatagccatccagagatccacagctacgtcactgaattgttaatgcacatttgtacttggtttctctgtatctattcacaggcaacaaatacttatatgtgtgatctttcagggaatgttttgtttatttgtttttaaaagtattgggaatcagattaagacaatcagtttcagagaaccaggaggtttggggttaagagatactcaaaaattttcacaagccaagtagggcatatatcagatttggccaactgaatggcgtctgtcctgtcatccatatggtgcctggaaatatttaccagtcaaggtcaaggtcagcatctgtggttaaaaatatagcattctgacctaaaaaagttattttgcagatgaatgtgttttcaactcaggacctatccaaatgaggaatttttaaatattcttttttttttcctatttttagacatcaattctatagattctgactttttctaacctcttatagacatgccaaatgctggcaaaaagaagtgctttttggatatggcagcacttgtaaaaataaagcagtaagcaaaatccttttaaacacagaaatcctgagttcttctcattggtggactcaagcaattctgtagcaaataaatcctttgaaagagctcc

SEQ ID NO: 20017 - protein, 114 aa, Homo sapiens; identical to SEQ ID NO: 19993

SEQ ID NO: 20018 - DNA, 3703 bp, Homo sapiens
agaataaggaaggagaagaaggagaggacatggagggaggaagaatgtgaggaggcaggggtgggaggctggggctccccagcattcccgcctccctctgctggtccgtggtgagggaggagtgagggcctcctgtggctgacattcttccagggaactctgcacagtcctgctgatatcatcagtttcttttgctgctgccttgaaaagtaaacaaaaaagggctgcaacactgcaactccatcaggggcatgggaagatgagggtggggatggggtgaaggaacaggaatccaacaaatattaagaggacaaactttggtaggaaaatgatagaccaagcaaagtaaaaggcaaacaactttaatggttattttgctaaagataaaactctgggtggtaaaggaattaaaggcagagtctcaaagagatatttgcacccccgtgtctgtattagcactactcccaatagtcaagaggaagcaagccaagtgttcactgatggaggaacagagtgtggtacgcacatgtaacggaacattccattatatgtataatacaggaaggaaatcctgtcacctgacacaacatggatgaaccttgaggacattatgctaagtgaaataagccagtcacaaaaagacaagtcactgtatgattccacttatatgagatactgagaatagtcaaaaccagagagacagaaagcagaatggtggctgcgggggctgggaggagtgggaattactgtttaatgggtacagtttccattttacaagctgagaagcctatggagatggacggcggtgacggccacacagcattatgaatgtattaacagttaacgttactgaactgtgcacttaaaaatggtgaagacagtatgttttatgagtattttacgacaatttaaaaattaaaagaaaaaaaaccagaacacactaagggttataggcacaaattctccttatgcccaccaccatctcagctggtagtatgacgggtgtagacaccattagaggcaatggtgaatctatggggaaccacccaggaaagtcaccatccaaatgtccacatccctgcttggcaattaaaacgaagacacttttcttcagcacctggtgaagatgtttagtttctagtgctttccaagatccacctcaggagaagtcaatttgtccacaggaagcgtagtttccaaagctgtctacggtgaacctctgagagatgtgaattgaattcagctttagggagccaaagtagaagttctcaaacaactttaaaatatttcggccatcaaatgattctctttccttgaagatatatttgccttccgctgtgtagagattgtacctgccttcagcattggggtctttcctgaatagtgtattcataactgtagcatgcagtttcacactattccactctttcactattagtccagatgcctgaaaacgttccagcactcgatcaactaattcttgtagcctgttggagccatctttcatatggactttggcgtaaagaacatccaccatgccaggatcatcattcatgtattctatccctgccatctccacttctaggggtttacccccagaaatatcattaatgaattcctctttacactgctgtagcatctcacatgtctgctggatctcttcctcactcaaaagcaccaacatcccaatagttagatgaagctttttaggattctggaaaatgctgctgtcaaccccatgatccatggagcacttcgccagtacttcctcctggaatctcaggaatccttcctgaacctcaacttcattgaggaaaaaggcaaggaagtgagtgaagggctgctttcttcgaaaagtgtccaaaagaacatcaatccgtgttcgggctgaaattacaccatttcgatgctggccagtgattacaatttccccgtcttgtccaggtttaggaatgctaatagaagttttggtctccatttctattttcttcctagtgtcccctctctttccaactatatgcttatagagcaagctgggggccctcaaagtagaccggaatccttgtggggtctgctccacctcgtaggcatcacagggctcatcagcacactccatggagccttgatagaagtcctcttcatcttcttcatgttgataggtctgttcttggactggattcttcctgtaattccggccatcaattcttataagctgtggacgcagaacttccatgacactttctccaaatgatattccaattatgcccctgcttcgaggtggtttggagaggaagaggaaagctgtgtctttctgcaatatcgtgagggaagccgaggccctgaatcatcaaagagaaggagaagaggactaggcggctgcaggtgcagtggctcacgcctgtaatcccagcactttgggaggccaaggcaggtggatcacctgaggtcgggagttcaagaccagcctgaccaacatggagaaaccccatctctactagaaatacaaaattagccaggcatggtggtgcatgcctgtaatcccagctactcgggaggctgaagcaggagaatcgcttaaatccgggaggcagaggttgctgtgagccgagatcgcgccatttccagcctgggcaacaagagggaaactccgtctcaaaaaaaaaaaaaaaaaagaagagaaaagaaaacataagtttcagccaggcatgtgaagtaagaactctgctagagaggaaatggctgcttcatcatcatcctcctcagctggtggggtcagtggaagttctgtcactggatctggtttcagtgtctcagaccttgccccaccacggaaagcccttttcacctaccccaaaggagctggagagatgttagaagatcagcaagttgctcggatggaaaaactagctggtttggtagaagagctggaggctgacgagtggcggtttaagcccatcgagcagctgctgggattcaccccctcttcaggttgatactgcctggatggtcacctctggtgcgcagcaagtgcaaagccagtgggggactttctcacagcttacatagccatccagagatccacagctacgtcactgaattgttaatgcacatttgtacttggtttctctgtatctattcacaggcaacaaatacttatatgtgtgatctttcagggaatgttttgtttatttgtttttaaaagtattgggaatcagattaagacaatcagtttcagagaaccaggaggtttggggttaagagatactcaaaaattttcacaagccaagtagggcatatatcagatttggccaactgaatggcgtctgtcctgtcatccatatggtgcctggaaatatttaccagtcaaggtcaaggtcagcatctgtggttaaaaatatagcattctgacctaaaaaagttattttgcagatgaatgtgttttcaactcaggacctatccaaatgaggaatttttaaatattcttttttttttcctatttttagacatcaattctatagattctgactttttctaacctcttatagacatgccaaatgctggcaaaaagaagtgctttttggatatggcagcacttgtaaaaataaagcagtaagcaaaatccttttaaacacagaaatcctgagttcttctcattggtggactcaagcaattctgtagcaaataaatcctttgaaagagctcc

SEQ ID NO: 20019 - protein, 114 aa, Homo sapiens; identical to SEQ ID NO: 19993

SEQ ID NO: 20020 - DNA, 3672 bp, Homo sapiens
agaataaggaaggagaagaaggagaggacatggagggaggaagaatgtgaggaggcaggggtgggaggctggggctccccagcattcccgcctccctctgctggtccgtggtgagggaggagtgagggcctcctgtggctgacattcttccagggaactctgcacagtcctgctgatatcatcagtttcttttgctgctgccttgaaaagtaaacaaaaaagggctgcaacactgcaactccatcaggggcatgggaagatgagggtggggatggggtgaaggaacaggaatccaacaaatattaagaggacaaactttggtaggaaaatgatagaccaagcaaagtaaaaggcaaacaactttaatggttattttgctaaagataaaactctgggtggtaaaggaattaaaggcagagtctcaaagagatatttgcacccccgtgtctgtattagcactactcccaatagtcaagaggaagcaagccaagtgttcactgatggaggaacagagtgtggtacgcacatgtaacggaacattccattatatgtataatacaggaaggaaatcctgtcacctgacacaacatggatgaaccttgaggacattatgctaagtgaaataagccagtcacaaaaagacaagtcactgtatgattccacttatatgagatactgagaatagtcaaaaccagagagacagaaagcagaatggtggctgcgggggctgggaggagtgggaattactgtttaatgggtacagtttccattttacaagctgagaagcctatggagatggacggcggtgacggccacacagcattatgaatgtattaacagttaacgttactgaactgtgcacttaaaaatggtgaagacagtatgttttatgagtattttacgacaatttaaaaattaaaagaaaaaaaaccagaacacactaagggttataggcacaaattctccttatgcccaccaccatctcagctggtagtatgacgggtgtagacaccattagaggcaatggtgaatctatggggaaccacccaggaaagtcaccatccaaatgtccacatccctgcttggcaattaaaacgaagacacttttcttcagcacctggtgaagatgtttagtttctagtgctttccaagatccacctcaggagaagtcaatttgtccacaggaagcgtagtttccaaagctgtctacggtgaacctctgagagatgtgaattgaattcagctttagggagccaaagtagaagttctcaaacaactttaaaatatttcggccatcaaatgattctctttccttgaagatatatttgccttccgctgtgtagagattgtacctgccttcagcattggggtctttcctgaatagtgtattcataactgtagcatgcagtttcacactattccactctttcactattagtccagatgcctgaaaacgttccagcactcgatcaactaattcttgtagcctgttggagccatctttcatatggactttggcgtaaagaacatccaccatgccaggatcatcattcatgtattctatccctgccatctccacttctaggggtttacccccagaaatatcattaatgaattcctctttacactgctgtagcatctcacatgtctgctggatctcttcctcactcaaaagcaccaacatcccaatagttagatgaagctttttaggattctggaaaatgctgctgtcaaccccatgatccatggagcacttcgccagtacttcctcctggaatctcaggaatccttcctgaacctcaacttcattgaggaaaaaggcaaggaagtgagtgaagggctgctttcttcgaaaagtgtccaaaagaacatcaatccgtgttcgggctgaaattacaccatttcgatgctggccagtgattacaatttccccgtcttgtccaggtttaggaatgctaatagaagttttggtctccatttctattttcttcctagtgtcccctctctttccaactatatgcttatagagcaagctgggggccctcaaagtagaccggaatccttgtggggtctgctccacctcgtaggcatcacagggctcatcagcacactccatggagccttgatagaagtcctcttcatcttcttcatgttgataggtctgttcttggactggattcttcctgtaattccggccatcaattcttataagctgtggacgcagaacttccatgacactttctccaaatgatattccaattatgcccctgcttcgaggtggtttggagaggaagaggaaagctgtgtctttctgcaatatcgtgagggaagccgaggccctgaatcatcaaagagaaggagaagaggactaggcggctgcaggtgcagtggctcacgcctgtaatcccagcactttgggaggccaaggcaggtggatcacctgaggtcgggagttcaagaccagcctgaccaacatggagaaaccccatctctactagaaatacaaaattagccaggcatggtggtgcatgcctgtaatcccagctactcgggaggctgaagcaggagaatcgcttaaatccgggaggcagaggttgctgtgagccgagatcgcgccatttccagcctgggcaacaagagggaaactccgtctcaaaaaaaaaaaaaaaaaagaagagaaaagaaaacataagtttcagccaggcatgtgaagtaagaactctgctagagaggaaatggctgcttcatcatcatcctcctcagctggtggggtcagtggaagttctgtcactggatctggtttcagtgtctcagaccttgccccaccacggaaagcccttttcacctaccccaaaggagctggagagatgttagaagatggctctgagagattcctctgcgaatctgtttttagctatcaagtggcatccacgcttaaacaggtgaaacatgatcagcaagttgctcggatggaaaaactagctggtgcgcagcaagtgcaaagccagtgggggactttctcacagcttacatagccatccagagatccacagctacgtcactgaattgttaatgcacatttgtacttggtttctctgtatctattcacaggcaacaaatacttatatgtgtgatctttcagggaatgttttgtttatttgtttttaaaagtattgggaatcagattaagacaatcagtttcagagaaccaggaggtttggggttaagagatactcaaaaattttcacaagccaagtagggcatatatcagatttggccaactgaatggcgtctgtcctgtcatccatatggtgcctggaaatatttaccagtcaaggtcaaggtcagcatctgtggttaaaaatatagcattctgacctaaaaaagttattttgcagatgaatgtgttttcaactcaggacctatccaaatgaggaatttttaaatattcttttttttttcctatttttagacatcaattctatagattctgactttttctaacctcttatagacatgccaaatgctggcaaaaagaagtgctttttggatatggcagcacttgtaaaaataaagcagtaagcaaaatccttttaaacacagaaatcctgagttcttctcattggtggactcaagcaattctgtagcaaataaatcctttgaaagagctcc

SEQ ID NO: 20021 - protein, 114 aa, Homo sapiens; identical to SEQ ID NO: 19993

SEQ ID NO: 20022 - DNA, 4169 bp, Homo sapiens
agaataaggaaggagaagaaggagaggacatggagggaggaagaatgtgaggaggcaggggtgggaggctggggctccccagcattcccgcctccctctgctggtccgtggtgagggaggagtgagggcctcctgtggctgacattcttccagggaactctgcacagtcctgctgatatcatcagtttcttttgctgctgccttgaaaagtaaacaaaaaagggctgcaacactgcaactccatcaggggcatgggaagatgagggtggggatggggtgaaggaacaggaatccaacaaatattaagaggacaaactttggtaggaaaatgatagaccaagcaaagtaaaaggcaaacaactttaatggttattttgctaaagataaaactctgggtggtaaaggaattaaaggcagagtctcaaagagatatttgcacccccgtgtctgtattagcactactcccaatagtcaagaggaagcaagccaagtgttcactgatggaggaacagagtgtggtacgcacatgtaacggaacattccattatatgtataatacaggaaggaaatcctgtcacctgacacaacatggatgaaccttgaggacattatgctaagtgaaataagccagtcacaaaaagacaagtcactgtatgattccacttatatgagatactgagaatagtcaaaaccagagagacagaaagcagaatggtggctgcgggggctgggaggagtgggaattactgtttaatgggtacagtttccattttacaagctgagaagcctatggagatggacggcggtgacggccacacagcattatgaatgtattaacagttaacgttactgaactgtgcacttaaaaatggtgaagacagtatgttttatgagtattttacgacaatttaaaaattaaaagaaaaaaaaccagaacacactaagggttataggcacaaattctccttatgcccaccaccatctcagctggtagtatgacgggtgtagacaccattagaggcaatggtgaatctatggggaaccacccaggaaagtcaccatccaaatgtccacatccctgcttggcaattaaaacgaagacacttttcttcagcacctggtgaagatgtttagtttctagtgctttccaagatccacctcaggagaagtcaatttgtccacaggaagcgtagtttccaaagctgtctacggtgaacctctgagagatgtgaattgaattcagctttagggagccaaagtagaagttctcaaacaactttaaaatatttcggccatcaaatgattctctttccttgaagatatatttgccttccgctgtgtagagattgtacctgccttcagcattggggtctttcctgaatagtgtattcataactgtagcatgcagtttcacactattccactctttcactattagtccagatgcctgaaaacgttccagcactcgatcaactaattcttgtagcctgttggagccatctttcatatggactttggcgtaaagaacatccaccatgccaggatcatcattcatgtattctatccctgccatctccacttctaggggtttacccccagaaatatcattaatgaattcctctttacactgctgtagcatctcacatgtctgctggatctcttcctcactcaaaagcaccaacatcccaatagttagatgaagctttttaggattctggaaaatgctgctgtcaaccccatgatccatggagcacttcgccagtacttcctcctggaatctcaggaatccttcctgaacctcaacttcattgaggaaaaaggcaaggaagtgagtgaagggctgctttcttcgaaaagtgtccaaaagaacatcaatccgtgttcgggctgaaattacaccatttcgatgctggccagtgattacaatttccccgtcttgtccaggtttaggaatgctaatagaagttttggtctccatttctattttcttcctagtgtcccctctctttccaactatatgcttatagagcaagctgggggccctcaaagtagaccggaatccttgtggggtctgctccacctcgtaggcatcacagggctcatcagcacactccatggagccttgatagaagtcctcttcatcttcttcatgttgataggtctgttcttggactggattcttcctgtaattccggccatcaattcttataagctgtggacgcagaacttccatgacactttctccaaatgatattccaattatgcccctgcttcgaggtggtttggagaggaagaggaaagctgtgtctttctgcaatatcgtgagggaagccgaggccctgaatcatcaaagagaaggagaagaggactaggcggctgcaggtgcagtggctcacgcctgtaatcccagcactttgggaggccaaggcaggtggatcacctgaggtcgggagttcaagaccagcctgaccaacatggagaaaccccatctctactagaaatacaaaattagccaggcatggtggtgcatgcctgtaatcccagctactcgggaggctgaagcaggagaatcgcttaaatccgggaggcagaggttgctgtgagccgagatcgcgccatttccagcctgggcaacaagagggaaactccgtctcaaaaaaaaaaaaaaaaaagaagagaaaagaaaacataagtttcagccaggcatgtgaagtaagaactctgctagagaggaaatggctgcttcatcatcatcctcctcagctggtggggtcagtggaagttctgtcactggatctggtttcagtgtctcagaccttgccccaccacggaaagcccttttcacctaccccaaaggagctggagagatgttagaagatggctctgagagattcctctgcgaatctgtttttagctatcaagtggcatccacgcttaaacaggtgaaacatgatcagcaagttgctcggatggaaaaactagctggtttggtagaagagctggaggctgacgagtggcggtttaagcccatcgagcagctgctgggattcaccccctcttcaggttgatactgcctggatggtcacctctggtgcgcagcaagtgcaaagccagtgggggactttctcacagcttacatagccatccagagatccacagctacgtcactgaattgttaatgcacatttgtacttggtttctctgtatctattcacaggcaacaaatacttatatgtgtgatctttcagggaatgttttgtttatttgtttttaaaagtattgggaatcagattaagacaatcagtttcagagaaccaggaggtttggggttaagagatactcaaaaattttcacaagccaagtagggcatatatcagatttggccaactgaatggcgtctgtcctgtcatccatatggtgcctggaaatatttaccagtcaaggtcaaggtcagcatctgtggttaaaaatatagcattctgacctaaaaaagttattttgcagatgaatgtgttttcaactcaggacctatccaaatgaggaatttttaaatattcttttttttttcctatttttagacatcaattctatagattctgactttttctaacctcttatagacatgccaaatgctggcaaaaagaagtgctttttggatatggcagcacttgtaaaaataaagcagtaagcaaaatccttttaaacacagaaatcctgagttcttctcattggtggactcaagcaattctgtagcaaataaatcctttgaaagagctccaaattggtggcattatcctttcaaaatctcagggatttgggatgaagtgaagaggtcaaattactttttagaagaagggaatctaaaaaccatctctcctaaacaaatggtagactggctttacttaagggatatttgtctttataggagtacataaatttatcttaatgatatttaagtagtttttttttttttttgagacgaagttttgctcttgttgcccaggctgtatcgcaatggcgcgatctctgctcactgcaacatccacctcccaggttcaagcaattctcctgcctcagcctcccaagtagctgggattacaggcacccgccaccacacccagctaattttttgtatatttagtagagacggggtttcaccatgttgacca

SEQ ID NO: 20023 - protein, 114 aa, Homo sapiens; identical to SEQ ID NO: 19993

SEQ ID NO: 20024 - DNA, 4000 bp, Homo sapiens
agaataaggaaggagaagaaggagaggacatggagggaggaagaatgtgaggaggcaggggtgggaggctggggctccccagcattcccgcctccctctgctggtccgtggtgagggaggagtgagggcctcctgtggctgacattcttccagggaactctgcacagtcctgctgatatcatcagtttcttttgctgctgccttgaaaagtaaacaaaaaagggctgcaacactgcaactccatcaggggcatgggaagatgagggtggggatggggtgaaggaacaggaatccaacaaatattaagaggacaaactttggtaggaaaatgatagaccaagcaaagtaaaaggcaaacaactttaatggttattttgctaaagataaaactctgggtggtaaaggaattaaaggcagagtctcaaagagatatttgcacccccgtgtctgtattagcactactcccaatagtcaagaggaagcaagccaagtgttcactgatggaggaacagagtgtggtacgcacatgtaacggaacattccattatatgtataatacaggaaggaaatcctgtcacctgacacaacatggatgaaccttgaggacattatgctaagtgaaataagccagtcacaaaaagacaagtcactgtatgattccacttatatgagatactgagaatagtcaaaaccagagagacagaaagcagaatggtggctgcgggggctgggaggagtgggaattactgtttaatgggtacagtttccattttacaagctgagaagcctatggagatggacggcggtgacggccacacagcattatgaatgtattaacagttaacgttactgaactgtgcacttaaaaatggtgaagacagtatgttttatgagtattttacgacaatttaaaaattaaaagaaaaaaaaccagaacacactaagggttataggcacaaattctccttatgcccaccaccatctcagctggtagtatgacgggtgtagacaccattagaggcaatggtgaatctatggggaaccacccaggaaagtcaccatccaaatgtccacatccctgcttggcaattaaaacgaagacacttttcttcagcacctggtgaagatgtttagtttctagtgctttccaagatccacctcaggagaagtcaatttgtccacaggaagcgtagtttccaaagctgtctacggtgaacctctgagagatgtgaattgaattcagctttagggagccaaagtagaagttctcaaacaactttaaaatatttcggccatcaaatgattctctttccttgaagatatatttgccttccgctgtgtagagattgtacctgccttcagcattggggtctttcctgaatagtgtattcataactgtagcatgcagtttcacactattccactctttcactattagtccagatgcctgaaaacgttccagcactcgatcaactaattcttgtagcctgttggagccatctttcatatggactttggcgtaaagaacatccaccatgccaggatcatcattcatgtattctatccctgccatctccacttctaggggtttacccccagaaatatcattaatgaattcctctttacactgctgtagcatctcacatgtctgctggatctcttcctcactcaaaagcaccaacatcccaatagttagatgaagctttttaggattctggaaaatgctgctgtcaaccccatgatccatggagcacttcgccagtacttcctcctggaatctcaggaatccttcctgaacctcaacttcattgaggaaaaaggcaaggaagtgagtgaagggctgctttcttcgaaaagtgtccaaaagaacatcaatccgtgttcgggctgaaattacaccatttcgatgctggccagtgattacaatttccccgtcttgtccaggtttaggaatgctaatagaagttttggtctccatttctattttcttcctagtgtcccctctctttccaactatatgcttatagagcaagctgggggccctcaaagtagaccggaatccttgtggggtctgctccacctcgtaggcatcacagggctcatcagcacactccatggagccttgatagaagtcctcttcatcttcttcatgttgataggtctgttcttggactggattcttcctgtaattccggccatcaattcttataagctgtggacgcagaacttccatgacactttctccaaatgatattccaattatgcccctgcttcgaggtggtttggagaggaagaggaaagctgtgtctttctgcaatatcgtgagggaagccgaggccctgaatcatcaaagagaaggagaagaggactaggcggctgcaggtgcagtggctcacgcctgtaatcccagcactttgggaggccaaggcaggtggatcacctgaggtcgggagttcaagaccagcctgaccaacatggagaaaccccatctctactagaaatacaaaattagccaggcatggtggtgcatgcctgtaatcccagctactcgggaggctgaagcaggagaatcgcttaaatccgggaggcagaggttgctgtgagccgagatcgcgccatttccagcctgggcaacaagagggaaactccgtctcaaaaaaaaaaaaaaaaaagaagagaaaagaaaacataagtttcagccaggcatgatggctctgagagattcctctgcgaatctgtttttagctatcaagtggcatccacgcttaaacaggtgaaacatgatcagcaagttgctcggatggaaaaactagctggtttggtagaagagctggaggctgacgagtggcggtttaagcccatcgagcagctgctgggattcaccccctcttcaggttgatactgcctggatggtcacctctggtgcgcagcaagtgcaaagccagtgggggactttctcacagcttacatagccatccagagatccacagctacgtcactgaattgttaatgcacatttgtacttggtttctctgtatctattcacaggcaacaaatacttatatgtgtgatctttcagggaatgttttgtttatttgtttttaaaagtattgggaatcagattaagacaatcagtttcagagaaccaggaggtttggggttaagagatactcaaaaattttcacaagccaagtagggcatatatcagatttggccaactgaatggcgtctgtcctgtcatccatatggtgcctggaaatatttaccagtcaaggtcaaggtcagcatctgtggttaaaaatatagcattctgacctaaaaaagttattttgcagatgaatgtgttttcaactcaggacctatccaaatgaggaatttttaaatattcttttttttttcctatttttagacatcaattctatagattctgactttttctaacctcttatagacatgccaaatgctggcaaaaagaagtgctttttggatatggcagcacttgtaaaaataaagcagtaagcaaaatccttttaaacacagaaatcctgagttcttctcattggtggactcaagcaattctgtagcaaataaatcctttgaaagagctccaaattggtggcattatcctttcaaaatctcagggatttgggatgaagtgaagaggtcaaattactttttagaagaagggaatctaaaaaccatctctcctaaacaaatggtagactggctttacttaagggatatttgtctttataggagtacataaatttatcttaatgatatttaagtagtttttttttttttttgagacgaagttttgctcttgttgcccaggctgtatcgcaatggcgcgatctctgctcactgcaacatccacctcccaggttcaagcaattctcctgcctcagcctcccaagtagctgggattacaggcacccgccaccacacccagctaattttttgtatatttagtagagacggggtttcaccatgttgacca

SEQ ID NO: 20025 - protein, 114 aa, Homo sapiens; identical to SEQ ID NO: 19993

SEQ ID NO: 20026 - DNA, 4094 bp, Homo sapiens
agaataaggaaggagaagaaggagaggacatggagggaggaagaatgtgaggaggcaggggtgggaggctggggctccccagcattcccgcctccctctgctggtccgtggtgagggaggagtgagggcctcctgtggctgacattcttccagggaactctgcacagtcctgctgatatcatcagtttcttttgctgctgccttgaaaagtaaacaaaaaagggctgcaacactgcaactccatcaggggcatgggaagatgagggtggggatggggtgaaggaacaggaatccaacaaatattaagaggacaaactttggtaggaaaatgatagaccaagcaaagtaaaaggcaaacaactttaatggttattttgctaaagataaaactctgggtggtaaaggaattaaaggcagagtctcaaagagatatttgcacccccgtgtctgtattagcactactcccaatagtcaagaggaagcaagccaagtgttcactgatggaggaacagagtgtggtacgcacatgtaacggaacattccattatatgtataatacaggaaggaaatcctgtcacctgacacaacatggatgaaccttgaggacattatgctaagtgaaataagccagtcacaaaaagacaagtcactgtatgattccacttatatgagatactgagaatagtcaaaaccagagagacagaaagcagaatggtggctgcgggggctgggaggagtgggaattactgtttaatgggtacagtttccattttacaagctgagaagcctatggagatggacggcggtgacggccacacagcattatgaatgtattaacagttaacgttactgaactgtgcacttaaaaatggtgaagacagtatgttttatgagtattttacgacaatttaaaaattaaaagaaaaaaaaccagaacacactaagggttataggcacaaattctccttatgcccaccaccatctcagctggtagtatgacgggtgtagacaccattagaggcaatggtgaatctatggggaaccacccaggaaagtcaccatccaaatgtccacatccctgcttggcaattaaaacgaagacacttttcttcagcacctggtgaagatgtttagtttctagtgctttccaagatccacctcaggagaagtcaatttgtccacaggaagcgtagtttccaaagctgtctacggtgaacctctgagagatgtgaattgaattcagctttagggagccaaagtagaagttctcaaacaactttaaaatatttcggccatcaaatgattctctttccttgaagatatatttgccttccgctgtgtagagattgtacctgccttcagcattggggtctttcctgaatagtgtattcataactgtagcatgcagtttcacactattccactctttcactattagtccagatgcctgaaaacgttccagcactcgatcaactaattcttgtagcctgttggagccatctttcatatggactttggcgtaaagaacatccaccatgccaggatcatcattcatgtattctatccctgccatctccacttctaggggtttacccccagaaatatcattaatgaattcctctttacactgctgtagcatctcacatgtctgctggatctcttcctcactcaaaagcaccaacatcccaatagttagatgaagctttttaggattctggaaaatgctgctgtcaaccccatgatccatggagcacttcgccagtacttcctcctggaatctcaggaatccttcctgaacctcaacttcattgaggaaaaaggcaaggaagtgagtgaagggctgctttcttcgaaaagtgtccaaaagaacatcaatccgtgttcgggctgaaattacaccatttcgatgctggccagtgattacaatttccccgtcttgtccaggtttaggaatgctaatagaagttttggtctccatttctattttcttcctagtgtcccctctctttccaactatatgcttatagagcaagctgggggccctcaaagtagaccggaatccttgtggggtctgctccacctcgtaggcatcacagggctcatcagcacactccatggagccttgatagaagtcctcttcatcttcttcatgttgataggtctgttcttggactggattcttcctgtaattccggccatcaattcttataagctgtggacgcagaacttccatgacactttctccaaatgatattccaattatgcccctgcttcgaggtggtttggagaggaagaggaaagctgtgtctttctgcaatatcgtgagggaagccgaggccctgaatcatcaaagagaaggagaagaggactaggcggctgcaggtgcagtggctcacgcctgtaatcccagcactttgggaggccaaggcaggtggatcacctgaggtcgggagttcaagaccagcctgaccaacatggagaaaccccatctctactagaaatacaaaattagccaggcatggtggtgcatgcctgtaatcccagctactcgggaggctgaagcaggagaatcgcttaaatccgggaggcagaggttgctgtgagccgagatcgcgccatttccagcctgggcaacaagagggaaactccgtctcaaaaaaaaaaaaaaaaaagaagagaaaagaaaacataagtttcagccaggcatgtgaagtaagaactctgctagagaggaaatggctgcttcatcatcatcctcctcagctggtggggtcagtggaagttctgtcactggatctggtttcagtgtctcagaccttgccccaccacggaaagcccttttcacctaccccaaaggagctggagagatgttagaagatcagcaagttgctcggatggaaaaactagctggtttggtagaagagctggaggctgacgagtggcggtttaagcccatcgagcagctgctgggattcaccccctcttcaggttgatactgcctggatggtcacctctggtgcgcagcaagtgcaaagccagtgggggactttctcacagcttacatagccatccagagatccacagctacgtcactgaattgttaatgcacatttgtacttggtttctctgtatctattcacaggcaacaaatacttatatgtgtgatctttcagggaatgttttgtttatttgtttttaaaagtattgggaatcagattaagacaatcagtttcagagaaccaggaggtttggggttaagagatactcaaaaattttcacaagccaagtagggcatatatcagatttggccaactgaatggcgtctgtcctgtcatccatatggtgcctggaaatatttaccagtcaaggtcaaggtcagcatctgtggttaaaaatatagcattctgacctaaaaaagttattttgcagatgaatgtgttttcaactcaggacctatccaaatgaggaatttttaaatattcttttttttttcctatttttagacatcaattctatagattctgactttttctaacctcttatagacatgccaaatgctggcaaaaagaagtgctttttggatatggcagcacttgtaaaaataaagcagtaagcaaaatccttttaaacacagaaatcctgagttcttctcattggtggactcaagcaattctgtagcaaataaatcctttgaaagagctccaaattggtggcattatcctttcaaaatctcagggatttgggatgaagtgaagaggtcaaattactttttagaagaagggaatctaaaaaccatctctcctaaacaaatggtagactggctttacttaagggatatttgtctttataggagtacataaatttatcttaatgatatttaagtagtttttttttttttttgagacgaagttttgctcttgttgcccaggctgtatcgcaatggcgcgatctctgctcactgcaacatccacctcccaggttcaagcaattctcctgcctcagcctcccaagtagctgggattacaggcacccgccaccacacccagctaattttttgtatatttagtagagacggggtttcaccatgttgacca

SEQ ID NO: 20027 - protein, 114 aa, Homo sapiens; identical to SEQ ID NO: 19993

SEQ ID NO: 20028 - DNA, 4063 bp, Homo sapiens
agaataaggaaggagaagaaggagaggacatggagggaggaagaatgtgaggaggcaggggtgggaggctggggctccccagcattcccgcctccctctgctggtccgtggtgagggaggagtgagggcctcctgtggctgacattcttccagggaactctgcacagtcctgctgatatcatcagtttcttttgctgctgccttgaaaagtaaacaaaaaagggctgcaacactgcaactccatcaggggcatgggaagatgagggtggggatggggtgaaggaacaggaatccaacaaatattaagaggacaaactttggtaggaaaatgatagaccaagcaaagtaaaaggcaaacaactttaatggttattttgctaaagataaaactctgggtggtaaaggaattaaaggcagagtctcaaagagatatttgcacccccgtgtctgtattagcactactcccaatagtcaagaggaagcaagccaagtgttcactgatggaggaacagagtgtggtacgcacatgtaacggaacattccattatatgtataatacaggaaggaaatcctgtcacctgacacaacatggatgaaccttgaggacattatgctaagtgaaataagccagtcacaaaaagacaagtcactgtatgattccacttatatgagatactgagaatagtcaaaaccagagagacagaaagcagaatggtggctgcgggggctgggaggagtgggaattactgtttaatgggtacagtttccattttacaagctgagaagcctatggagatggacggcggtgacggccacacagcattatgaatgtattaacagttaacgttactgaactgtgcacttaaaaatggtgaagacagtatgttttatgagtattttacgacaatttaaaaattaaaagaaaaaaaaccagaacacactaagggttataggcacaaattctccttatgcccaccaccatctcagctggtagtatgacgggtgtagacaccattagaggcaatggtgaatctatggggaaccacccaggaaagtcaccatccaaatgtccacatccctgcttggcaattaaaacgaagacacttttcttcagcacctggtgaagatgtttagtttctagtgctttccaagatccacctcaggagaagtcaatttgtccacaggaagcgtagtttccaaagctgtctacggtgaacctctgagagatgtgaattgaattcagctttagggagccaaagtagaagttctcaaacaactttaaaatatttcggccatcaaatgattctctttccttgaagatatatttgccttccgctgtgtagagattgtacctgccttcagcattggggtctttcctgaatagtgtattcataactgtagcatgcagtttcacactattccactctttcactattagtccagatgcctgaaaacgttccagcactcgatcaactaattcttgtagcctgttggagccatctttcatatggactttggcgtaaagaacatccaccatgccaggatcatcattcatgtattctatccctgccatctccacttctaggggtttacccccagaaatatcattaatgaattcctctttacactgctgtagcatctcacatgtctgctggatctcttcctcactcaaaagcaccaacatcccaatagttagatgaagctttttaggattctggaaaatgctgctgtcaaccccatgatccatggagcacttcgccagtacttcctcctggaatctcaggaatccttcctgaacctcaacttcattgaggaaaaaggcaaggaagtgagtgaagggctgctttcttcgaaaagtgtccaaaagaacatcaatccgtgttcgggctgaaattacaccatttcgatgctggccagtgattacaatttccccgtcttgtccaggtttaggaatgctaatagaagttttggtctccatttctattttcttcctagtgtcccctctctttccaactatatgcttatagagcaagctgggggccctcaaagtagaccggaatccttgtggggtctgctccacctcgtaggcatcacagggctcatcagcacactccatggagccttgatagaagtcctcttcatcttcttcatgttgataggtctgttcttggactggattcttcctgtaattccggccatcaattcttataagctgtggacgcagaacttccatgacactttctccaaatgatattccaattatgcccctgcttcgaggtggtttggagaggaagaggaaagctgtgtctttctgcaatatcgtgagggaagccgaggccctgaatcatcaaagagaaggagaagaggactaggcggctgcaggtgcagtggctcacgcctgtaatcccagcactttgggaggccaaggcaggtggatcacctgaggtcgggagttcaagaccagcctgaccaacatggagaaaccccatctctactagaaatacaaaattagccaggcatggtggtgcatgcctgtaatcccagctactcgggaggctgaagcaggagaatcgcttaaatccgggaggcagaggttgctgtgagccgagatcgcgccatttccagcctgggcaacaagagggaaactccgtctcaaaaaaaaaaaaaaaaaagaagagaaaagaaaacataagtttcagccaggcatgtgaagtaagaactctgctagagaggaaatggctgcttcatcatcatcctcctcagctggtggggtcagtggaagttctgtcactggatctggtttcagtgtctcagaccttgccccaccacggaaagcccttttcacctaccccaaaggagctggagagatgttagaagatggctctgagagattcctctgcgaatctgtttttagctatcaagtggcatccacgcttaaacaggtgaaacatgatcagcaagttgctcggatggaaaaactagctggtgcgcagcaagtgcaaagccagtgggggactttctcacagcttacatagccatccagagatccacagctacgtcactgaattgttaatgcacatttgtacttggtttctctgtatctattcacaggcaacaaatacttatatgtgtgatctttcagggaatgttttgtttatttgtttttaaaagtattgggaatcagattaagacaatcagtttcagagaaccaggaggtttggggttaagagatactcaaaaattttcacaagccaagtagggcatatatcagatttggccaactgaatggcgtctgtcctgtcatccatatggtgcctggaaatatttaccagtcaaggtcaaggtcagcatctgtggttaaaaatatagcattctgacctaaaaaagttattttgcagatgaatgtgttttcaactcaggacctatccaaatgaggaatttttaaatattcttttttttttcctatttttagacatcaattctatagattctgactttttctaacctcttatagacatgccaaatgctggcaaaaagaagtgctttttggatatggcagcacttgtaaaaataaagcagtaagcaaaatccttttaaacacagaaatcctgagttcttctcattggtggactcaagcaattctgtagcaaataaatcctttgaaagagctccaaattggtggcattatcctttcaaaatctcagggatttgggatgaagtgaagaggtcaaattactttttagaagaagggaatctaaaaaccatctctcctaaacaaatggtagactggctttacttaagggatatttgtctttataggagtacataaatttatcttaatgatatttaagtagtttttttttttttttgagacgaagttttgctcttgttgcccaggctgtatcgcaatggcgcgatctctgctcactgcaacatccacctcccaggttcaagcaattctcctgcctcagcctcccaagtagctgggattacaggcacccgccaccacacccagctaattttttgtatatttagtagagacggggtttcaccatgttgacca

SEQ ID NO: 20029 - protein, 114 aa, Homo sapiens; identical to SEQ ID NO: 19993

SEQ ID NO: 20030 - DNA, 3683 bp, Homo sapiens
agaataaggaaggagaagaaggagaggacatggagggaggaagaatgtgaggaggcaggggtgggaggctggggctccccagcattcccgcctccctctgctggtccgtggtgagggaggagtgagggcctcctgtggctgacattcttccagggaactctgcacagtcctgctgatatcatcagtttcttttgctgctgccttgaaaagtaaacaaaaaagggctgcaacactgcaactccatcaggggcatgggaagatgagggtggggatggggtgaaggaacaggaatccaacaaatattaagaggacaaactttggtaggaaaatgatagaccaagcaaagtaaaaggcaaacaactttaatggttattttgctaaagataaaactctgggtggtaaaggaattaaaggcagagtctcaaagagatatttgcacccccgtgtctgtattagcactactcccaatagtcaagaggaagcaagccaagtgttcactgatggaggaacagagtgtggtacgcacatgtaacggaacattccattatatgtataatacaggaaggaaatcctgtcacctgacacaacatggatgaaccttgaggacattatgctaagtgaaataagccagtcacaaaaagacaagtcactgtatgattccacttatatgagatactgagaatagtcaaaaccagagagacagaaagcagaatggtggctgcgggggctgggaggagtgggaattactgtttaatgggtacagtttccattttacaagctgagaagcctatggagatggacggcggtgacggccacacagcattatgaatgtattaacagttaacgttactgaactgtgcacttaaaaatggtgaagacagtatgttttatgagtattttacgacaatttaaaaattaaaagaaaaaaaaccagaacacactaagggttataggcacaaattctccttatgcccaccaccatctcagctggtagtatgacgggtgtagacaccattagaggcaatggtgaatctatggggaaccacccaggaaagtcaccatccaaatgtccacatccctgcttggcaattaaaacgaagacacttttcttcagcacctggtgaagatgtttagtttctagtgctttccaagatccacctcaggagaagtcaatttgtccacaggaagcgtagtttccaaagctgtctacggtgaacctctgagagatgtgaattgaattcagctttagggagccaaagtagaagttctcaaacaactttaaaatatttcggccatcaaatgattctctttccttgaagatatatttgccttccgctgtgtagagattgtacctgccttcagcattggggtctttcctgaatagtgtattcataactgtagcatgcagtttcacactattccactctttcactattagtccagatgcctgaaaacgttccagcactcgatcaactaattcttgtagcctgttggagccatctttcatatggactttggcgtaaagaacatccaccatgccaggatcatcattcatgtattctatccctgccatctccacttctaggggtttacccccagaaatatcattaatgaattcctctttacactgctgtagcatctcacatgtctgctggatctcttcctcactcaaaagcaccaacatcccaatagttagatgaagctttttaggattctggaaaatgctgctgtcaaccccatgatccatggagcacttcgccagtacttcctcctggaatctcaggaatccttcctgaacctcaacttcattgaggaaaaaggcaaggaagtgagtgaagggctgctttcttcgaaaagtgtccaaaagaacatcaatccgtgttcgggctgaaattacaccatttcgatgctggccagtgattacaatttccccgtcttgtccaggtttaggaatgctaatagaagttttggtctccatttctattttcttcctagtgtcccctctctttccaactatatgcttatagagcaagctgggggccctcaaagtagaccggaatccttgtggggtctgctccacctcgtaggcatcacagggctcatcagcacactccatggagccttgatagaagtcctcttcatcttcttcatgttgataggtctgttcttggactggattcttcctgtaattccggccatcaattcttataagctgtggacgcagaacttccatgacactttctccaaatgatattccaattatgcccctgcttcgaggtggtttggagaggaagaggaaagctgtgtctttctgcaatatcgtgagggaagccgaggccctgaatcatcaaagagaaggagaagaggactaggcggctgcaggtgcagtggctcacgcctgtaatcccagcactttgggaggccaaggcaggtggatcacctgaggtcgggagttcaagaccagcctgaccaacatggagaaaccccatctctactagaaatacaaaattagccaggcatggtggtgcatgcctgtaatcccagctactcgggaggctgaagcaggagaatcgcttaaatccgggaggcagaggttgctgtgagccgagatcgcgccatttccagcctgggcaacaagagggaaactccgtctcaaaaaaaaaaaaaaaaaagaagagaaaagaaaacataagtttcagccaggcatgtgaagtaagaactctgctagagaggaaatggctgcttcatcatcatcctcctcagctggtggggtcagtggaagttctgtcactggatctggtttcagtgtctcagaccttgccccaccacggaaagcccttttcacctaccccaaaggagctggagagatgttagaagatggctctgagagattcctctgcgaatctgtttttagctatcaagtggcatccacgcttaaacaggtgaaacatgatcagcaagttgctcggatggaaaaactagctggtttggtagaagagctggaggctgacgagtggcggtttaagcccatcgagcagctgctgggattcaccccctcttcaggttgatactgcctggatggtcacctctggtgcgcagcaagtgcaaagccagtgggggactttctcacagcttacatagccatccagagatccacagctactcaggaggctgaggcagcagaatcgtttgaacccgggaggcggaggttgcagtgagtggagatcgtgcctgtgtgctccagcctgagcaacaagagcgaaactgtctcaaaaaaaagaagaaaataaataaataaaaatcagagcacaagaagtaccagtccaccaactcacattttctatattaataattcttaactaaaagaagttccatattcgacagcattttagttttttaatagtacttattagcatcaaccatcttgataatcaccaagggaaaaattaaaaatacctagactgcaataaacctttaaattggattttcagtgagaatttagaagcaatcactacctttctcgtttcatttgtgtaaccatgcagcataggcactgtgttacatcatctttacgctttggtatttgaacttattacagaattttttctctaaattggatgtttctttatatgaccttggaaactgaagtgatcttagcattaaacaaaaatgctttttgaagc

SEQ ID NO: 20031 - protein, 114 aa, Homo sapiens; identical to SEQ ID NO: 19993

SEQ ID NO: 20032 - DNA, 908 bp, Homo sapiens
ggcacgggcgcgcgcacgccgccttcgccgctggctccgtctgttggggggcgaacacgccgcggtcctcgtcgtgatggctctgagagattcctctgcgaatctgtttttagctatcaagtggcatccacgcttaaacaggtgaaacatgatcagcaagttgctcggatggaaaaactagctggtttggtagaagagctggaggctgacgagtggcggtttaagcccatcgagcagctgctgggattcaccccctcttcaggttgatactgcctggatggtcacctctggtgcgcagcaagtgcaaagccagtgggggactttctcacagcttacatagccatccagagatccacagctacgtcactgaattgttaatgcacatttgtacttggtttctctgtatctattcacaggcaacaaatacttatatgtgtgatctttcagggaatgttttgtttatttgtttttaaaagtattgggaatcagattaagacaatcagtttcagagaaccaggaggtttggggttaagagatactcaaaaattttcacaagccaagtagggcatatatcagatttggccaactgaatggcgtctgtcctgtcatccatatggtgcctggaaatatttaccagtcaaggtcaaggtcagcatctgtggttaaaaatatagcattctgacctaaaaaagttattttgcagatgaatgtgttttcaactcaggacctatccaaatgaggaatttttaaatattcttttttttttcctatttttagacatcaattctatagattctgactttttctaacctcttatagacatgccaaatgctggcaaaaagaagtgctttttggatatggcagcacttgtaaaaataaagcagtaagcaaaatccttttaaacacag

SEQ ID NO: 20033 - protein, 37 aa, Homo sapiens
MFCLFVFKSIGNQIKTISFREPGGLGLRDTQKFSQAK

SEQ ID NO: 20034 - DNA, 977 bp, Homo sapiens
ggcacgggcgcgcgcacgccgccttcgccgctggctccgtctgttggggggcgaacacgccgcggtcctcgtcgtgatggctctgagagattcctctgcgaatctgtttttagctatcaagtggcatccacgcttaaacaggtgaaacatgatcagcaagttgctcggatggaaaaactagctggtttggtagaagagctggaggctgacgagtggcggtttaagcccatcgagcagctgctgggattcaccccctcttcaggttgatactgcctggatggtcacctctggtgcgcagcaagtgcaaagccagtgggggactttctcacagcttacatagccatccagagatccacagctacgtcactgaattgttaatgcacatttgtacttggtttctctgtatctattcacaggcaacaaatacttatatgtgtgatctttcagggaatgttttgtttatttgtttttaaaagtattgggaatcagattaagacaatcagtttcagagaaccaggaggtttggggttaagagatactcaaaaattttcacaagccaagtagggcatatatcagatttggccaactgaatggcgtctgtcctgtcatccatatggtgcctggaaatatttaccagtcaaggtcaaggtcagcatctgtggttaaaaatatagcattctgacctaaaaaagttattttgcagatgaatgtgttttcaactcaggacctatccaaatgaggaatttttaaatattcttttttttttcctatttttagacatcaattctatagattctgactttttctaacctcttatagacatgccaaatgctggcaaaaagaagtgctttttggatatggcagcacttgtaaaaataaagcagtaagcaaaatccttttaaacacagaaatcctgagttcttctcattggtggactcaagcaattctgtagcaaataaatcctttgaaagagctcc

SEQ ID NO: 20035 - protein, 37 aa, Homo sapiens; identical to SEQ ID NO: 20033

SEQ ID NO: 20036 - DNA, 1368 bp, Homo sapiens
ggcacgggcgcgcgcacgccgccttcgccgctggctccgtctgttggggggcgaacacgccgcggtcctcgtcgtgatggctctgagagattcctctgcgaatctgtttttagctatcaagtggcatccacgcttaaacaggtgaaacatgatcagcaagttgctcggatggaaaaactagctggtttggtagaagagctggaggctgacgagtggcggtttaagcccatcgagcagctgctgggattcaccccctcttcaggttgatactgcctggatggtcacctctggtgcgcagcaagtgcaaagccagtgggggactttctcacagcttacatagccatccagagatccacagctacgtcactgaattgttaatgcacatttgtacttggtttctctgtatctattcacaggcaacaaatacttatatgtgtgatctttcagggaatgttttgtttatttgtttttaaaagtattgggaatcagattaagacaatcagtttcagagaaccaggaggtttggggttaagagatactcaaaaattttcacaagccaagtagggcatatatcagatttggccaactgaatggcgtctgtcctgtcatccatatggtgcctggaaatatttaccagtcaaggtcaaggtcagcatctgtggttaaaaatatagcattctgacctaaaaaagttattttgcagatgaatgtgttttcaactcaggacctatccaaatgaggaatttttaaatattcttttttttttcctatttttagacatcaattctatagattctgactttttctaacctcttatagacatgccaaatgctggcaaaaagaagtgctttttggatatggcagcacttgtaaaaataaagcagtaagcaaaatccttttaaacacagaaatcctgagttcttctcattggtggactcaagcaattctgtagcaaataaatcctttgaaagagctccaaattggtggcattatcctttcaaaatctcagggatttgggatgaagtgaagaggtcaaattactttttagaagaagggaatctaaaaaccatctctcctaaacaaatggtagactggctttacttaagggatatttgtctttataggagtacataaatttatcttaatgatatttaagtagtttttttttttttttgagacgaagttttgctcttgttgcccaggctgtatcgcaatggcgcgatctctgctcactgcaacatccacctcccaggttcaagcaattctcctgcctcagcctcccaagtagctgggattacaggcacccgccaccacacccagctaattttttgtatatttagtagagacggggtttcaccatgttgacca

SEQ ID NO: 20037 - protein, 37 aa, Homo sapiens; identical to SEQ ID NO: 20033

SEQ ID NO: 20038 - DNA, 1064 bp, Homo sapiens
gcacgccgccttcgccgctggctccgtctgttggggggcgaacacgccgcggtcctcgtcgtgtgaagtaagaactctgctagagaggaaatggctgcttcatcatcatcctcctcagctggtggggtcagtggaagttctgtcactggatctggtttcagtgtctcagaccttgccccaccacggaaagcccttttcacctaccccaaaggagctggagagatgttagaagatggctctgagagattcctctgcgaatctgtttttagctatcaagtggcatccacgcttaaacaggtgaaacatgatcagcaagttgctcggatggaaaaactagctggtttggtagaagagctggaggctgacgagtggcggtttaagcccatcgagcagctgctgggattcaccccctcttcaggttgatactgcctggatggtcacctctggtgcgcagcaagtgcaaagccagtgggggactttctcacagcttacatagccatccagagatccacagctacgtcactgaattgttaatgcacatttgtacttggtttctctgtatctattcacaggcaacaaatacttatatgtgtgatctttcagggaatgttttgtttatttgtttttaaaagtattgggaatcagattaagacaatcagtttcagagaaccaggaggtttggggttaagagatactcaaaaattttcacaagccaagtagggcatatatcagatttggccaactgaatggcgtctgtcctgtcatccatatggtgcctggaaatatttaccagtcaaggtcaaggtcagcatctgtggttaaaaatatagcattctgacctaaaaaagttattttgcagatgaatgtgttttcaactcaggacctatccaaatgaggaatttttaaatattcttttttttttcctatttttagacatcaattctatagattctgactttttctaacctcttatagacatgccaaatgctggcaaaaagaagtgctttttggatatggcagcacttgtaaaaataaagcagtaagcaaaatccttttaaacacag

SEQ ID NO: 20039 - protein, 110 aa, Homo sapiens; identical to SEQ ID NO: 2517

SEQ ID NO: 20040 - DNA, 1133 bp, Homo sapiens
gcacgccgccttcgccgctggctccgtctgttggggggcgaacacgccgcggtcctcgtcgtgtgaagtaagaactctgctagagaggaaatggctgcttcatcatcatcctcctcagctggtggggtcagtggaagttctgtcactggatctggtttcagtgtctcagaccttgccccaccacggaaagcccttttcacctaccccaaaggagctggagagatgttagaagatggctctgagagattcctctgcgaatctgtttttagctatcaagtggcatccacgcttaaacaggtgaaacatgatcagcaagttgctcggatggaaaaactagctggtttggtagaagagctggaggctgacgagtggcggtttaagcccatcgagcagctgctgggattcaccccctcttcaggttgatactgcctggatggtcacctctggtgcgcagcaagtgcaaagccagtgggggactttctcacagcttacatagccatccagagatccacagctacgtcactgaattgttaatgcacatttgtacttggtttctctgtatctattcacaggcaacaaatacttatatgtgtgatctttcagggaatgttttgtttatttgtttttaaaagtattgggaatcagattaagacaatcagtttcagagaaccaggaggtttggggttaagagatactcaaaaattttcacaagccaagtagggcatatatcagatttggccaactgaatggcgtctgtcctgtcatccatatggtgcctggaaatatttaccagtcaaggtcaaggtcagcatctgtggttaaaaatatagcattctgacctaaaaaagttattttgcagatgaatgtgttttcaactcaggacctatccaaatgaggaatttttaaatattcttttttttttcctatttttagacatcaattctatagattctgactttttctaacctcttatagacatgccaaatgctggcaaaaagaagtgctttttggatatggcagcacttgtaaaaataaagcagtaagcaaaatccttttaaacacagaaatcctgagttcttctcattggtggactcaagcaattctgtagcaaataaatcctttgaaagagctcc

SEQ ID NO: 20041 - protein, 110 aa, Homo sapiens; identical to SEQ ID NO: 2517

SEQ ID NO: 20042 - DNA, 1524 bp, Homo sapiens
gcacgccgccttcgccgctggctccgtctgttggggggcgaacacgccgcggtcctcgtcgtgtgaagtaagaactctgctagagaggaaatggctgcttcatcatcatcctcctcagctggtggggtcagtggaagttctgtcactggatctggtttcagtgtctcagaccttgccccaccacggaaagcccttttcacctaccccaaaggagctggagagatgttagaagatggctctgagagattcctctgcgaatctgtttttagctatcaagtggcatccacgcttaaacaggtgaaacatgatcagcaagttgctcggatggaaaaactagctggtttggtagaagagctggaggctgacgagtggcggtttaagcccatcgagcagctgctgggattcaccccctcttcaggttgatactgcctggatggtcacctctggtgcgcagcaagtgcaaagccagtgggggactttctcacagcttacatagccatccagagatccacagctacgtcactgaattgttaatgcacatttgtacttggtttctctgtatctattcacaggcaacaaatacttatatgtgtgatctttcagggaatgttttgtttatttgtttttaaaagtattgggaatcagattaagacaatcagtttcagagaaccaggaggtttggggttaagagatactcaaaaattttcacaagccaagtagggcatatatcagatttggccaactgaatggcgtctgtcctgtcatccatatggtgcctggaaatatttaccagtcaaggtcaaggtcagcatctgtggttaaaaatatagcattctgacctaaaaaagttattttgcagatgaatgtgttttcaactcaggacctatccaaatgaggaatttttaaatattcttttttttttcctatttttagacatcaattctatagattctgactttttctaacctcttatagacatgccaaatgctggcaaaaagaagtgctttttggatatggcagcacttgtaaaaataaagcagtaagcaaaatccttttaaacacagaaatcctgagttcttctcattggtggactcaagcaattctgtagcaaataaatcctttgaaagagctccaaattggtggcattatcctttcaaaatctcagggatttgggatgaagtgaagaggtcaaattactttttagaagaagggaatctaaaaaccatctctcctaaacaaatggtagactggctttacttaagggatatttgtctttataggagtacataaatttatcttaatgatatttaagtagtttttttttttttttgagacgaagttttgctcttgttgcccaggctgtatcgcaatggcgcgatctctgctcactgcaacatccacctcccaggttcaagcaattctcctgcctcagcctcccaagtagctgggattacaggcacccgccaccacacccagctaattttttgtatatttagtagagacggggtttcaccatgttgacca

SEQ ID NO: 20043 - protein, 110 aa, Homo sapiens; identical to SEQ ID NO: 2517

SEQ ID NO: 20044 - DNA, 598 bp, Homo sapiens
gccttcgccgctggctccgtctgttggggggcgaacacgccgcggtcctcgtcgtgtgaagtaagaactctgctagagaggaaatggctgcttcatcatcatcctcctcagctggtggggtcagtggaagttctgtcactggatctggtttcagtgtctcagaccttgccccaccacggaaagcccttttcacctaccccaaaggagctggagagatgttagaagatggctctgagagattcctctgcgaatctgtttttagctatcaagtggcatccacgcttaaacaggtgaaacatgatcagcaagttgctcggatggaaaaactagctggtttggtagaagagctggaggctgacgagtggcggtttaagcccatcgagcagctgctgggattcaccccctcttcaggttgatactgcctggatggtcacctctggtgcgcagcaagtgcaaagccagtgggggactttctcacagcttacatagccatccagagatccacagctacgtcactgaattgttaatgcacatttgtacttggtttctctgtatctattcacaggcaacaaatacttatatgtgtgatctttcaggg

SEQ ID NO: 20045 - protein, 110 aa, Homo sapiens; identical to SEQ ID NO: 2517

SEQ ID NO: 20046 - DNA, 821 bp, Homo sapiens
gccttcgccgctggctccgtctgttggggggcgaacacgccgcggtcctcgtcgtggtgagcgcagccactcaggctggtcctgggggtggggctgtaggggaaagtgctaaagccgctgaggtgcagtggctcacgcctgtaatcccagcactttgggaggccaaggcaggtggatcacctgaggtcgggagttcaagaccagcctgaccaacatggagaaaccccatctctactagaaatacaaaattagccaggcatggtggtgcatgcctgtaatcccagctactcgggaggctgaagcaggagaatcgcttaaatccgggaggcagaggttgctgtgagccgagatcgcgccatttccagcctgggcaacaagagggaaactccgtctcaaaaaaaaaaaaaaaaaagaagagaaaagaaaacataagtttcagccaggcatgatggctctgagagattcctctgcgaatctgtttttagctatcaagtggcatccacgcttaaacaggtgaaacatgatcagcaagttgctcggatggaaaaactagctggtttggtagaagagctggaggctgacgagtggcggtttaagcccatcgagcagctgctgggattcaccccctcttcaggttgatactgcctggatggtcacctctggtgcgcagcaagtgcaaagccagtgggggactttctcacagcttacatagccatccagagatccacagctacgtcactgaattgttaatgcacatttgtacttggtttctctgtatctattcacaggcaacaaatacttatatgtgtgatctttcaggg

SEQ ID NO: 20047 - protein, 32 aa, Homo sapiens
MEKLAGLVEELEADEWRFKPIEQLLGFTPSSG

SEQ ID NO: 20048 - DNA, 658 bp, Homo sapiens
gccgctggctccgtctgttggggggcgaacacgccgcggtcctcgtcgtggtgagcgcagccactcaggctggtcctgggggtggggctgtaggggaaagtgctaaagccgctgagtgaagtaagaactctgctagagaggaaatggctgcttcatcatcatcctcctcagctggtggggtcagtggaagttctgtcactggatctggtttcagtgtctcagaccttgccccaccacggaaagcccttttcacctaccccaaaggagctggagagatgttagaagatggctctgagagattcctctgcgaatctgtttttagctatcaagtggcatccacgcttaaacaggtgaaacatgatcagcaagttgctcggatggaaaaactagctggtttggtagaagagctggaggctgacgagtggcggtttaagcccatcgagcagctgctgggattcaccccctcttcaggttgatactgcctggatggtcacctctggtgcgcagcaagtgcaaagccagtgggggactttctcacagcttacatagccatccagagatccacagctacgtcactgaattgttaatgcacatttgtacttggtttctctgtatctattcacaggcaacaaatacttatatgtgtgatctttcaggg

SEQ ID NO: 20049 - protein, 110 aa, Homo sapiens; identical to SEQ ID NO: 2517

SEQ ID NO: 20050 - DNA, 976 bp, Homo sapiens
gccgctggctccgtctgttggggggcgaacacgccgcggtcctcgtcgtgtgaagtaagaactctgctagagaggaaatggctgcttcatcatcatcctcctcagctggtggggtcagtggaagttctgtcactggatctggtttcagtgtctcagaccttgccccaccacggaaagcccttttcacctaccccaaaggagctggagagatgttagaagatcagcaagttgctcggatggaaaaactagctggtttggtagaagagctggaggctgacgagtggcggtttaagcccatcgagcagctgctgggattcaccccctcttcaggttgatactgcctggatggtcacctctggtgcgcagcaagtgcaaagccagtgggggactttctcacagcttacatagccatccagagatccacagctacgtcactgaattgttaatgcacatttgtacttggtttctctgtatctattcacaggcaacaaatacttatatgtgtgatctttcagggaatgttttgtttatttgtttttaaaagtattgggaatcagattaagacaatcagtttcagagaaccaggaggtttggggttaagagatactcaaaaattttcacaagccaagtagggcatatatcagatttggccaactgaatggcgtctgtcctgtcatccatatggtgcctggaaatatttaccagtcaaggtcaaggtcagcatctgtggttaaaaatatagcattctgacctaaaaaagttattttgcagatgaatgtgttttcaactcaggacctatccaaatgaggaatttttaaatattcttttttttttcctatttttagacatcaattctatagattctgactttttctaacctcttatagacatgccaaatgctggcaaaaagaagtgctttttggatatggcagcacttgtaaaaataaagcagtaagcaaaatccttttaaacacag

SEQ ID NO: 20051 - protein, 85 aa, Homo sapiens
MAASSSSSSAGGVSGSSVTGSGFSVSDLAPPRKALFTYPKGAGEMLEDQQVARMEKLAGLVEELEADEWRFKPIEQLLGFTPSSG

SEQ ID NO: 20052 - DNA, 1117 bp, Homo sapiens
gccgctggctccgtctgttggggggcgaacacgccgcggtcctcgtcgtggtgagcgcagccactcaggctggtcctgggggtggggctgtaggggaaagtgctaaagccgctgagtgaagtaagaactctgctagagaggaaatggctgcttcatcatcatcctcctcagctggtggggtcagtggaagttctgtcactggatctggtttcagtgtctcagaccttgccccaccacggaaagcccttttcacctaccccaaaggagctggagagatgttagaagatggctctgagagattcctctgcgaatctgtttttagctatcaagtggcatccacgcttaaacaggtgaaacatgatcagcaagttgctcggatggaaaaactagctggtttggtagaagagctggaggctgacgagtggcggtttaagcccatcgagcagctgctgggattcaccccctcttcaggttgatactgcctggatggtcacctctggtgcgcagcaagtgcaaagccagtgggggactttctcacagcttacatagccatccagagatccacagctacgtcactgaattgttaatgcacatttgtacttggtttctctgtatctattcacaggcaacaaatacttatatgtgtgatctttcagggaatgttttgtttatttgtttttaaaagtattgggaatcagattaagacaatcagtttcagagaaccaggaggtttggggttaagagatactcaaaaattttcacaagccaagtagggcatatatcagatttggccaactgaatggcgtctgtcctgtcatccatatggtgcctggaaatatttaccagtcaaggtcaaggtcagcatctgtggttaaaaatatagcattctgacctaaaaaagttattttgcagatgaatgtgttttcaactcaggacctatccaaatgaggaatttttaaatattcttttttttttcctatttttagacatcaattctatagattctgactttttctaacctcttatagacatgccaaatgctggcaaaaagaagtgctttttggatatggcagcacttgtaaaaataaagcagtaagcaaaatccttttaaacacag

SEQ ID NO: 20053 - protein, 110 aa, Homo sapiens; identical to SEQ ID NO: 2517

SEQ ID NO: 20054 - DNA, 1045 bp, Homo sapiens
gccgctggctccgtctgttggggggcgaacacgccgcggtcctcgtcgtgtgaagtaagaactctgctagagaggaaatggctgcttcatcatcatcctcctcagctggtggggtcagtggaagttctgtcactggatctggtttcagtgtctcagaccttgccccaccacggaaagcccttttcacctaccccaaaggagctggagagatgttagaagatcagcaagttgctcggatggaaaaactagctggtttggtagaagagctggaggctgacgagtggcggtttaagcccatcgagcagctgctgggattcaccccctcttcaggttgatactgcctggatggtcacctctggtgcgcagcaagtgcaaagccagtgggggactttctcacagcttacatagccatccagagatccacagctacgtcactgaattgttaatgcacatttgtacttggtttctctgtatctattcacaggcaacaaatacttatatgtgtgatctttcagggaatgttttgtttatttgtttttaaaagtattgggaatcagattaagacaatcagtttcagagaaccaggaggtttggggttaagagatactcaaaaattttcacaagccaagtagggcatatatcagatttggccaactgaatggcgtctgtcctgtcatccatatggtgcctggaaatatttaccagtcaaggtcaaggtcagcatctgtggttaaaaatatagcattctgacctaaaaaagttattttgcagatgaatgtgttttcaactcaggacctatccaaatgaggaatttttaaatattcttttttttttcctatttttagacatcaattctatagattctgactttttctaacctcttatagacatgccaaatgctggcaaaaagaagtgctttttggatatggcagcacttgtaaaaataaagcagtaagcaaaatccttttaaacacagaaatcctgagttcttctcattggtggactcaagcaattctgtagcaaataaatcctttgaaagagctcc

SEQ ID NO: 20055 - protein, 85 aa, Homo sapiens; identical to SEQ ID NO: 20051

SEQ ID NO: 20056 - DNA, 1186 bp, Homo sapiens
gccgctggctccgtctgttggggggcgaacacgccgcggtcctcgtcgtggtgagcgcagccactcaggctggtcctgggggtggggctgtaggggaaagtgctaaagccgctgagtgaagtaagaactctgctagagaggaaatggctgcttcatcatcatcctcctcagctggtggggtcagtggaagttctgtcactggatctggtttcagtgtctcagaccttgccccaccacggaaagcccttttcacctaccccaaaggagctggagagatgttagaagatggctctgagagattcctctgcgaatctgtttttagctatcaagtggcatccacgcttaaacaggtgaaacatgatcagcaagttgctcggatggaaaaactagctggtttggtagaagagctggaggctgacgagtggcggtttaagcccatcgagcagctgctgggattcaccccctcttcaggttgatactgcctggatggtcacctctggtgcgcagcaagtgcaaagccagtgggggactttctcacagcttacatagccatccagagatccacagctacgtcactgaattgttaatgcacatttgtacttggtttctctgtatctattcacaggcaacaaatacttatatgtgtgatctttcagggaatgttttgtttatttgtttttaaaagtattgggaatcagattaagacaatcagtttcagagaaccaggaggtttggggttaagagatactcaaaaattttcacaagccaagtagggcatatatcagatttggccaactgaatggcgtctgtcctgtcatccatatggtgcctggaaatatttaccagtcaaggtcaaggtcagcatctgtggttaaaaatatagcattctgacctaaaaaagttattttgcagatgaatgtgttttcaactcaggacctatccaaatgaggaatttttaaatattcttttttttttcctatttttagacatcaattctatagattctgactttttctaacctcttatagacatgccaaatgctggcaaaaagaagtgctttttggatatggcagcacttgtaaaaataaagcagtaagcaaaatccttttaaacacagaaatcctgagttcttctcattggtggactcaagcaattctgtagcaaataaatcctttgaaagagctcc

SEQ ID NO: 20057 - protein, 110 aa, Homo sapiens; identical to SEQ ID NO: 2517

SEQ ID NO: 20058 - DNA, 1436 bp, Homo sapiens
gccgctggctccgtctgttggggggcgaacacgccgcggtcctcgtcgtgtgaagtaagaactctgctagagaggaaatggctgcttcatcatcatcctcctcagctggtggggtcagtggaagttctgtcactggatctggtttcagtgtctcagaccttgccccaccacggaaagcccttttcacctaccccaaaggagctggagagatgttagaagatcagcaagttgctcggatggaaaaactagctggtttggtagaagagctggaggctgacgagtggcggtttaagcccatcgagcagctgctgggattcaccccctcttcaggttgatactgcctggatggtcacctctggtgcgcagcaagtgcaaagccagtgggggactttctcacagcttacatagccatccagagatccacagctacgtcactgaattgttaatgcacatttgtacttggtttctctgtatctattcacaggcaacaaatacttatatgtgtgatctttcagggaatgttttgtttatttgtttttaaaagtattgggaatcagattaagacaatcagtttcagagaaccaggaggtttggggttaagagatactcaaaaattttcacaagccaagtagggcatatatcagatttggccaactgaatggcgtctgtcctgtcatccatatggtgcctggaaatatttaccagtcaaggtcaaggtcagcatctgtggttaaaaatatagcattctgacctaaaaaagttattttgcagatgaatgtgttttcaactcaggacctatccaaatgaggaatttttaaatattcttttttttttcctatttttagacatcaattctatagattctgactttttctaacctcttatagacatgccaaatgctggcaaaaagaagtgctttttggatatggcagcacttgtaaaaataaagcagtaagcaaaatccttttaaacacagaaatcctgagttcttctcattggtggactcaagcaattctgtagcaaataaatcctttgaaagagctccaaattggtggcattatcctttcaaaatctcagggatttgggatgaagtgaagaggtcaaattactttttagaagaagggaatctaaaaaccatctctcctaaacaaatggtagactggctttacttaagggatatttgtctttataggagtacataaatttatcttaatgatatttaagtagtttttttttttttttgagacgaagttttgctcttgttgcccaggctgtatcgcaatggcgcgatctctgctcactgcaacatccacctcccaggttcaagcaattctcctgcctcagcctcccaagtagctgggattacaggcacccgccaccacacccagctaattttttgtatatttagtagagacggggtttcaccatgttgacca

SEQ ID NO: 20059 - protein, 85 aa, Homo sapiens; identical to SEQ ID NO: 20051

SEQ ID NO: 20060 - DNA, 1577 bp, Homo sapiens
gccgctggctccgtctgttggggggcgaacacgccgcggtcctcgtcgtggtgagcgcagccactcaggctggtcctgggggtggggctgtaggggaaagtgctaaagccgctgagtgaagtaagaactctgctagagaggaaatggctgcttcatcatcatcctcctcagctggtggggtcagtggaagttctgtcactggatctggtttcagtgtctcagaccttgccccaccacggaaagcccttttcacctaccccaaaggagctggagagatgttagaagatggctctgagagattcctctgcgaatctgtttttagctatcaagtggcatccacgcttaaacaggtgaaacatgatcagcaagttgctcggatggaaaaactagctggtttggtagaagagctggaggctgacgagtggcggtttaagcccatcgagcagctgctgggattcaccccctcttcaggttgatactgcctggatggtcacctctggtgcgcagcaagtgcaaagccagtgggggactttctcacagcttacatagccatccagagatccacagctacgtcactgaattgttaatgcacatttgtacttggtttctctgtatctattcacaggcaacaaatacttatatgtgtgatctttcagggaatgttttgtttatttgtttttaaaagtattgggaatcagattaagacaatcagtttcagagaaccaggaggtttggggttaagagatactcaaaaattttcacaagccaagtagggcatatatcagatttggccaactgaatggcgtctgtcctgtcatccatatggtgcctggaaatatttaccagtcaaggtcaaggtcagcatctgtggttaaaaatatagcattctgacctaaaaaagttattttgcagatgaatgtgttttcaactcaggacctatccaaatgaggaatttttaaatattcttttttttttcctatttttagacatcaattctatagattctgactttttctaacctcttatagacatgccaaatgctggcaaaaagaagtgctttttggatatggcagcacttgtaaaaataaagcagtaagcaaaatccttttaaacacagaaatcctgagttcttctcattggtggactcaagcaattctgtagcaaataaatcctttgaaagagctccaaattggtggcattatcctttcaaaatctcagggatttgggatgaagtgaagaggtcaaattactttttagaagaagggaatctaaaaaccatctctcctaaacaaatggtagactggctttacttaagggatatttgtctttataggagtacataaatttatcttaatgatatttaagtagtttttttttttttttgagacgaagttttgctcttgttgcccaggctgtatcgcaatggcgcgatctctgctcactgcaacatccacctcccaggttcaagcaattctcctgcctcagcctcccaagtagctgggattacaggcacccgccaccacacccagctaattttttgtatatttagtagagacggggtttcaccatgttgacca

SEQ ID NO: 20061 - protein, 110 aa, Homo sapiens; identical to SEQ ID NO: 2517

SEQ ID NO: 20062 - DNA, 483 bp, Homo sapiens
ggctccgtctgttggggggcgaacacgccgcggtcctcgtcgtggtgagcgcagccactcaggctggtcctgggggtggggctgtaggggaaagtgctaaagccgctgagatggctctgagagattcctctgcgaatctgtttttagctatcaagtggcatccacgcttaaacaggtgaaacatgatcagcaagttgctcggatggaaaaactagctggtttggtagaagagctggaggctgacgagtggcggtttaagcccatcgagcagctgctgggattcaccccctcttcaggttgatactgcctggatggtcacctctggtgcgcagcaagtgcaaagccagtgggggactttctcacagcttacatagccatccagagatccacagctacgtcactgaattgttaatgcacatttgtacttggtttctctgtatctattcacaggcaacaaatacttatatgtgtgatctttcaggg

SEQ ID NO: 20063 - protein, 32 aa, Homo sapiens; identical to SEQ ID NO: 20047

SEQ ID NO: 20064 - DNA, 942 bp, Homo sapiens
ggctccgtctgttggggggcgaacacgccgcggtcctcgtcgtggtgagcgcagccactcaggctggtcctgggggtggggctgtaggggaaagtgctaaagccgctgagatggctctgagagattcctctgcgaatctgtttttagctatcaagtggcatccacgcttaaacaggtgaaacatgatcagcaagttgctcggatggaaaaactagctggtttggtagaagagctggaggctgacgagtggcggtttaagcccatcgagcagctgctgggattcaccccctcttcaggttgatactgcctggatggtcacctctggtgcgcagcaagtgcaaagccagtgggggactttctcacagcttacatagccatccagagatccacagctacgtcactgaattgttaatgcacatttgtacttggtttctctgtatctattcacaggcaacaaatacttatatgtgtgatctttcagggaatgttttgtttatttgtttttaaaagtattgggaatcagattaagacaatcagtttcagagaaccaggaggtttggggttaagagatactcaaaaattttcacaagccaagtagggcatatatcagatttggccaactgaatggcgtctgtcctgtcatccatatggtgcctggaaatatttaccagtcaaggtcaaggtcagcatctgtggttaaaaatatagcattctgacctaaaaaagttattttgcagatgaatgtgttttcaactcaggacctatccaaatgaggaatttttaaatattcttttttttttcctatttttagacatcaattctatagattctgactttttctaacctcttatagacatgccaaatgctggcaaaaagaagtgctttttggatatggcagcacttgtaaaaataaagcagtaagcaaaatccttttaaacacag

SEQ ID NO: 20065 - protein, 37 aa, Homo sapiens; identical to SEQ ID NO: 20033

SEQ ID NO: 20066 - DNA, 1011 bp, Homo sapiens
ggctccgtctgttggggggcgaacacgccgcggtcctcgtcgtggtgagcgcagccactcaggctggtcctgggggtggggctgtaggggaaagtgctaaagccgctgagatggctctgagagattcctctgcgaatctgtttttagctatcaagtggcatccacgcttaaacaggtgaaacatgatcagcaagttgctcggatggaaaaactagctggtttggtagaagagctggaggctgacgagtggcggtttaagcccatcgagcagctgctgggattcaccccctcttcaggttgatactgcctggatggtcacctctggtgcgcagcaagtgcaaagccagtgggggactttctcacagcttacatagccatccagagatccacagctacgtcactgaattgttaatgcacatttgtacttggtttctctgtatctattcacaggcaacaaatacttatatgtgtgatctttcagggaatgttttgtttatttgtttttaaaagtattgggaatcagattaagacaatcagtttcagagaaccaggaggtttggggttaagagatactcaaaaattttcacaagccaagtagggcatatatcagatttggccaactgaatggcgtctgtcctgtcatccatatggtgcctggaaatatttaccagtcaaggtcaaggtcagcatctgtggttaaaaatatagcattctgacctaaaaaagttattttgcagatgaatgtgttttcaactcaggacctatccaaatgaggaatttttaaatattcttttttttttcctatttttagacatcaattctatagattctgactttttctaacctcttatagacatgccaaatgctggcaaaaagaagtgctttttggatatggcagcacttgtaaaaataaagcagtaagcaaaatccttttaaacacagaaatcctgagttcttctcattggtggactcaagcaattctgtagcaaataaatcctttgaaagagctcc

SEQ ID NO: 20067 - protein, 37 aa, Homo sapiens; identical to SEQ ID NO: 20033

SEQ ID NO: 20068 - DNA, 1402 bp, Homo sapiens
ggctccgtctgttggggggcgaacacgccgcggtcctcgtcgtggtgagcgcagccactcaggctggtcctgggggtggggctgtaggggaaagtgctaaagccgctgagatggctctgagagattcctctgcgaatctgtttttagctatcaagtggcatccacgcttaaacaggtgaaacatgatcagcaagttgctcggatggaaaaactagctggtttggtagaagagctggaggctgacgagtggcggtttaagcccatcgagcagctgctgggattcaccccctcttcaggttgatactgcctggatggtcacctctggtgcgcagcaagtgcaaagccagtgggggactttctcacagcttacatagccatccagagatccacagctacgtcactgaattgttaatgcacatttgtacttggtttctctgtatctattcacaggcaacaaatacttatatgtgtgatctttcagggaatgttttgtttatttgtttttaaaagtattgggaatcagattaagacaatcagtttcagagaaccaggaggtttggggttaagagatactcaaaaattttcacaagccaagtagggcatatatcagatttggccaactgaatggcgtctgtcctgtcatccatatggtgcctggaaatatttaccagtcaaggtcaaggtcagcatctgtggttaaaaatatagcattctgacctaaaaaagttattttgcagatgaatgtgttttcaactcaggacctatccaaatgaggaatttttaaatattcttttttttttcctatttttagacatcaattctatagattctgactttttctaacctcttatagacatgccaaatgctggcaaaaagaagtgctttttggatatggcagcacttgtaaaaataaagcagtaagcaaaatccttttaaacacagaaatcctgagttcttctcattggtggactcaagcaattctgtagcaaataaatcctttgaaagagctccaaattggtggcattatcctttcaaaatctcagggatttgggatgaagtgaagaggtcaaattactttttagaagaagggaatctaaaaaccatctctcctaaacaaatggtagactggctttacttaagggatatttgtctttataggagtacataaatttatcttaatgatatttaagtagtttttttttttttttgagacgaagttttgctcttgttgcccaggctgtatcgcaatggcgcgatctctgctcactgcaacatccacctcccaggttcaagcaattctcctgcctcagcctcccaagtagctgggattacaggcacccgccaccacacccagctaattttttgtatatttagtagagacggggtttcaccatgttgacca

SEQ ID NO: 20069 - protein, 37 aa, Homo sapiens; identical to SEQ ID NO: 20033

SEQ ID NO: 20070 - DNA, 348 bp, Homo sapiens
gcggtcctcgtcgtggtgagcgcagccactcaggctggtcctgggggtggggctgtaggggaaagtgctaaagccgctgagtgaagtaagaactctgctagagaggaaatggctgcttcatcatcatcctcctcagctggtggggtcagtggaagttctgtcactggatctggtttcagtgtctcagaccttgccccaccacggaaagcccttttcacctaccccaaaggagctggagagatgttagaaggtgatctcatgctgctttctgaataattggattcagatctgcaatgcatattaattgtaaagaagctattaagtggattaaagatgagtttgccctga

SEQ ID NO: 20071 - protein, 55 aa, Homo sapiens
MAASSSSSSAGGVSGSSVTGSGFSVSDLAPPRKALFTYPKGAGEMLEGDLMLLSE

SEQ ID NO: 20072 - DNA, 1281 bp, Homo sapiens
tgacttcaaaatataaagtataaagcatttgcaactgaatagagcatttatcagggtgtaggtaaaatagattagagttttaaatcttaggtgagatatataaacagttcaccgtgggttctactctgaactgatgggaaataaagactgagctgctctccaaaagatggctaagttgtctgtatactttatttgaatcccaccaggaattcacttagagatttggacctggtcccttactgcttaagttcaaaaacaattcaaaaacttgtcaggctgtattttgacccagtgtagtccggaagattggatattaatctaactcccaaagttgttgcctctgtggatatgagtacaatttggaaagttatcagagctcagagaaaagaggaagagtgatctaataacaagattgaaaatgtcagctgagcagagtggctcaggcctgtaatcccagcattttgggaggctgaggtgggaggatcacttgagcccaggaattggagacccgcctgagcaacatagtgagacttcctctctacaaaaaataaacaaaattagtggggtgttctggcacgtgcctgtagtcccaactactcgggagactgaggtgagaggataacttgtacccaggaggtcaaggctggagttagccaggatagtgccactgcattccagcctgggaaacatagcgacactctgtctccaaacaaaataaaaaataaaatgtcattaatcaatttgcatttttgctgacagtctagttataatagctgttttaccgttcccataccccacttcactattaatcagtgttacttatagacatgtaatgaaatcagaaaccaagctctgcttctctaacagccttaaatcttcatcacaaaattaagcaaacagaacagccagtatttcaagacatactatatcattttccttactaggaatctggattttatgtatataaatttatatttgtatttcatttcctcacttttttctgttttcaaaaaacattacaggtgtgagccaccgcacccggccattttttctttaaaaaatactaaatacacttgttagagggctgagcgcagtgagactttgggagaccacggtgggagaatcacttgagaccaggagttaaagaccagactggccgggcatgatggctcatgcctgtaatcccagcactttgggaggccgaggcaggcagatcacgaggtcaagagatggagaccatcctggccaacatggcgaaaccctgtctcaactaaaaataca

SEQ ID NO: 20073 - protein, 40 aa, Homo sapiens
MYINLYLYFISSLFSVFKKHYRCEPPHPAIFSLKNTKYTC

SEQ ID NO: 20074 - DNA, 1030 bp, Homo sapiens
gggaaataaagactgagctgctctccaaaagatggctaagttgtctgtatactttatttgaatcccaccaggaattcacttagagatttggacctggtcccttactgcttaagttcaaaaacaattcaaaaacttgtcaggctgtattttgacccagtgtagtccggaagattggatattaatctaactcccaaagttgttgcctctgtggatatgagtacaatttggaaagttatcagagctcagagaaaagaggaagagtgatctaataacaagattgaaaatgtcagctgagcagagtggctcaggcctgtaatcccagcattttgggaggctgaggtgggaggatcacttgagcccaggaattggagacccgcctgagcaacatagtgagacttcctctctacaaaaaataaacaaaattagtggggtgttctggcacgtgcctgtagtcccaactactcgggagactgaggtgagaggataacttgtacccaggaggtcaaggctggagttagccaggatagtgccactgcattccagcctgggaaacatagcgacactctgtctccaaacaaaataaaaaataaaatgtcattaatcaatttgcatttttgctgacagtctagttataatagctgttttaccgttcccataccccacttcactattaatcagtgttacttatagacatgtaatgaaatcagaaaccaagctctgcttctctaacagccttaaatcttcatcacaaaattaagcaaacagaacagccacactttgggaggccaaggcaggcaaatcacctgaggtcaggagtttgagaccagcatggccaacgtggtgaaaccccgtgcctactaaaaatacaaaaattagctgggcatggtggctcatgcctgtaattccagctactcaggaggctgagacaggagaatcgcttgaacctaggagacggaggttgcggtgagccgatatcatgccactgcactctagcgtgggcgacaagagcgagactccgtctcaaaaaatt

SEQ ID NO: 20075 - protein, 39 aa, Homo sapiens
NQKPSSASLTALNLHHKIKQTEQPHFGRPRQANHLRSGV

SEQ ID NO: 20076 - DNA, 1133 bp, Homo sapiens
ctcaggtgacctatccgtctcggcctcccaaagtgctggaattacaggcgtgagccaccgtgcctggccaaaaggttaatttttaatgagaaagccaatatgtatttcctaactagttccccttccctgggaacagaacacagtgttattctggaatgttatttggaaaatattataatttattgttgtggcttgatcaggatgtatccaagaaaaactgtcctatgaagtgtgatgcttttatcctcgtataacttatttcctctgtcaaatttctgccttggcactgccatatcaccccttcataactcataaatcacccacagtcaatcttagttgacataaacagttcgctaatggtaggaattcatgttttaagtagatatactattcttaagcatattttcagttcaaaacctgactgatattttggcctgagacatcaataaaatattgtgaaagtagagagcatagaaaaaaggggagctaactctttacaaaactgtatgctggcccttacagcagctagaatgaaatgttgtcactctcacttccataaacttgccaattgctgtttttctttctctgtagtgaagtaagaactctgctagagaggaaatggctgcttcatcatcatcctcctcagctggtggggtcagtggaagttctgtcactggatctggtttcagtgtctcagaccttgccccaccacggaaagcccttttcacctaccccaaaggagctggagagatgttagaagatggctctgagagattcctctgcgaatctgtttttagctatcaagtggcatccacgcttaaacaggtgaaacatgatcagcaagttgctcggatggaaaaactagctggtttggtagaagagctggaggctgacgagtggcggtttaagcccatcgagcagctgctgggattcaccccctcttcaggttgatactgcctggatggtcacctctggtgcgcagcaagtgcaaagccagtgggggactttctcacagcttacatagccatccagagatccacagctacgtcactgaattgttaatgcacatttgtacttggtttctctgtatctattcacaggcaacaaatacttatatgtgtgatctttcaggg

SEQ ID NO: 20077 - protein, 110 aa, Homo sapiens; identical to SEQ ID NO: 2517

SEQ ID NO: 20078 - DNA, 1592 bp, Homo sapiens
ctcaggtgacctatccgtctcggcctcccaaagtgctggaattacaggcgtgagccaccgtgcctggccaaaaggttaatttttaatgagaaagccaatatgtatttcctaactagttccccttccctgggaacagaacacagtgttattctggaatgttatttggaaaatattataatttattgttgtggcttgatcaggatgtatccaagaaaaactgtcctatgaagtgtgatgcttttatcctcgtataacttatttcctctgtcaaatttctgccttggcactgccatatcaccccttcataactcataaatcacccacagtcaatcttagttgacataaacagttcgctaatggtaggaattcatgttttaagtagatatactattcttaagcatattttcagttcaaaacctgactgatattttggcctgagacatcaataaaatattgtgaaagtagagagcatagaaaaaaggggagctaactctttacaaaactgtatgctggcccttacagcagctagaatgaaatgttgtcactctcacttccataaacttgccaattgctgtttttctttctctgtagtgaagtaagaactctgctagagaggaaatggctgcttcatcatcatcctcctcagctggtggggtcagtggaagttctgtcactggatctggtttcagtgtctcagaccttgccccaccacggaaagcccttttcacctaccccaaaggagctggagagatgttagaagatggctctgagagattcctctgcgaatctgtttttagctatcaagtggcatccacgcttaaacaggtgaaacatgatcagcaagttgctcggatggaaaaactagctggtttggtagaagagctggaggctgacgagtggcggtttaagcccatcgagcagctgctgggattcaccccctcttcaggttgatactgcctggatggtcacctctggtgcgcagcaagtgcaaagccagtgggggactttctcacagcttacatagccatccagagatccacagctacgtcactgaattgttaatgcacatttgtacttggtttctctgtatctattcacaggcaacaaatacttatatgtgtgatctttcagggaatgttttgtttatttgtttttaaaagtattgggaatcagattaagacaatcagtttcagagaaccaggaggtttggggttaagagatactcaaaaattttcacaagccaagtagggcatatatcagatttggccaactgaatggcgtctgtcctgtcatccatatggtgcctggaaatatttaccagtcaaggtcaaggtcagcatctgtggttaaaaatatagcattctgacctaaaaaagttattttgcagatgaatgtgttttcaactcaggacctatccaaatgaggaatttttaaatattcttttttttttcctatttttagacatcaattctatagattctgactttttctaacctcttatagacatgccaaatgctggcaaaaagaagtgctttttggatatggcagcacttgtaaaaataaagcagtaagcaaaatccttttaaacacag

SEQ ID NO: 20079 - protein, 110 aa, Homo sapiens; identical to SEQ ID NO: 2517

SEQ ID NO: 20080 - DNA, 1661 bp, Homo sapiens
ctcaggtgacctatccgtctcggcctcccaaagtgctggaattacaggcgtgagccaccgtgcctggccaaaaggttaatttttaatgagaaagccaatatgtatttcctaactagttccccttccctgggaacagaacacagtgttattctggaatgttatttggaaaatattataatttattgttgtggcttgatcaggatgtatccaagaaaaactgtcctatgaagtgtgatgcttttatcctcgtataacttatttcctctgtcaaatttctgccttggcactgccatatcaccccttcataactcataaatcacccacagtcaatcttagttgacataaacagttcgctaatggtaggaattcatgttttaagtagatatactattcttaagcatattttcagttcaaaacctgactgatattttggcctgagacatcaataaaatattgtgaaagtagagagcatagaaaaaaggggagctaactctttacaaaactgtatgctggcccttacagcagctagaatgaaatgttgtcactctcacttccataaacttgccaattgctgtttttctttctctgtagtgaagtaagaactctgctagagaggaaatggctgcttcatcatcatcctcctcagctggtggggtcagtggaagttctgtcactggatctggtttcagtgtctcagaccttgccccaccacggaaagcccttttcacctaccccaaaggagctggagagatgttagaagatggctctgagagattcctctgcgaatctgtttttagctatcaagtggcatccacgcttaaacaggtgaaacatgatcagcaagttgctcggatggaaaaactagctggtttggtagaagagctggaggctgacgagtggcggtttaagcccatcgagcagctgctgggattcaccccctcttcaggttgatactgcctggatggtcacctctggtgcgcagcaagtgcaaagccagtgggggactttctcacagcttacatagccatccagagatccacagctacgtcactgaattgttaatgcacatttgtacttggtttctctgtatctattcacaggcaacaaatacttatatgtgtgatctttcagggaatgttttgtttatttgtttttaaaagtattgggaatcagattaagacaatcagtttcagagaaccaggaggtttggggttaagagatactcaaaaattttcacaagccaagtagggcatatatcagatttggccaactgaatggcgtctgtcctgtcatccatatggtgcctggaaatatttaccagtcaaggtcaaggtcagcatctgtggttaaaaatatagcattctgacctaaaaaagttattttgcagatgaatgtgttttcaactcaggacctatccaaatgaggaatttttaaatattcttttttttttcctatttttagacatcaattctatagattctgactttttctaacctcttatagacatgccaaatgctggcaaaaagaagtgctttttggatatggcagcacttgtaaaaataaagcagtaagcaaaatccttttaaacacagaaatcctgagttcttctcattggtggactcaagcaattctgtagcaaataaatcctttgaaagagctcc

SEQ ID NO: 20081 - protein, 110 aa, Homo sapiens; identical to SEQ ID NO: 2517

SEQ ID NO: 20082 - DNA, 2052 bp, Homo sapiens
ctcaggtgacctatccgtctcggcctcccaaagtgctggaattacaggcgtgagccaccgtgcctggccaaaaggttaatttttaatgagaaagccaatatgtatttcctaactagttccccttccctgggaacagaacacagtgttattctggaatgttatttggaaaatattataatttattgttgtggcttgatcaggatgtatccaagaaaaactgtcctatgaagtgtgatgcttttatcctcgtataacttatttcctctgtcaaatttctgccttggcactgccatatcaccccttcataactcataaatcacccacagtcaatcttagttgacataaacagttcgctaatggtaggaattcatgttttaagtagatatactattcttaagcatattttcagttcaaaacctgactgatattttggcctgagacatcaataaaatattgtgaaagtagagagcatagaaaaaaggggagctaactctttacaaaactgtatgctggcccttacagcagctagaatgaaatgttgtcactctcacttccataaacttgccaattgctgtttttctttctctgtagtgaagtaagaactctgctagagaggaaatggctgcttcatcatcatcctcctcagctggtggggtcagtggaagttctgtcactggatctggtttcagtgtctcagaccttgccccaccacggaaagcccttttcacctaccccaaaggagctggagagatgttagaagatggctctgagagattcctctgcgaatctgtttttagctatcaagtggcatccacgcttaaacaggtgaaacatgatcagcaagttgctcggatggaaaaactagctggtttggtagaagagctggaggctgacgagtggcggtttaagcccatcgagcagctgctgggattcaccccctcttcaggttgatactgcctggatggtcacctctggtgcgcagcaagtgcaaagccagtgggggactttctcacagcttacatagccatccagagatccacagctacgtcactgaattgttaatgcacatttgtacttggtttctctgtatctattcacaggcaacaaatacttatatgtgtgatctttcagggaatgttttgtttatttgtttttaaaagtattgggaatcagattaagacaatcagtttcagagaaccaggaggtttggggttaagagatactcaaaaattttcacaagccaagtagggcatatatcagatttggccaactgaatggcgtctgtcctgtcatccatatggtgcctggaaatatttaccagtcaaggtcaaggtcagcatctgtggttaaaaatatagcattctgacctaaaaaagttattttgcagatgaatgtgttttcaactcaggacctatccaaatgaggaatttttaaatattcttttttttttcctatttttagacatcaattctatagattctgactttttctaacctcttatagacatgccaaatgctggcaaaaagaagtgctttttggatatggcagcacttgtaaaaataaagcagtaagcaaaatccttttaaacacagaaatcctgagttcttctcattggtggactcaagcaattctgtagcaaataaatcctttgaaagagctccaaattggtggcattatcctttcaaaatctcagggatttgggatgaagtgaagaggtcaaattactttttagaagaagggaatctaaaaaccatctctcctaaacaaatggtagactggctttacttaagggatatttgtctttataggagtacataaatttatcttaatgatatttaagtagtttttttttttttttgagacgaagttttgctcttgttgcccaggctgtatcgcaatggcgcgatctctgctcactgcaacatccacctcccaggttcaagcaattctcctgcctcagcctcccaagtagctgggattacaggcacccgccaccacacccagctaattttttgtatatttagtagagacggggtttcaccatgttgacca

SEQ ID NO: 20083 - protein, 110 aa, Homo sapiens; identical to SEQ ID NO: 2517

SEQ ID NO: 20084 - DNA, 1516 bp, Homo sapiens
aatactcaagttagtatcactgagtctggttagaagtagtgaacaattggggccctgttaccatatttggtgctaaaactatattatgacttcatttatatgcagcaaagacctagtattaaggaagtttcccacaaaacaaatcaaaaatgggagacacttaaattgcttaatgagttttatagcagcagaagaatccatattcaacaatggagctctaagattaaagtcatttaaattctagctataagaggaatttaatacaggaggtacctccacagtctcaaagctatcagcattctttgtcagtatacatcaaattatgtggagatattgaagaagaaaggcttctgagattagtctgaatgttgatgttctaacgagttatagatctatccatttttattccatctcaatatgcttcatggagaaatgtgttgtgtttctgttgtaggatacatttatattaagtataaatacacagtgcacagttttgattgtgtttcttacatttcaagttttaccaataatcttaaatcttaaaaagattaagataatctttaaaaatctaaaatcttaagaatataaagagtattacacttaaagactgaaaaataatgtagagatggcaacccctaaacccatttaatattcttggtcaaatcaagaatattaaattgagaagagtactctgaaatgtaaggatgttggatttggaagcattttctaccatgtttataggtgatactattctattatacaataaatctaacacacatgtacctgaccaataatagtttaatagaatatgaaaatagaggccgggcacggtgcctcacgcctgtaatcccagcactttgggaggccgaggtgggcggatcacctgaggtcaggagttcgagaccagcctgaccaatatggtgaaaccccacctctactaaaaatacaaaaaaaaaaaaaaaaaggcatcgtggtgtgtgcctatagtcccactactcaggaggctgaggcagcagaatcgtttgaacccgggaggcggaggttgcagtgagtggagatcgtgcctgtgtgctccagcctgagcaacaagagcgaaactgtctcaaaaaaaagaagaaaataaataaataaaaatcagagcacaagaagtaccagtccaccaactcacattttctatattaataattcttaactaaaagaagttccatattcgacagcattttagttttttaatagtacttattagcatcaaccatcttgataatcaccaagggaaaaattaaaaatacctagactgcaataaacctttaaattggattttcagtgagaatttagaagcaatcactacctttctcgtttcatttgtgtaaccatgcagcataggcactgtgttacatcatctttacgctttggtatttgaacttattacagaattttttctctaaattggatgtttctttatatgaccttggaaactgaagtgatcttagcattaaacaaaaatgctttttgaagc

SEQ ID NO: 20085 - protein, 52 aa, Homo sapiens
MTSFICSKDLVLRKFPTKQIKNGRHLNCLMSFIAAEESIFNNGALRLKSFKF

SEQ ID NO: 20086 - DNA, 1148 bp, Homo sapiens
aaaatcaaatgtttctacgtgagctgtaaatttttgagaatatgttttgctgtatcagcccttgcctgacaaggaataacatgaactagcttatgtttcatgatcatcttccaagtgctgtggcaactgagttggccacttcttgttggcagttcttggcaccagtacaattctaggttctgaacttgcaccatactcttatcgtcatccaaattgcagtgttttggttcagttggaaaatcaaggttacagtttgcgttcacagaatgaaatttcccagcagtgttctgtgattgtcagagtgatgtaatttgatatattaaaaatcaacaattttttcctcagctttgttttttagactgaaaatgatttggagttttggtgaacctttatattttgacactacaggagccagccacaaggccaaatgtgtcagctgccagtgtttgcttgacatacaggagaacattaaggaactctcaggttgggaggagggaagtgttgaccaggacatcagacggaggtttcttgtttttgtttttttaaacactatttttaaactcttaagtagagggactattttaatattctaggtatagaataaatagcttttataacagtcttagttctaaatgaagcagaacccgtctttgtaaacactgagaactagaccctgaatgtacaagcagggaaaagaatagacaagtttacttggtttatcagaagccataaaacctttagagcagattaaaaccttttctccttttgtttgtagatggctctgagagattcctctgcgaatctgtttttagctatcaagtggcatccacgcttaaacaggtgaaacatgatcagcaagttgctcggatggaaaaactagctggtttggtagaagagctggaggctgacgagtggcggtttaagcccatcgagcagctgctgggattcaccccctcttcaggttgatactgcctggatggtcacctctggtgcgcagcaagtgcaaagccagtgggggactttctcacagcttacatagccatccagagatccacagctacgtcactgaattgttaatgcacatttgtacttggtttctctgtatctattcacaggcaacaaatacttatatgtgtgatctttcaggg

SEQ ID NO: 20087 - protein, 75 aa, Homo sapiens
MIWSFGEPLYFDTTGASHKAKCVSCQCLLDIQENIKELSGWEEGSVDQDIRRRFLVFVFLNTIFKLLSRGTILIF

SEQ ID NO: 20088 - DNA, 2196 bp, Homo sapiens
aaaatcaaatgtttctacgtgagctgtaaatttttgagaatatgttttgctgtatcagcccttgcctgacaaggaataacatgaactagcttatgtttcatgatcatcttccaagtgctgtggcaactgagttggccacttcttgttggcagttcttggcaccagtacaattctaggttctgaacttgcaccatactcttatcgtcatccaaattgcagtgttttggttcagttggaaaatcaaggttacagtttgcgttcacagaatgaaatttcccagcagtgttctgtgattgtcagagtgatgtaatttgatatattaaaaatcaacaattttttcctcagctttgttttttagactgaaaatgatttggagttttggtgaacctttatattttgacactacaggagccagccacaaggccaaatgtgtcagctgccagtgtttgcttgacatacaggagaacattaaggaactctcaggttgggaggagggaagtgttgaccaggacatcagacggaggtttcttgtttttgtttttttaaacactatttttaaactcttaagtagagggactattttaatattctaggtatagaataaatagcttttataacagtcttagttctaaatgaagcagaacccgtctttgtaaacactgagaactagaccctgaatgtacaagcagggaaaagaatagacaagtttacttggtttatcagaagccataaaacctttagagcagattaaaaccttttctccttttgtttgtagatggctctgagagattcctctgcgaatctgtttttagctatcaagtggcatccacgcttaaacaggtgaaacatgatcagcaagttgctcggatggaaaaactagctggtttggtagaagagctggaggctgacgagtggcggtttaagcccatcgagcagctgctgggattcaccccctcttcaggttgatactgcctggatggtcacctctggtgcgcagcaagtgcaaagccagtgggggactttctcacagcttacatagccatccagagatccacagctacgtcactgaattgttaatgcacatttgtacttggtttctctgtatctattcacaggcaacaaatacttatatgtgtgatctttcagggaatgttttgtttatttgtttttaaaagtattgggaatcagattaagacaatcagtttcagagaaccaggaggtttggggttaagagatactcaaaaattttcacaagccaagtagggcatatatcagatttggccaactgaatggcgtctgtcctgtcatccatatggtgcctggcctcaagtaagtttttataccatgataggggaaaacctggaaggctaagagatgtgctgttttccttcatgggaccccactttccacagtaaacaactggtataatcatttattacgttgtatgcaaattttgccttagacaacatttgtctggttccttattaataacttgcatctgatctgcttagagttgcttaattataagtaaatataatcccagtagcatttagccttaatctcaagagttcaaaatgtttaacacattctacctgacgggaggtggtgacctcattcagtcggttaagagcctgagccctgtgaagttaaacacctgctcatggtcacatagcccaggcagaagaaaatctcggacttggaatagatcccagttgcctgataattcatctcattattgcctctaaagcaaattggagactgggcacagtggctcccacctttaatcccagcacctggggaggctgaggtgagtggatcactagaggtcaggagttcaagaccagtctggccgacatggtgaaactcagtctctattgaaaatacaaaaattagctcagtgtggtggcacacacttgtaatcccagctactcaggaggctgaggcatgagaatcgcttaaacccaggaggcggaggttgcagtgagctgagatcacaccattgcactctagtctgggtgacagagcgagactctgtctcaaaaaaaaaaaaataaagccgggcgtggtggctcacgcctgtaatcccggcactttgggaggctgaggcaggcggattgcctgagatcgggagttcgagaccagcctggccaacatggtgaaaccttgtctctactaaaactacaaaaaaaattagcc

SEQ ID NO: 20089 - protein, 41 aa, Homo sapiens
MASVLSSIWCLASSKFLYHDRGKPGRLRDVLFSFMGPHFPQ

SEQ ID NO: 20090 - DNA, 1433 bp, Homo sapiens
aactagctggtttggtagaagagctggaggctgacgagtggcggtttaagcccatcgagcagctgctgggattcaccccctcttcaggttgatactgcctggatggtcacctctggtgcgcagcaagtgcaaagccagtgggggactttctcacagcttacatagccatccagagatccacagctacgtcactgaattgttaatgcacatttgtacttggtttctctgtatctattcacaggcaacaaatacttatatgtgtgatctttcagggaatgttttgtttatttgtttttaaaagtattgggaatcagattaagacaatcagtttcagagaaccaggaggtttggggttaagagatactcaaaaattttcacaagccaagtagggcatatatcagatttggccaactgaatggcgtctgtcctgtcatccatatggtgcctggaaatatttaccagtcaaggtcaaggtcagcatctgtggttaaaaatatagcattctgacctaaaaaagttattttgcagatgaatgtgttttcaactcaggacctatccaaatgaggaatttttaaatattcttttttttttcctatttttagacatcaattctatagattctgactttttctaacctcttatagacatgccaaatgctggcaaaaagaagtgctttttggatatggcagcacttgtaaaaataaagcagtaagcaaaatccttttaaacacagaaatcctgagttcttctcattggtggactcaagcaattctgtagcaaataaatcctttgaaagagctccaaattggtggcattatcctttcaaaatctcagggatttgggatgaagtgaagaggtcaaattactttttagaagaagggaatctaaaaaccatctctcctaaacaaatggtagactggctttacttaagggatatttgtctttataggagtacataaatttatcttaatgatatttaagtagtttttttttttttttgagacgaaagcgaaactgtctcaaaaaaaagaagaaaataaataaataaaaatcagagcacaagaagtaccagtccaccaactcacattttctatattaataattcttaactaaaagaagttccatattcgacagcattttagttttttaatagtacttattagcatcaaccatcttgataatcaccaagggaaaaattaaaaatacctagactgcaataaacctttaaattggattttcagtgagaatttagaagcaatcactacctttctcgtttcatttgtgtaaccatgcagcataggcactgtgttacatcatctttacgctttggtatttgaacttattacagaattttttctctaaattggatgtttctttatatgaccttggaaactgaagtgatcttagcattaaacaaaaatgctttttgaagc

SEQ ID NO: 20091 - protein, 37 aa, Homo sapiens; identical to SEQ ID NO: 20033

SEQ ID NO: 20092 - DNA, 722 bp, Homo sapiens
gtagactggctttacttaagggatatttgtctttataggagtacataaatttatcttaatgatatttaagtagtttttttttttttttgagacgaagttttgctcttgttgcccaggctgtatcgcaatggcgcgatctctgctcactgcaacatccacctcccaggttcaagcaattctcctgcctcagcctcccaactactcaggaggctgaggcagcagaatcgtttgaacccgggaggcggaggttgcagtgagtggagatcgtgcctgtgtgctccagcctgagcaacaagagcgaaactgtctcaaaaaaaagaagaaaataaataaataaaaatcagagcacaagaagtaccagtccaccaactcacattttctatattaataattcttaactaaaagaagttccatattcgacagcattttagttttttaatagtacttattagcatcaaccatcttgataatcaccaagggaaaaattaaaaatacctagactgcaataaacctttaaattggattttcagtgagaatttagaagcaatcactacctttctcgtttcatttgtgtaaccatgcagcataggcactgtgttacatcatctttacgctttggtatttgaacttattacagaattttttctctaaattggatgtttctttatatgaccttggaaactgaagtgatcttagcattaaacaaaaatgctttttgaagc

SEQ ID NO: 20093 - protein, 65 aa, Homo sapiens
DEVLLLLPRLYRNGAISAHCNIHLPGSSNSPASASQLLRRLRQQNRLNPGGGGCSEWRSCLCAPA

SEQ ID NO: 20094 - DNA, 442 bp, Homo sapiens
aggtgtttaacttcacagggctcaggctcttaaccgactgaatgaggtcaccacctcccgtcaggtagaatgtgttaaacattttgaactcttgagattaaggctaaatgctactgggattatatttacttataattaagcaactctaagcagatcagatgcaagttattaataaggaaccagacaaatgttgtctaaggcaaaatttgcatacaacgtaataaatgattataccagttgtttactgtggaaagtggggtcccatgaaggaaaacagcacatctcttagccttccaggttttcccctatcatggtataaaaacttacttgaggccaggagttcaagaccaacctgggcaacatagcaagaccatgtctctttaaaaaaaaattggctgggcaaggtggctcacgcctgtaatcccagcaatttgggaggctg

SEQ ID NO: 20095 - protein, 46 aa, Homo sapiens
MIIPVVYCGKWGPMKENSTSLSLPGFPLSWYKNLLEARSSRPTWAT

SEQ ID NO: 20096 - DNA, 1697 bp, Homo sapiens
cggtcctgatgcaaccgtctggatcttttacacaaagcgctaggcgagcgctgggtgctaggacccggggggcgcccgggcagggagcggcttctacgctccggcactctgagttcatcagcaaacgccctggcgtctgtcctcaccatgcctagcctttgggaccgcttctcgtcgtcgtccacctcctcttcgccctcgtccttgccccgaactcccaccccagatcggccgccgcgctcagcctgggggtcggcgacccgggaggaggggtttgaccgctccacgagcctggagagctcggactgcgagtccctggacagcagcaacagtggcttcgggccggaggaagacacggcttacctggatggggtgtcgttgcccgacttcgagctgctcagtgaccctgaggatgaacacttgtgtgccaacctgatgcagctgctgcaggagagcctggcccaggcgcggctgggctctcgacgccctgcgcgcctgctgatgcctagccagttggtaagccaggtgggcaaagaactactgcgcctggcctacagcgagccgtgcggcctgcggggggcgctgctggacgtctgcgtggagcagggcaagagctgccacagcgtgggccagctggcactcgaccccagcctggtgcccaccttccagctgaccctcgtgctgcgcctggactcacgactctggcccaagatccaggggctgtttagctccgccaactctcccttcctccctggcttcagccagtccctgacgctgagcactggcttccgagtcatcaagaagaagctgtacagctcggaacagctgctcattgaggagtgttgaacttcaacctgagggggccgacagtgccctccaagacagagacgactgaacttttggggtggagactagaggcaggagctgagggactgattcctgtggttggaaaactgaggcagccacctaaggtggaggtgggggaatagtgtttcccaggaagctcattgagttgtgtgcgggtggctgtgcattggggacacatacccctcagtactgtagcatgaaacaaaggcttaggggccaacaaggcttccagctggatgtgtgtgtagcatgtaccttattatttttgttactgacagttaacagtggtgtgacatccagagagcagctgggctgctcccgccccagcccggcccagggtgaaggaagaggcacgtgctcctcagagcagccggagggaggggggaggtcggaggtcgtggaggtggtttgtgtatcttactggtctgaagggaccaagtgtgtttgttgtttgttttgtatcttgtttttctgatcggagcatcactactgacctgttgtaggcagctatcttacagacgcatgaatgtaagagtaggaaggggtgggtgtcagggatcacttgggatctttgacacttgaaaaattacacctggcagctgcgtttaagccttcccccatcgtgtactgcagagttgagctggcaggggaggggctgagagggtgggggctggaacccctccccgggaggagtgccatctgggtcttccatctagaactgtttacatgaagataagatactcactgttcatgaatacacttgatgttcaagtattaagacctatgcaatattttttacttttctaataaacatgtttgttaaaacagtt

SEQ ID NO: 20097 - protein, 232 aa, Homo sapiens; identical to SEQ ID NO: 2519

SEQ ID NO: 20098 - DNA, 1727 bp, Homo sapiens
cggtcctgatgcaaccgtctggatcttttacacaaagcgctaggcgagcgctgggtgctaggacccggggggcgcccgggcagggagcggcttctacgctccggcactctgagttcatcagcaaacgccctggcgtctgtcctcaccatgcctagcctttgggaccgcttctcgtcgtcgtccacctcctcttcgccctcgtccttgccccgaactcccaccccagatcggccgccgcgctcagcctgggggtcggcgacccgggaggaggggtttgaccgctccacgagcctggagagctcggactgcgagtccctggacagcagcaacagtggcttcgggccggaggaagacacggcttacctggatggggtgtcgttgcccgacttcgagctgctcagtgaccctgaggatgaacacttgtgtgccaacctgatgcagctgctgcaggagagcctggcccaggcgcggctgggctctcgacgccctgcgcgcctgctgatgcctagccagttggtaagccaggtgggcaaagaactactgcgcctggcctacagcgagccgtgcggcctgcggggggcgctgctggacgtctgcgtggagcagggcaagagctgccacagcgtgggccagctggcactcgaccccagcctggtgcccaccttccagctgaccctcgtgctgcgcctggactcacgactctggcccaagatccaggggctgtttagctccgccaactctcccttcctccctggcttcagccagtccctgacgctgagcactggcttccgagtcatcaagaagaagctgtacagctcggaacagctgctcattgaggagtgttgaacttcaacctgagggggccgacagtgccctccaagacagagacgactgaacttttggggtggagactagaggcaggagctgagggactgattcctgtggttggaaaactgaggcagccacctaaggtggaggtgggggaatagtgtttcccaggaagctcattgagttgtgtgcgggtggctgtgcattggggacacatacccctcagtactgtagcatgaaacaaaggcttaggggccaacaaggcttccagctggatgtgtgtgtagcatgtaccttattatttttgttactgacagttaacagtggtgtgacatccagagagcagctgggctgctcccgccccagcccggcccagggtgaaggaagaggcacgtgctcctcagagcagccggagggaggggggaggtcggaggtcgtggaggtggtttgtgtatcttactggtctgaagggaccaagtgtgtttgttgtttgttttgtatcttgtttttctgatcggagcatcactactgacctgttgtaggcagctatcttacagacgcatgaatgtaagagtaggaaggggtgggtgtcagggatcacttgggatctttgacacttgaaaaattacacctggcagctgcgtttaagccttcccccatcgtgtactgcagagttgagctggcaggggaggggctgagagggtgggggctggaacccctccccgggaggagtgccatctgggtcttccatctagaactgtttacatgaagataagatactcactgttcatgaatacacttgatgttcaagtattaagacctatgcaatattttttacttttctaataaacatgtttgttaaaacagttggttgagtctctcatcagtaccatgaagtg

SEQ ID NO: 20099 - protein, 232 aa, Homo sapiens; identical to SEQ ID NO: 2519

SEQ ID NO: 20100 - DNA, 1912 bp, Homo sapiens
aagggcgcgagggcaggccgggctaacgtctgctcctgcgccgccgtcccacgggcatcccccccgtgtgtgcccagttgttcccgaagctttaggatccaagacgctgggggcaaccattttccttgcccgccgccccctcacgcttccctgcctctcctcctagcctggtcacgggctgtcccctcctccagcaatgcaaccctataataaacaagtctttccttgatcctcccctgccgcgagcgccctcggggaccttggcagctgcagccgccgcggatcctttccagaaagggggcgtggcggtgggtcggggttcgactgcgagctttctggggctcaatggaggcggggcccggccgctgtcaccgggcaggagagaacgttgcttacgtgcgcccggagtccattggccaaggcgggccacactcccgggtctggattgggtcgtggcgcagagaaggcgtggcctcgccgcgctagtccttataggctgctccgcgctggtgctagggcgcagcaggccaagggggaggtgcgagcgtggacctgggacgggtctgggcggctctcggtggttggcacgggttcgcacacccattcaagcggcaggacgcacttgtcttagcagttctcgctgaccgcgctagctgcggcttctacgctccggcactctgagttcatcagcaaacgccctggcgtctgtcctcaccatgcctagccagttggtaagccaggtgggcaaagaactactgcgcctggcctacagcgagccgtgcggcctgcggggggcgctgctggacgtctgcgtggagcagggcaagagctgccacagcgtgggccagctggcactcgaccccagcctggtgcccaccttccagctgaccctcgtgctgcgcctggactcacgactctggcccaagatccaggggctgtttagctccgccaactctcccttcctccctggcttcagccagtccctgacgctgagcactggcttccgagtcatcaagaagaagctgtacagctcggaacagctgctcattgaggagtgttgaacttcaacctgagggggccgacagtgccctccaagacagagacgactgaacttttggggtggagactagaggcaggagctgagggactgattcctgtggttggaaaactgaggcagccacctaaggtggaggtgggggaatagtgtttcccaggaagctcattgagttgtgtgcgggtggctgtgcattggggacacatacccctcagtactgtagcatgaaacaaaggcttaggggccaacaaggcttccagctggatgtgtgtgtagcatgtaccttattatttttgttactgacagttaacagtggtgtgacatccagagagcagctgggctgctcccgccccagcccggcccagggtgaaggaagaggcacgtgctcctcagagcagccggagggaggggggaggtcggaggtcgtggaggtggtttgtgtatcttactggtctgaagggaccaagtgtgtttgttgtttgttttgtatcttgtttttctgatcggagcatcactactgacctgttgtaggcagctatcttacagacgcatgaatgtaagagtaggaaggggtgggtgtcagggatcacttgggatctttgacacttgaaaaattacacctggcagctgcgtttaagccttcccccatcgtgtactgcagagttgagctggcaggggaggggctgagagggtgggggctggaacccctccccgggaggagtgccatctgggtcttccatctagaactgtttacatgaagataagatactcactgttcatgaatacacttgatgttcaagtattaagacctatgcaatattttttacttttctaataaacatgtttgttaaaacagtt

SEQ ID NO: 20101 - protein, 114 aa, Homo sapiens [sequence omitted]

SEQ ID NO: 20102 - DNA, 1942 bp, Homo sapiens
aagggcgcgagggcaggccgggctaacgtctgctcctgcgccgccgtcccacgggcatcccccccgtgtgtgcccagttgttcccgaagctttaggatccaagacgctgggggcaaccattttccttgcccgccgccccctcacgcttccctgcctctcctcctagcctggtcacgggctgtcccctcctccagcaatgcaaccctataataaacaagtctttccttgatcctcccctgccgcgagcgccctcggggaccttggcagctgcagccgccgcggatcctttccagaaagggggcgtggcggtgggtcggggttcgactgcgagctttctggggctcaatggaggcggggcccggccgctgtcaccgggcaggagagaacgttgcttacgtgcgcccggagtccattggccaaggcgggccacactcccgggtctggattgggtcgtggcgcagagaaggcgtggcctcgccgcgctagtccttataggctgctccgcgctggtgctagggcgcagcaggccaagggggaggtgcgagcgtggacctgggacgggtctgggcggctctcggtggttggcacgggttcgcacacccattcaagcggcaggacgcacttgtcttagcagttctcgctgaccgcgctagctgcggcttctacgctccggcactctgagttcatcagcaaacgccctggcgtctgtcctcaccatgcctagccagttggtaagccaggtgggcaaagaactactgcgcctggcctacagcgagccgtgcggcctgcggggggcgctgctggacgtctgcgtggagcagggcaagagctgccacagcgtgggccagctggcactcgaccccagcctggtgcccaccttccagctgaccctcgtgctgcgcctggactcacgactctggcccaagatccaggggctgtttagctccgccaactctcccttcctccctggcttcagccagtccctgacgctgagcactggcttccgagtcatcaagaagaagctgtacagctcggaacagctgctcattgaggagtgttgaacttcaacctgagggggccgacagtgccctccaagacagagacgactgaacttttggggtggagactagaggcaggagctgagggactgattcctgtggttggaaaactgaggcagccacctaaggtggaggtgggggaatagtgtttcccaggaagctcattgagttgtgtgcgggtggctgtgcattggggacacatacccctcagtactgtagcatgaaacaaaggcttaggggccaacaaggcttccagctggatgtgtgtgtagcatgtaccttattatttttgttactgacagttaacagtggtgtgacatccagagagcagctgggctgctcccgccccagcccggcccagggtgaaggaagaggcacgtgctcctcagagcagccggagggaggggggaggtcggaggtcgtggaggtggtttgtgtatcttactggtctgaagggaccaagtgtgtttgttgtttgttttgtatcttgtttttctgatcggagcatcactactgacctgttgtaggcagctatcttacagacgcatgaatgtaagagtaggaaggggtgggtgtcagggatcacttgggatctttgacacttgaaaaattacacctggcagctgcgtttaagccttcccccatcgtgtactgcagagttgagctggcaggggaggggctgagagggtgggggctggaacccctccccgggaggagtgccatctgggtcttccatctagaactgtttacatgaagataagatactcactgttcatgaatacacttgatgttcaagtattaagacctatgcaatattttttacttttctaataaacatgtttgttaaaacagttggttgagtctctcatcagtaccatgaagtg

SEQ ID NO: 20103 - protein, 114 aa, Homo sapiens [sequence omitted]

SEQ ID NO: 20104 - DNA, 1752 bp, Homo sapiens; identical to SEQ ID NO: 2518

SEQ ID NO: 20105 - protein, 232 aa, Homo sapiens; identical to SEQ ID NO: 2519

SEQ ID NO: 20106 - DNA, 1782 bp, Homo sapiens
agggcgcagcaggccaagggggaggtgcgagcgtggacctgggacgggtctgggcggctctcggtggttggcacgggttcgcacacccattcaagcggcaggacgcacttgtcttagcagttctcgctgaccgcgctagctgcggcttctacgctccggcactctgagttcatcagcaaacgccctggcgtctgtcctcaccatgcctagcctttgggaccgcttctcgtcgtcgtccacctcctcttcgccctcgtccttgccccgaactcccaccccagatcggccgccgcgctcagcctgggggtcggcgacccgggaggaggggtttgaccgctccacgagcctggagagctcggactgcgagtccctggacagcagcaacagtggcttcgggccggaggaagacacggcttacctggatggggtgtcgttgcccgacttcgagctgctcagtgaccctgaggatgaacacttgtgtgccaacctgatgcagctgctgcaggagagcctggcccaggcgcggctgggctctcgacgccctgcgcgcctgctgatgcctagccagttggtaagccaggtgggcaaagaactactgcgcctggcctacagcgagccgtgcggcctgcggggggcgctgctggacgtctgcgtggagcagggcaagagctgccacagcgtgggccagctggcactcgaccccagcctggtgcccaccttccagctgaccctcgtgctgcgcctggactcacgactctggcccaagatccaggggctgtttagctccgccaactctcccttcctccctggcttcagccagtccctgacgctgagcactggcttccgagtcatcaagaagaagctgtacagctcggaacagctgctcattgaggagtgttgaacttcaacctgagggggccgacagtgccctccaagacagagacgactgaacttttggggtggagactagaggcaggagctgagggactgattcctgtggttggaaaactgaggcagccacctaaggtggaggtgggggaatagtgtttcccaggaagctcattgagttgtgtgcgggtggctgtgcattggggacacatacccctcagtactgtagcatgaaacaaaggcttaggggccaacaaggcttccagctggatgtgtgtgtagcatgtaccttattatttttgttactgacagttaacagtggtgtgacatccagagagcagctgggctgctcccgccccagcccggcccagggtgaaggaagaggcacgtgctcctcagagcagccggagggaggggggaggtcggaggtcgtggaggtggtttgtgtatcttactggtctgaagggaccaagtgtgtttgttgtttgttttgtatcttgtttttctgatcggagcatcactactgacctgttgtaggcagctatcttacagacgcatgaatgtaagagtaggaaggggtgggtgtcagggatcacttgggatctttgacacttgaaaaattacacctggcagctgcgtttaagccttcccccatcgtgtactgcagagttgagctggcaggggaggggctgagagggtgggggctggaacccctccccgggaggagtgccatctgggtcttccatctagaactgtttacatgaagataagatactcactgttcatgaatacacttgatgttcaagtattaagacctatgcaatattttttacttttctaataaacatgtttgttaaaacagttggttgagtctctcatcagtaccatgaagtg

SEQ ID NO: 20107 - protein, 232 aa, Homo sapiens; identical to SEQ ID NO: 2519

SEQ ID NO: 20108 - DNA, 1476 bp, Homo sapiens
gcagcaggccaagggggaggtgcgagcgtggacctgggacgggtctgggcggctctcggtggttggcacgggttcgcacacccattcaagcggcaggacgcacttgtcttagcagttctcgctgaccgcgctagctgcggcttctacgctccggcactctgagttcatcagcaaacgccctggcgtctgtcctcaccatgcctagcctttgggaccgcttctcgtcgtcgtccacctcctcttcgccctcgtccttgccccgaactcccaccccagatcggccgccgcgctcagcctgggggtcggcgacccgggaggaggggtttgaccgctccacgagcctggagagctcggactgcgagtccctggacagcagcaacagtggcttcgggccggaggaagacacggcttacctggatggggtgtcgttgcccgacttcgagctgctcagtgaccctgaggatgaacactttcacgactctggcccaagatccaggggctgtttagctccgccaactctcccttcctccctggcttcagccagtccctgacgctgagcactggcttccgagtcatcaagaagaagctgtacagctcggaacagctgctcattgaggagtgttgaacttcaacctgagggggccgacagtgccctccaagacagagacgactgaacttttggggtggagactagaggcaggagctgagggactgattcctgtggttggaaaactgaggcagccacctaaggtggaggtgggggaatagtgtttcccaggaagctcattgagttgtgtgcgggtggctgtgcattggggacacatacccctcagtactgtagcatgaaacaaaggcttaggggccaacaaggcttccagctggatgtgtgtgtagcatgtaccttattatttttgttactgacagttaacagtggtgtgacatccagagagcagctgggctgctcccgccccagcccggcccagggtgaaggaagaggcacgtgctcctcagagcagccggagggaggggggaggtcggaggtcgtggaggtggtttgtgtatcttactggtctgaagggaccaagtgtgtttgttgtttgttttgtatcttgtttttctgatcggagcatcactactgacctgttgtaggcagctatcttacagacgcatgaatgtaagagtaggaaggggtgggtgtcagggatcacttgggatctttgacacttgaaaaattacacctggcagctgcgtttaagccttcccccatcgtgtactgcagagttgagctggcaggggaggggctgagagggtgggggctggaacccctccccgggaggagtgccatctgggtcttccatctagaactgtttacatgaagataagatactcactgttcatgaatacacttgatgttcaagtattaagacctatgcaatattttttacttttctaataaacatgtttgttaaaacagtt

SEQ ID NO: 20109 - protein, 117 aa, Homo sapiens
MPSLWDRFSSSSTSSSPSSLPRTPTPDRPPRSAWGSATREEGFDRSTSLESSDCESLDSSNSGFGPEEDTAYLDGVSLPDFELLSDPEDEHFHDSGPRSRGCLAPPTLPSSLASASP

SEQ ID NO: 20110 - DNA, 1506 bp, Homo sapiens
gcagcaggccaagggggaggtgcgagcgtggacctgggacgggtctgggcggctctcggtggttggcacgggttcgcacacccattcaagcggcaggacgcacttgtcttagcagttctcgctgaccgcgctagctgcggcttctacgctccggcactctgagttcatcagcaaacgccctggcgtctgtcctcaccatgcctagcctttgggaccgcttctcgtcgtcgtccacctcctcttcgccctcgtccttgccccgaactcccaccccagatcggccgccgcgctcagcctgggggtcggcgacccgggaggaggggtttgaccgctccacgagcctggagagctcggactgcgagtccctggacagcagcaacagtggcttcgggccggaggaagacacggcttacctggatggggtgtcgttgcccgacttcgagctgctcagtgaccctgaggatgaacactttcacgactctggcccaagatccaggggctgtttagctccgccaactctcccttcctccctggcttcagccagtccctgacgctgagcactggcttccgagtcatcaagaagaagctgtacagctcggaacagctgctcattgaggagtgttgaacttcaacctgagggggccgacagtgccctccaagacagagacgactgaacttttggggtggagactagaggcaggagctgagggactgattcctgtggttggaaaactgaggcagccacctaaggtggaggtgggggaatagtgtttcccaggaagctcattgagttgtgtgcgggtggctgtgcattggggacacatacccctcagtactgtagcatgaaacaaaggcttaggggccaacaaggcttccagctggatgtgtgtgtagcatgtaccttattatttttgttactgacagttaacagtggtgtgacatccagagagcagctgggctgctcccgccccagcccggcccagggtgaaggaagaggcacgtgctcctcagagcagccggagggaggggggaggtcggaggtcgtggaggtggtttgtgtatcttactggtctgaagggaccaagtgtgtttgttgtttgttttgtatcttgtttttctgatcggagcatcactactgacctgttgtaggcagctatcttacagacgcatgaatgtaagagtaggaaggggtgggtgtcagggatcacttgggatctttgacacttgaaaaattacacctggcagctgcgtttaagccttcccccatcgtgtactgcagagttgagctggcaggggaggggctgagagggtgggggctggaacccctccccgggaggagtgccatctgggtcttccatctagaactgtttacatgaagataagatactcactgttcatgaatacacttgatgttcaagtattaagacctatgcaatattttttacttttctaataaacatgtttgttaaaacagttggttgagtctctcatcagtaccatgaagtg

SEQ ID NO: 20111 - protein, 117 aa, Homo sapiens; identical to SEQ ID NO: 20109

SEQ ID NO: 20112 - DNA, 1842 bp, Homo sapiens
cagcaggccaagggggaggtgcgagcgtggacctgggacgggtctgggcggctctcggtggttggcacgggttcgcacacccattcaagcggcaggacgcacttgtcttagcagttctcgctgaccgcgctagctggtgagtgtcccttctgtgtgtgggtcctagagctcgcggtctggtctggtctggtccccagactgacgcctggtcggtccccctcttgtcttacagcggcttctacgctccggcactctgagttcatcagcaaacgccctggcgtctgtcctcaccatgcctagcctttgggaccgcttctcgtcgtcgtccacctcctcttcgccctcgtccttgccccgaactcccaccccagatcggccgccgcgctcagcctgggggtcggcgacccgggaggaggggtttgaccgctccacgagcctggagagctcggactgcgagtccctggacagcagcaacagtggcttcgggccggaggaagacacggcttacctggatggggtgtcgttgcccgacttcgagctgctcagtgaccctgaggatgaacacttgtgtgccaacctgatgcagctgctgcaggagagcctggcccaggcgcggctgggctctcgacgccctgcgcgcctgctgatgcctagccagttggtaagccaggtgggcaaagaactactgcgcctggcctacagcgagccgtgcggcctgcggggggcgctgctggacgtctgcgtggagcagggcaagagctgccacagcgtgggccagctggcactcgaccccagcctggtgcccaccttccagctgaccctcgtgctgcgcctggactcacgactctggcccaagatccaggggctgtttagctccgccaactctcccttcctccctggcttcagccagtccctgacgctgagcactggcttccgagtcatcaagaagaagctgtacagctcggaacagctgctcattgaggagtgttgaacttcaacctgagggggccgacagtgccctccaagacagagacgactgaacttttggggtggagactagaggcaggagctgagggactgattcctgtggttggaaaactgaggcagccacctaaggtggaggtgggggaatagtgtttcccaggaagctcattgagttgtgtgcgggtggctgtgcattggggacacatacccctcagtactgtagcatgaaacaaaggcttaggggccaacaaggcttccagctggatgtgtgtgtagcatgtaccttattatttttgttactgacagttaacagtggtgtgacatccagagagcagctgggctgctcccgccccagcccggcccagggtgaaggaagaggcacgtgctcctcagagcagccggagggaggggggaggtcggaggtcgtggaggtggtttgtgtatcttactggtctgaagggaccaagtgtgtttgttgtttgttttgtatcttgtttttctgatcggagcatcactactgacctgttgtaggcagctatcttacagacgcatgaatgtaagagtaggaaggggtgggtgtcagggatcacttgggatctttgacacttgaaaaattacacctggcagctgcgtttaagccttcccccatcgtgtactgcagagttgagctggcaggggaggggctgagagggtgggggctggaacccctccccgggaggagtgccatctgggtcttccatctagaactgtttacatgaagataagatactcactgttcatgaatacacttgatgttcaagtattaagacctatgcaatattttttacttttctaataaacatgtttgttaaaacagtt

SEQ ID NO: 20113 - protein, 232 aa, Homo sapiens; identical to SEQ ID NO: 2519

SEQ ID NO: 20114 - DNA, 1872 bp, Homo sapiens
cagcaggccaagggggaggtgcgagcgtggacctgggacgggtctgggcggctctcggtggttggcacgggttcgcacacccattcaagcggcaggacgcacttgtcttagcagttctcgctgaccgcgctagctggtgagtgtcccttctgtgtgtgggtcctagagctcgcggtctggtctggtctggtccccagactgacgcctggtcggtccccctcttgtcttacagcggcttctacgctccggcactctgagttcatcagcaaacgccctggcgtctgtcctcaccatgcctagcctttgggaccgcttctcgtcgtcgtccacctcctcttcgccctcgtccttgccccgaactcccaccccagatcggccgccgcgctcagcctgggggtcggcgacccgggaggaggggtttgaccgctccacgagcctggagagctcggactgcgagtccctggacagcagcaacagtggcttcgggccggaggaagacacggcttacctggatggggtgtcgttgcccgacttcgagctgctcagtgaccctgaggatgaacacttgtgtgccaacctgatgcagctgctgcaggagagcctggcccaggcgcggctgggctctcgacgccctgcgcgcctgctgatgcctagccagttggtaagccaggtgggcaaagaactactgcgcctggcctacagcgagccgtgcggcctgcggggggcgctgctggacgtctgcgtggagcagggcaagagctgccacagcgtgggccagctggcactcgaccccagcctggtgcccaccttccagctgaccctcgtgctgcgcctggactcacgactctggcccaagatccaggggctgtttagctccgccaactctcccttcctccctggcttcagccagtccctgacgctgagcactggcttccgagtcatcaagaagaagctgtacagctcggaacagctgctcattgaggagtgttgaacttcaacctgagggggccgacagtgccctccaagacagagacgactgaacttttggggtggagactagaggcaggagctgagggactgattcctgtggttggaaaactgaggcagccacctaaggtggaggtgggggaatagtgtttcccaggaagctcattgagttgtgtgcgggtggctgtgcattggggacacatacccctcagtactgtagcatgaaacaaaggcttaggggccaacaaggcttccagctggatgtgtgtgtagcatgtaccttattatttttgttactgacagttaacagtggtgtgacatccagagagcagctgggctgctcccgccccagcccggcccagggtgaaggaagaggcacgtgctcctcagagcagccggagggaggggggaggtcggaggtcgtggaggtggtttgtgtatcttactggtctgaagggaccaagtgtgtttgttgtttgttttgtatcttgtttttctgatcggagcatcactactgacctgttgtaggcagctatcttacagacgcatgaatgtaagagtaggaaggggtgggtgtcagggatcacttgggatctttgacacttgaaaaattacacctggcagctgcgtttaagccttcccccatcgtgtactgcagagttgagctggcaggggaggggctgagagggtgggggctggaacccctccccgggaggagtgccatctgggtcttccatctagaactgtttacatgaagataagatactcactgttcatgaatacacttgatgttcaagtattaagacctatgcaatattttttacttttctaataaacatgtttgttaaaacagttggttgagtctctcatcagtaccatgaagtg

SEQ ID NO: 20115 - protein, 232 aa, Homo sapiens; identical to SEQ ID NO: 2519

SEQ ID NO: 20116 - DNA, 2000 bp, Homo sapiens
tgcgagcgtggacctgggacgggtctgggcggctctcggtggttggcacgggttcgcacacccattcaagcggcaggacgcacttgtcttagcagttctcgctgaccgcgctagctgcggcttctacgctccggcactctgagttcatcagcaaacgccctggcgtctgtcctcaccatgcctagcctttgggaccgcttctcgtcgtcgtccacctcctcttcgccctcgtccttgccccgaactcccaccccagatcggccgccgcgctcagcctgggggtcggcgacccgggaggaggggtttgaccgctccacgagcctggagagctcggactgcgagtccctggacagcagcaacagtggcttcgggccggaggaaggtgagcggtgggcgggtgccgacgcgactcgaggggccgggaaggtggggaagccccggtgctggaaggggtcagagccgccttggcttcctatcccatcgggacccagattgcttgggggcagggggaattggagtataaggtgagtgaggcggaaactgaggcacggagtgggaaggagcgttggtttcttaaggaaacagcacctcccccgcctgtgcgtttcgttttgaagccgctctaataccccttcctgtgtgctctcctttccagacacggcttacctggatggggtgtcgttgcccgacttcgagctgctcagtgaccctgaggatgaacacttgtgtgccaacctgatgcagctgctgcaggagagcctggcccaggcgcggctgggctctcgacgccctgcgcgcctgctgatgcctagccagttggtaagccaggtgggcaaagaactactgcgcctggcctacagcgagccgtgcggcctgcggggggcgctgctggacgtctgcgtggagcagggcaagagctgccacagcgtgggccagctggcactcgaccccagcctggtgcccaccttccagctgaccctcgtgctgcgcctggactcacgactctggcccaagatccaggggctgtttagctccgccaactctcccttcctccctggcttcagccagtccctgacgctgagcactggcttccgagtcatcaagaagaagctgtacagctcggaacagctgctcattgaggagtgttgaacttcaacctgagggggccgacagtgccctccaagacagagacgactgaacttttggggtggagactagaggcaggagctgagggactgattcctgtggttggaaaactgaggcagccacctaaggtggaggtgggggaatagtgtttcccaggaagctcattgagttgtgtgcgggtggctgtgcattggggacacatacccctcagtactgtagcatgaaacaaaggcttaggggccaacaaggcttccagctggatgtgtgtgtagcatgtaccttattatttttgttactgacagttaacagtggtgtgacatccagagagcagctgggctgctcccgccccagcccggcccagggtgaaggaagaggcacgtgctcctcagagcagccggagggaggggggaggtcggaggtcgtggaggtggtttgtgtatcttactggtctgaagggaccaagtgtgtttgttgtttgttttgtatcttgtttttctgatcggagcatcactactgacctgttgtaggcagctatcttacagacgcatgaatgtaagagtaggaaggggtgggtgtcagggatcacttgggatctttgacacttgaaaaattacacctggcagctgcgtttaagccttcccccatcgtgtactgcagagttgagctggcaggggaggggctgagagggtgggggctggaacccctccccgggaggagtgccatctgggtcttccatctagaactgtttacatgaagataagatactcactgttcatgaatacacttgatgttcaagtattaagacctatgcaatattttttacttttctaataaacatgtttgttaaaacagtt

SEQ ID NO: 20117 - protein, 136 aa, Homo sapiens
MQLLQESLAQARLGSRRPARLLMPSQLVSQVGKELLRLAYSEPCGLRGALLDVCVEQGKSCHSVGQLALDPSLVPTFQLTLVLRLDSRLWPKIQGLFSSANSPFLPGFSQSLTLSTGFRVIKKKLYSSEQLLIEEC

SEQ ID NO: 20118 - DNA, 2030 bp, Homo sapiens
tgcgagcgtggacctgggacgggtctgggcggctctcggtggttggcacgggttcgcacacccattcaagcggcaggacgcacttgtcttagcagttctcgctgaccgcgctagctgcggcttctacgctccggcactctgagttcatcagcaaacgccctggcgtctgtcctcaccatgcctagcctttgggaccgcttctcgtcgtcgtccacctcctcttcgccctcgtccttgccccgaactcccaccccagatcggccgccgcgctcagcctgggggtcggcgacccgggaggaggggtttgaccgctccacgagcctggagagctcggactgcgagtccctggacagcagcaacagtggcttcgggccggaggaaggtgagcggtgggcgggtgccgacgcgactcgaggggccgggaaggtggggaagccccggtgctggaaggggtcagagccgccttggcttcctatcccatcgggacccagattgcttgggggcagggggaattggagtataaggtgagtgaggcggaaactgaggcacggagtgggaaggagcgttggtttcttaaggaaacagcacctcccccgcctgtgcgtttcgttttgaagccgctctaataccccttcctgtgtgctctcctttccagacacggcttacctggatggggtgtcgttgcccgacttcgagctgctcagtgaccctgaggatgaacacttgtgtgccaacctgatgcagctgctgcaggagagcctggcccaggcgcggctgggctctcgacgccctgcgcgcctgctgatgcctagccagttggtaagccaggtgggcaaagaactactgcgcctggcctacagcgagccgtgcggcctgcggggggcgctgctggacgtctgcgtggagcagggcaagagctgccacagcgtgggccagctggcactcgaccccagcctggtgcccaccttccagctgaccctcgtgctgcgcctggactcacgactctggcccaagatccaggggctgtttagctccgccaactctcccttcctccctggcttcagccagtccctgacgctgagcactggcttccgagtcatcaagaagaagctgtacagctcggaacagctgctcattgaggagtgttgaacttcaacctgagggggccgacagtgccctccaagacagagacgactgaacttttggggtggagactagaggcaggagctgagggactgattcctgtggttggaaaactgaggcagccacctaaggtggaggtgggggaatagtgtttcccaggaagctcattgagttgtgtgcgggtggctgtgcattggggacacatacccctcagtactgtagcatgaaacaaaggcttaggggccaacaaggcttccagctggatgtgtgtgtagcatgtaccttattatttttgttactgacagttaacagtggtgtgacatccagagagcagctgggctgctcccgccccagcccggcccagggtgaaggaagaggcacgtgctcctcagagcagccggagggaggggggaggtcggaggtcgtggaggtggtttgtgtatcttactggtctgaagggaccaagtgtgtttgttgtttgttttgtatcttgtttttctgatcggagcatcactactgacctgttgtaggcagctatcttacagacgcatgaatgtaagagtaggaaggggtgggtgtcagggatcacttgggatctttgacacttgaaaaattacacctggcagctgcgtttaagccttcccccatcgtgtactgcagagttgagctggcaggggaggggctgagagggtgggggctggaacccctccccgggaggagtgccatctgggtcttccatctagaactgtttacatgaagataagatactcactgttcatgaatacacttgatgttcaagtattaagacctatgcaatattttttacttttctaataaacatgtttgttaaaacagttggttgagtctctcatcagtaccatgaagtg

SEQ ID NO: 20119 - protein, 136 aa, Homo sapiens; identical to SEQ ID NO: 20117

SEQ ID NO: 20120 - DNA, 1113 bp, Homo sapiens
cgtggacctgggacgggtctgggcggctctcggtggttggcacgggttcgcacacccattcaagcggcaggacgcacttgtcttagcagttctcgctgaccgcgctagctgcggcttctacgctccggcactctgagttcatcactccgccaactctcccttcctccctggcttcagccagtccctgacgctgagcactggcttccgagtcatcaagaagaagctgtacagctcggaacagctgctcattgaggagtgttgaacttcaacctgagggggccgacagtgccctccaagacagagacgactgaacttttggggtggagactagaggcaggagctgagggactgattcctgtggttggaaaactgaggcagccacctaaggtggaggtgggggaatagtgtttcccaggaagctcattgagttgtgtgcgggtggctgtgcattggggacacatacccctcagtactgtagcatgaaacaaaggcttaggggccaacaaggcttccagctggatgtgtgtgtagcatgtaccttattatttttgttactgacagttaacagtggtgtgacatccagagagcagctgggctgctcccgccccagcccggcccagggtgaaggaagaggcacgtgctcctcagagcagccggagggaggggggaggtcggaggtcgtggaggtggtttgtgtatcttactggtctgaagggaccaagtgtgtttgttgtttgttttgtatcttgtttttctgatcggagcatcactactgacctgttgtaggcagctatcttacagacgcatgaatgtaagagtaggaaggggtgggtgtcagggatcacttgggatctttgacacttgaaaaattacacctggcagctgcgtttaagccttcccccatcgtgtactgcagagttgagctggcaggggaggggctgagagggtgggggctggaacccctccccgggaggagtgccatctgggtcttccatctagaactgtttacatgaagataagatactcactgttcatgaatacacttgatgttcaagtattaagacctatgcaatattttttacttttctaataaacatgtttgttaaaacagtt

SEQ ID NO: 20121 - protein, 92 aa, Homo sapiens
MKQRLRGQQGFQLDVCVACTLLFLLLTVNSGVTSREQLGCSRPSPAQGEGRGTCSSEQPEGGGRSEVVEVVCVSYWSEGTKCVCCLFCILFF

SEQ ID NO: 20122 - DNA, 1143 bp, Homo sapiens
cgtggacctgggacgggtctgggcggctctcggtggttggcacgggttcgcacacccattcaagcggcaggacgcacttgtcttagcagttctcgctgaccgcgctagctgcggcttctacgctccggcactctgagttcatcactccgccaactctcccttcctccctggcttcagccagtccctgacgctgagcactggcttccgagtcatcaagaagaagctgtacagctcggaacagctgctcattgaggagtgttgaacttcaacctgagggggccgacagtgccctccaagacagagacgactgaacttttggggtggagactagaggcaggagctgagggactgattcctgtggttggaaaactgaggcagccacctaaggtggaggtgggggaatagtgtttcccaggaagctcattgagttgtgtgcgggtggctgtgcattggggacacatacccctcagtactgtagcatgaaacaaaggcttaggggccaacaaggcttccagctggatgtgtgtgtagcatgtaccttattatttttgttactgacagttaacagtggtgtgacatccagagagcagctgggctgctcccgccccagcccggcccagggtgaaggaagaggcacgtgctcctcagagcagccggagggaggggggaggtcggaggtcgtggaggtggtttgtgtatcttactggtctgaagggaccaagtgtgtttgttgtttgttttgtatcttgtttttctgatcggagcatcactactgacctgttgtaggcagctatcttacagacgcatgaatgtaagagtaggaaggggtgggtgtcagggatcacttgggatctttgacacttgaaaaattacacctggcagctgcgtttaagccttcccccatcgtgtactgcagagttgagctggcaggggaggggctgagagggtgggggctggaacccctccccgggaggagtgccatctgggtcttccatctagaactgtttacatgaagataagatactcactgttcatgaatacacttgatgttcaagtattaagacctatgcaatattttttacttttctaataaacatgtttgttaaaacagttggttgagtctctcatcagtaccatgaagtg

SEQ ID NO: 20123 - protein, 92 aa, Homo sapiens; identical to SEQ ID NO: 20121

SEQ ID NO: 20124 - DNA, 1222 bp, Homo sapiens
ggaaggggtcagagccgccttggcttcctatcccatcgggacccagattgcttgggggcagggggaattggagtataaggtgagtgaggcggaaactgaggcacggagtgggaaggagcgttggtttcttaaggaaacagcacctcccccgcctgtgcgtttcgttttgaagccgctctaataccccttcctgtgtgctctcctttccagacacggcttacctggatggggtgtcgttgcccgacttcgagctgctcagtgaccctgaggatgaacacttgtgtgccaacctgatgcagctgctgcaggagagcctggcccaggcgcggctgggctctcgacgccctgcgcgcctgctgatgcctagccagttggtaagccaggtgggcaaagaactactgcgcctggcctacagcgagccgtgcggcctgcggggggcgctgctggacgtctgcgtggagcagggcaagagctgccacagcgtgggccagctggcactcgaccccagcctggtgcccaccttccagctgaccctcgtgctgcgcctggactcacgactctggcccaagatccaggggctgtttagctccgccaactctcccttcctccctggcttcagccagtccctgacgctgagcactggcttccgagtcatcaagaagaagctgtacagctcggaacagctgctcattgaggagtgttgaacttcaacctgagggggccgacagtgccctccaagacagagacgactgaacttttggggtggagactagaggcaggagctgagggactgattcctgtggttggaaaactgaggcagccacctaaggtggaggtgggggaatagtgtttcccaggaagctcattgagttgtgtgcgggtggctgtgcattggggacacatacccctcagtactgtagcatgaaacaaaggcttaggggccaacaaggcttccagctggatgtgtgtgtagcatgtaccttattatttttgttactgacagttaacagtggtgtgacatccagagagcagctgggctgctcccgccccagcccggcccagggtgaaggaagaggcacgtgctcctcagagcagccggagggaggagtgccatctgggtcttccatctagaactgtttacatgaagataagatactcactgttcatgaatacacttgatgttcaagtattaagacctatgcaatattttttacttttctaa

SEQ ID NO: 20125 - protein, 69 aa, Homo sapiens
MKQRLRGQQGFQLDVCVACTLLFLLLTVNSGVTSREQLGCSRPSPAQGEGRGTCSSEQPEGGVPSGSSI

SEQ ID NO: 20126 - DNA, 1333 bp, Homo sapiens
ggaaggggtcagagccgccttggcttcctatcccatcgggacccagattgcttgggggcagggggaattggagtataaggtgagtgaggcggaaactgaggcacggagtgggaaggagcgttggtttcttaaggaaacagcacctcccccgcctgtgcgtttcgttttgaagccgctctaataccccttcctgtgtgctctcctttccagacacggcttacctggatggggtgtcgttgcccgacttcgagctgctcagtgaccctgaggatgaacacttgtgtgccaacctgatgcagctgctgcaggagagcctggcccaggcgcggctgggctctcgacgccctgcgcgcctgctgatgcctagccagttggtaagccaggtgggcaaagaactactgcgcctggcctacagcgagccgtgcggcctgcggggggcgctgctggacgtctgcgtggagcagggcaagagctgccacagcgtgggccagctggcactcgaccccagcctggtgcccaccttccagctgaccctcgtgctgcgcctggactcacgactctggcccaagatccaggggctgtttagctccgccaactctcccttcctccctggcttcagccagtccctgacgctgagcactggcttccgagtcatcaagaagaagctgtacagctcggaacagctgctcattgaggagtgttgaacttcaacctgagggggccgacagtgccctccaagacagagacgactgaacttttggggtggagactagaggcaggagctgagggactgattcctgtggttggaaaactgaggcagccacctaaggtggaggtgggggaatagtgtttcccaggaagctcattgagttgtgtgcgggtggctgtgcattggggacacatacccctcagtactgtagcatgaaacaaaggcttaggggccaacaaggcttccagctggatgtgtgtgtagcatgtaccttattatttttgttatgacctgttgtaggcagctatcttacagacgcatgaatgtaagagtaggaaggggtgggtgtcagggatcacttgggatctttgacacttgaaaaattacacctggcagctgcgtttaagccttcccccatcgtgtactgcagagttgagctggcaggggaggggctgagagggtgggggctggaacccctccccgggaggagtgccatctgggtcttccatctagaactgtttacatgaagataagatactcactgttcatgaatacacttgatgttcaagtattaagacctatgcaatattttttacttttctaataaacatgtttgttaaaaca

SEQ ID NO: 20127 - protein, 37 aa, Homo sapiens
MYLIIFVMTCCRQLSYRRMNVRVGRGGCQGSLGIFDT

SEQ ID NO: 20128 - DNA, 1194 bp, Homo sapiens
ctagccagttggtaagccaggtgggcaaagaactactgcgcctggcctacagcgagccgtgcggcctgcggggggcgctgctggacgtctgcgtggagcagggcaagagctgccacagcgtgggccagctggcactcgaccccagcctggtgcccaccttccagctgaccctcgtgctgcgcctggactcacgactctggcccaagatccaggggctgtttagctccgccaactctcccttcctccctggcttcagccagtccctgacgctgagcactggcttccgagtcatcaagaagaagctgtacagctcggaacagctgctcattgaggagtgttgaacttcaacctgagggggccgacagtgccctccaagacagagacgactgaacttttggggtggagactagaggcaggagctgagggactgattcctgtggttggaaaactgaggcagccacctaaggtggaggtgggggaatagtgtttcccaggaagctcattgagttgtgtgcgggtggctgtgcattggggacacatacccctcagtactgtagcatgaaacaaaggcttaggggccaacaaggcttccagctggatgtgtgtgtagcatgtaccttattatttttgttactgacagttaacagtggtgtgacatccagagagcagctgggctgctcccgccccagcccggcccagggtgaaggaagaggcacgtgctcctcagagcagccggagggaggggggaggtcggaggtcgtggaggtggtttgtgtatcttactggtctgaagggaccaagtgtgtttgttgtttgttttgtatcttgtttttctgatcggagcatcactactgacctgttgtaggcagctatcttacagacgcatgaatgtaagagtaggaaggggtgggtgtcagggatcacttgggatctttgacacttgaaaaattacacctggcagctgcgtttaagccttcccccatcgtgtactgcagagttgagctggcaggggaggggctgagagggtgggggctggaacccctccccgggaggagtgccatctgggtcttccatctagaactgtttacatgaagataagatactcactgttcatgaatacacttgatgttcaagtattaagacctatgcaatattttttacttttctaataaacatgtttgttaaaacaaaaaa

SEQ ID NO: 20129 - protein, 92 aa, Homo sapiens; identical to SEQ ID NO: 20121

SEQ ID NO: 20130 - DNA, 893 bp, Homo sapiens
ggctttgtagctcccagttcccttctctttaagaatcttcatggctatcacttactgggtctctggtcctgcctgtgtgctgtgctatatctgagcatgctgccaggcaccctgaagccaggcctgatgctccctcctgatccagtcctaatgatcctgcctgaggccaggcagagggacagatggcagcagcccctcgtgtgcctgagtttgtccactggtgcaggtgaaagcagagatgatggagtctcattctgtcacccaggctagagtgccatggcgcaatctcggctcactgcagcctccaccttccaggttcaagcgattctcccacctcggcctcccaagtagctgggattacagctcccgtgagacctggaacaacacggttcagaccaactgggccagaggagaggaaggaagagtggcagagggctcagggtcagatgtctgagcttctgttcccatgggtgcctctcattatgcttgtcaggaagcagaagagagtgcaacctttgacctcatctgaactaacccatctcaccctggtttctcttccctgactgtctccgaacctgttaccccacttggaaaatcagggggtagtgcaggggtgaaccctccattctggaatcacccagcctccagtggtttcaggtccacacccaccagttgtgtgacactggacaactggctttgctcctgctctgcctcagtttccccaaaaaattagttaatgcatggaaagtgtttagaagagatcctcatagacagtaagtgtgtctgttccctgtagtgtcagctactaactgtatggctaggaaaataacagtaactccctcatcagctgtgctgaggattccatcagatcatgtatgtaaagtggttggcat

SEQ ID NO: 20131 - protein, 71 aa, Homo sapiens [sequence omitted]

SEQ ID NO: 20132 - DNA, 4297 bp, Homo sapiens
tttgcatataatttcggcggctttgtgactcttccctgcccatctcccctgccaaccctgacgaagaacctctgctcctcggctctggttgggcttcctgaggctgtggaaagaacagggcactagagtcagacagagcaagcatggcttagaatcccagcttctccactaagaagctgtgtgaccctaaacaagttatataaccttggtttcctcatctataaaatgggaattataacatccacctgctgtggaaattaatgagtaatgcatataaaatgtctggcccactagaaatgctcaacaatattagtttaatgaatgcttagtctcgactgccaggagtgaacttgaggacatttcatgagccgttagggggtcagctcccctcactgatgtccagcacctggcccagggtcagctacacagtgggtgcacatcttcagtggggtgggtccccctctcccaaaaggtggccacctctggctgggagctggcaggacccttctcagccagcagggggcagagtcggtccactggaccctggccgccggctcaggctccctgtggccagatgccagcccttttccctgcaactggagagatgtgaggagcagaggactagggcagggactgttgtccccagagcactggtcctgtctgggtgtcaaggctcttcccacagctgacagagcctgtgattggagctgggaggataaggctccctggagcccttcctgtcattttgttcctaagcctcttaaccctacactgggaactcctagataggcaggcaagcactcagcaacaattggcttaggggatgaatggggagatggaggcacagaggcagagcccagattccctctcaggtctccagttccctagaccaggcctctccccaaaggccccaggtcagcagtgtggtaagcagggatctaaaggcagggcgtcctgcggtctgggccacgtgtgtgggaggacgctgccttttcctcagactctcctttcagggagtgtgcgggtccctgctctggtttgagagggaaccaactactcctctggtctgtgcggcacctcctgtcttggggcccatacccctagagtgccctgggcatggggacccgcacccactttgaacctggtatttctggccaggtccgtgggccacatccacaggcgagtcactgaccacctgggtgtcgtctactatgtgggagacactttctccgaagagtacacaggctccagcctcaaaacagtcgagcggaatgtggaagatgattatatcgccaacctccggaacaactgctggaaggagaagcagcagaaggaaggcttgctgtaccgggcacgctactttggcgacacagatatgtaccacagagcacagaagatgggcacccccagctgcagccgactgtcagaggtgcaggcctccctgcatggatagtcctgggccagccacaccaccgaggtccaagtatgagccagggctgcctccaccctgcaactcctggcagctttggccctggtcatgagcagaggagggagggggagaaagggaggaagcctggtgattgtggcaaagactcctgtccccagcctgacctccagcctccagagaccgagcagctgtggggcctgctgggaaaccaaggtcggtttccgccctctagcgatgctgtcctccccactcctccgctctgctccctggctccaggggtgtgggggaccccagaaccaggcagagtgggaacttgaaactgttgctgagggccacccggggcttcttggtccactccagccatcagtcagcacggccctttctccagcacagcagactattgtccgtgccctggtatttaggccatcacatatggtggggcccaagagagccccatatgcacactgcctgcctgataccaggaagaaccatgtgggaataggtgggccaagagccctcccctttctccatccctccagctaggaggaaatggagcaagatgaacaggcagccacgaggtgggtgggagctggcagtcttggtggcggcaggggccgcgggccctgaccacccccctctggtgggatctgaggcactctctcgaatgccgtcacacctggcagcctggaagccacaggcatccggccttgcccaggcatctcgcctgcggtctgaggaagggaacagaaggtcatgagttcaggccaagcccagagaagtgtgggcagaagcagtgaaggttcttctctgtgtgggtgccctgcccaccccctcctttgcctgtgtcctcccggcctggatccatggctgactctgcctggaggccatttgtgcctgcctctgtgctgccgcaggagggcaggccgcaagtggggttggtgggggtcgagcgggcagcacggtgcagcggtgcagtggcaaggggggctacttgtgtggcataagctagaggagccggtgccgcctgaatgccgagctaactgttgccactctcctccccagactatgaaatccctggagaatttttggtgacatgcactgagccaaggtgatggactgtatatttgaggaaagacaaacaaagaaacaaaattaaaatggaattggaggccgaacgctgcacagctgccctctctctcacccagtaaatgcagaaagctcttaggacagacagaaaacctgccatggggctgcttccctccctcgcagggctggcggaggctccgcatcgcctctctcctaggatacagaaaccatggcaacgaaagtagaatgtaaaactcgcagcagatatcagtgggaagggctgggggagggggcacccagctgcctttcctccctcacaggagccaccaccagccacctctcaggagaagccagaggccctggccaaagataggaggaagaaagagaactctccatagaatgtaatttatagatgcgtgtatatgtatatatatctatttatatgtaaataggcatatatgaagatatatatatatatagtctactttttaaactctgcagggatttggttaagttgttgagctgatttcttccatgttttagaaaatgaggcctgtttggggaaggtaccctggtgatgtttttgctagacattagctgtagctgacagcataaggagagtcgcatcagagcttttcacagccccccgaaaccccagcctggttttgatggcagcagtaatcatgatagtgtgaacccgcgaaggcctcaggattatggttaacctggagaggagcaggccatggaggcaggtgccaggtcagtattgagtcacagtagaggccccacaaggacctgcttgggtgagaccacctctcccctctcagcagcgctggtgggctctttgtcctggtgcccaggagccctccagccccctgcccacagaagggaaggcctgcagagggggccaggatctacctaaccatttccccacccctaagtccctcagtgggctttgccttataggtgccacagggcacagctccatcattgccactggtttttcctaagtcatgcaccaaggacttcagaaagttcttcctccgagtcagtcagtggtgccgggaccccagggcagcctcctcgactcctgaagaaaaggcagtgcccgtggctgcctctgtcttcactcgctgttgatgtgaccgccaggcctcctctcgtaccttggacaaaggatacacctgaaccagaatagttttcttaccctcacattgaaatgaggattttgcttaaaacagcacttgccgccagtgggaggagggaggttttatttattcccacagtttctcctgggccttctggaatgaccatgttttcctgtggcggtgggtgtgtcattgcgcccgccgtcttccaaagccttacttccccaagctgccagccaggaggtgataaccaccctcccagagtttctctcggctctttttttaaaagtcccccaacaaataggattcttgctgggaaaggaagttcggtaaggaaatgtcaaatctggtttttaaacaaggtccaaccctgcaatgaagcagccacttcagcccagagagattataagaactgatgtggccagagtgcctacccactgtggccccggtgctctgcccccacgccccgaccatctggtcttggtagatgtccctagacgggctgagccatgtgcaataagaacatagatcctaaaggatcctctggaagctgtatttcttgaattagaattctcaaattgtacatctgttaatatatgtttattatgtgactggc

SEQ ID NO: 20133 - protein, 112 aa, Homo sapiens [sequence omitted]

SEQ ID NO: 20134 - DNA, 2003 bp, Homo sapiens
ccgacggctaccacgtgaccttcctgagcttgggtttcctcctccggaagattagagggttggcgcatactcaactctaagacctccggaacatggaatctgggcgtgcaccattattgacacctacaccagccgtccctttcttagaagacatacggtagcacttccaccctcgctcaaaactcgggaaaggaggggcggagggtggatgtcatcactccgcgcccggctgcccgcgacgcgccggcgggtggcgcagcccttcgctcgcccggcctccccctccctggttccgcgttctggttccgccatggaatccaacaaggatgaagctgagcgctgtatcagcatcgccctcaaggccatccagagcaaccagcccgaccgggcgctccgcttcctggagaaggcacagcggctgtatccgacgccgcgagttcgcgccctgattgagtccctcaaccagaaaccacagactgccggtgaccaacccccacccacagacacaacccatgccacccacaggaaagcaggtgggaccgatgccccctcggccaacggtgaagctggaggagagagcaccaaaggctacactgcagaacaggttgcagctgtgaaaagggtcaagcaatgtaaagattactatgagatcctgggggtgagcagaggggcctcggatgaggacctgaagaaggcctaccgcagactggccctcaaattccacccagacaagaaccacgcacctggtgccactgaagccttcaaagccattggcacagcatatgcggtactcagcaacccggagaagaggaagcagtatgaccagttcggcgatgacaagagccaggcggcccggcacggccatgggcatggggatttccaccgtggctttgaggccgacatctcccctgaagacctcttcaacatgttctttggcggcggcttcccttctagtaacgtccacgtctacagcaacggccgcatgcgctatacctaccagcaaaggcaggaccgcagggacaaccagggtgatggcgggctaggggtgtttgtgcagctgatgcctatcctcatcctgattctcgtgtcagctctcagccagctcatggtctccagtccaccctacagtctgagtccaagaccgtccgtgggccacatccacaggcgagtcactgaccacctgggtgtcgtctactatgtgggagacactttctccgaagagtacacaggctccagcctcaaaacagtcgagcggaatgtggaagatgattatatcgccaacctccggaacaactgctggaaggagaagcagcagaaggaaggcttgctgtaccgggcacgctactttggcgacacagatatgtaccacagagcacagaagatgggcacccccagctgcagccgactgtcagaggtgcaggcctccctgcatggatagtcctgggccagccacaccaccgaggtccaaactatgaaatccctggagaatttttggtgacatgcactgagccaaggtgatggactgtatatttgaggaaagacaaacaaagaaacaaaattaaaatggaattggaggccgaacgctgcacagctgccctctctctcacccagtaaatgcagaaagctcttaggacagacagaaaacctgccatggggctgcttccctccctcgcagggctggcggaggctccgcatcgcctctctcctaggatacagaaaccatggcaacgaaagtagaatgtaaaactcgcagcagatatcagtgggaagggctgggggagggggcacccagctgcctttcctccctcacaggagccaccaccagccacctctcaggagaagccagaggccctggccaaagataggaggaagaaagagaactctccatagaatgtaatttatagatgcgtgtatatgtatatatatctatttatatgtaaataggcatatatgaagatatatatatatatagtctactttttaaactctgcagggatttggtt

SEQ ID NO: 20135 - protein, 409 aa, Homo sapiens
MSSLRARLPATRRRVAQPFARPASPSLVPRSGSAMESNKDEAERCISIALKAIQSNQPDRALRFLEKAQRLYPTPRVRALIESLNQKPQTAGDQPPPTDTTHATHRKAGGTDAPSANGEAGGESTKGYTAEQVAAVKRVKQCKDYYEILGVSRGASDEDLKKAYRRLALKFHPDKNHAPGATEAFKAIGTAYAVLSNPEKRKQYDQFGDDKSQAARHGHGHGDFHRGFEADISPEDLFNMFFGGGFPSSNVHVYSNGRMRYTYQQRQDRRDNQGDGGLGVFVQLMPILILILVSALSQLMVSSPPYSLSPRPSVGHIHRRVTDHLGVVYYVGDTFSEEYTGSSLKTVERNVEDDYIANLRNNCWKEKQQKEGLLYRARYFGDTDMYHRAQKMGTPSCSRLSEVQASLHG

SEQ ID NO: 20136 - DNA, 3038 bp, Homo sapiens
tttgcatataatttcggcggctttgtgactcttccctgcccatctcccctgccaaccctgacgaagaacctctgctcctcggctctggttgggcttcctgaggctgtggaaagaacagggcactagagtcagacagagcaagcatggcttagaatcccagcttctccactaagaagctgtgtgaccctaaacaagttatataaccttggtttcctcatctataaaatgggaattataacatccacctgctgtggaaattaatgagtaatgcatataaaatgtctggcccactagaaatgctcaacaatattagtttaatgaatgcttagtctcgactgccaggagtgaacttgaggacatttcatgagccgttagggggtcagctcccctcactgatgtccagcacctggcccagggtcagctacacagtgggtgcacatcttcagtggggtgggtccccctctcccaaaaggtggccacctctggctgggagctggcaggacccttctcagccagcagggggcagagtcggtccactggaccctggccgccggctcaggctccctgtggccagatgccagcccttttccctgcaactggagagatgtgaggagcagaggactagggcagggactgttgtccccagagcactggtcctgtctgggtgtcaaggctcttcccacagctgacagagcctgtgattggagctgggaggataaggctccctggagcccttcctgtcattttgttcctaagcctcttaaccctacactgggaactcctagataggcaggcaagcactcagcaacaattggcttaggggatgaatggggagatggaggcacagaggcagagcccagattccctctcaggtctccagttccctagaccaggcctctccccaaaggccccaggtcagcagtgtggtaagcagggatctaaaggcagggcgtcctgcggtctgggccacgtgtgtgggaggacgctgccttttcctcagactctcctttcagggagtgtgcgggtccctgctctggtttgagagggaaccaactactcctctggtctgtgcggcacctcctgtcttggggcccatacccctagagtgccctgggcatggggacccgcacccactttgaacctggtatttctggccaggtccgtgggccacatccacaggcgagtcactgaccacctgggtgtcgtctactatgtgggagacactttctccgaagagtacacaggctccagcctcaaaacagtcgagcggaatgtggaagatgattatatcgccaacctccggaacaactgctggaaggagaagcagcagaaggaaggcttgctgtaccgggcacgctactttggcgacacagatatgtaccacagagcacagaagatgggcacccccagctgcagccgactgtcagaggtgcaggcctccctgcatggatagtcctgggccagccacaccaccgaggtccaagtatgagccagggctgcctccaccctgcaactcctggcagctttggccctggtcatgagcagaggagggagggggagaaagggaggaagcctggtgattgtggcaaagactcctgtccccagcctgacctccagcctccagagaccgagcagctgtggggcctgctgggaaaccaaggtcggtttccgccctctagcgatgctgtcctccccactcctccgctctgctccctggctccaggggtgtgggggaccccagaaccaggcagagtgggaacttgaaactgttgctgagggccacccggggcttcttggtccactccagccatcagtcagcacggccctttctccagcacagcagactattgtccgtgccctggtatttaggccatcacatatggtggggcccaagagagccccatatgcacactgcctgcctgataccaggaagaaccatgtgggaataggtgggccaagagccctcccctttctccatccctccagctaggaggaaatggagcaagatgaacaggcagccacgaggtgggtgggagctggcagtcttggtggcggcaggggccgcgggccctgaccacccccctctggtgggatctgaggcactctctcgaatgccgtcacacctggcagcctggaagccacaggcatccggccttgcccaggcatctcgcctgcggtctgaggaagggaacagaaggtcatgagttcaggccaagcccagagaagtgtgggcagaagcagtgaaggttcttctctgtgtgggtgccctgcccaccccctcctttgcctgtgtcctcccggcctggatccatggctgactctgcctggaggccatttgtgcctgcctctgtgctgccgcaggagggcaggccgcaagtggggttggtgggggtcgagcgggcagcacggtgcagcggtgcagtggcaaggggggctacttgtgtggcataagctagaggagccggtgccgcctgaatgccgagctaactgttgccactctcctccccagactatgaaatccctggagaatttttggtgacatgcactgagccaaggtgatggactgtatatttgaggaaagacaaacaaagaaacaaaattaaaatggaattggaggccgaacgctgcacagctgccctctctctcacccagtaaatgcagaaagctcttaggacagacagaaaacctgccatggggctgcttccctccctcgcagggctggcggaggctccgcatcgcctctctcctaggatacagaaaccatggcaacgaaagtagaatgtaaaactcgcagcagatatcagtgggaagggctgggggagggggcacccagctgcctttcctccctcacaggagccaccaccagccacctctcaggagaagccagaggccctggccaaagataggaggaagaaagagaactctccatagaatgtaatttatagatgcgtgtatatgtatatatatctatttatatgtaaataggcatatatgaagatatatatatatatagtctactttttaaactctgcagggat

SEQ ID NO: 20137 - protein, 112 aa, Homo sapiens [sequence omitted]

SEQ ID NO: 20138 - DNA, 2620 bp, Homo sapiens
tttgcatataatttcggcggctttgtgactcttccctgcccatctcccctgccaaccctgacgaagaacctctgctcctcggctctggttgggcttcctgaggctgtggaaagaacagggcactagagtcagacagagcaagcatggcttagaatcccagcttctccactaagaagctgtgtgaccctaaacaagttatataaccttggtttcctcatctataaaatgggaattataacatccacctgctgtggaaattaatgagtaatgcatataaaatgtctggcccactagaaatgctcaacaatattagtttaatgaatgcttagtctcgactgccaggagtgaacttgaggacatttcatgagccgttagggggtcagctcccctcactgatgtccagcacctggcccagggtcagctacacagtgggtgcacatcttcagtggggtgggtccccctctcccaaaaggtggccacctctggctgggagctggcaggacccttctcagccagcagggggcagagtcggtccactggaccctggccgccggctcaggctccctgtggccagatgccagcccttttccctgcaactggagagatgtgaggagcagaggactagggcagggactgttgtccccagagcactggtcctgtctgggtgtcaaggctcttcccacagctgacagagcctgtgattggagctgggaggataaggctccctggagcccttcctgtcattttgttcctaagcctcttaaccctacactgggaactcctagataggcaggcaagcactcagcaacaattggcttaggggatgaatggggagatggaggcacagaggcagagcccagattccctctcaggtctccagttccctagaccaggcctctccccaaaggccccaggtcagcagtgtggtaagcagggatctaaaggcagggcgtcctgcggtctgggccacgtgtgtgggaggacgctgccttttcctcagactctcctttcagggagtgtgcgggtccctgctctggtttgagagggaaccaactactcctctggtctgtgcggcacctcctgtcttggggcccatacccctagagtgccctgggcatggggacccgcacccactttgaacctggtatttctggccaggtccgtgggccacatccacaggcgagtcactgaccacctgggtgtcgtctactatgtgggagacactttctccgaagagtacacaggctccagcctcaaaacagtcgagcggaatgtggaagatgattatatcgccaacctccggaacaactgctggaaggagaagcagcagaaggaaggcttgctgtaccgggcacgctactttggcgacacagatatgtaccacagagcacagaagatgggcacccccagctgcagccgactgtcagaggtgcaggcctccctgcatggatagtcctgggccagccacaccaccgaggtccaagtatgagccagggctgcctccaccctgcaactcctggcagctttggccctggtcatgagcagaggagggagggggagaaagggaggaagcctggtgattgtggcaaagactcctgtccccagcctgacctccagcctccagagaccgagcagctgtggggcctgctgggaaaccaaggtcggtttccgccctctagcgatgctgtcctccccactcctccgctctgctccctggctccaggggtgtgggggaccccagaaccaggcagagtgggaacttgaaactgttgctgagggccacccggggcttcttggtccactccagccatcagtcagcacggccctttctccagcacagcagactattgtccgtgccctggtatttaggccatcacatatggtggggcccaagagagccccatatgcacactgcctgcctgataccaggaagaaccatgtgggaataggtgggccaagagccctcccctttctccatccctccagctaggaggaaatggagcaagatgaacaggcagccacgaggtgggtgggagctggcagtcttggtggcggcaggggccgcgggccctgaccacccccctctggtgggatctgaggcactctctcgaatgccgtcacacctggcagcctggaagccacaggcatccggccttgcccaggcatctcgcctgcggtctgaggaagggaacagaaggtcatgagttcaggccaagcccagagaagtgtgggcagaagcagtgaaggttcttctctgtgtgggtgccctgcccaccccctcctttgcctgtgtcctcccggcctggatccatggctgactctgcctggaggccatttgtgcctgcctctgtgctgccgcaggagggcaggccgcaagtggggttggtgggggtcgagcgggcagcacggtgcagcggtgcagtggcaaggggggctacttgtgtggcataagctagaggagccggtgccgcctgaatgccgagctaactgttgccactctcctccccagactatgaaatccctggagaatttttggtgacatgcactgagccaaggtgatggactgtatatttgaggaaagacaaacaaagaaacaaaattaaaatggaattggaggccg

SEQ ID NO: 20139 - protein, 112 aa, Homo sapiens [sequence omitted]

SEQ ID NO: 20140 - DNA, 2252 bp, Homo sapiens
gttgggggagggggaggggtggcgaggcgcggctacgcctgcgcactgaggcgcgcggtggctgctgggaggcgtagtttttccctcttgttcctctgcgggatgcgagccgtctggagactcgggcggccgggacttcagctttcggggtgctggcggagcccgctggggtttgaggtctccgagaatgaaacgcgctggcagccgggacgaagggaacttacctggaagtgaactcgaactacttttcccaaggggccgttcggtagcccaggccagtcgccggcctgggaaatattacagttcaggaaaataaacataactcctttaagggagagaatgggcgctagacagggagacatttctgttcttcgggcgccagggaaaggcgcttccgtatcttcactccctctcacctctcgggctgagggtcagggaccactctcccaaaatgcaagccggcctttgcacccaccccagtccgccgcctcggactgtcctgaagccgggcccctcactcctcccgatgatgagattcggagcgggtggcctggtgggaggtgctgacctcagccaccgccagtcctccatcgcccgcaagagtccagcggcggtcagccatgtggacgccgaggctgctgagttgccctggacaggagcctcctgagccagggagggaagagtgaagctggctttacaactcatcacctcgcttcacccgggaaccctttcttttttctttaacctaagttttccaaggagtttttcttaatccacgctagaggggagagagacaccgggtggtgcttgtgatcaccactcagtaaaccgtctgggaataacaggcactccgaagggcccagtctcatcctgacggctaccacgtgaccttcctgagcttgggtttcctcctcgggaagattagagggttggcgcagataatgtgattggcaataatacccatagggctttgcagtttaggaagctccttcacctgtgccttctcacttgagcctgccagtcagggatgcagagcaaagatcattatctttattctatgggtgaggaaaatctctgaggtaagggatgcccaggatgacacagctagaaagtaaaatgttctgtgactctgtaaatgtttatgaaggaaaagaaatgaaattgaggaacagcagtcagcctcctaaccggccctgcccgcctgatgagattgagaaagcggaacgctggtggaagaggtagcctggactgctgaactttcctccctccggactcttgcaggttgatctttggcctgtttgcctccccttggagagggtttcgggctgtatttgccaggacacctgagggtcaagcaatgtaaagattactatgagatcctgggggtgagcagaggggcctcggatgaggacctgaagaaggcctaccgcagactggccctcaaattccacccagacaagaaccacgcacctggtgccactgaagccttcaaagccattggcacagcatatgcggtactcagcaacccggagaagaggaagcagtatgaccagttcggcgatgacaagagccaggcggcccggcacggccatgggcatggggatttccaccgtggctttgaggccgacatctcccctgaagacctcttcaacatgttctttggcggcggcttcccttctagtaacgtccacgtctacagcaacggccgcatgcgctatacctaccagcaaaggcaggaccgcagggacaaccagggtgatggcgggctaggggtgtttgtgcagctgatgcctatcctcatcctgattctcgtgtcagctctcagccagctcatggtctccagtccaccctacagtctgagtccaagaccgtccgtgggccacatccacaggcgagtcactgaccacctgggtgtcgtctactatgtgggagacactttctccgaagagtacacaggctccagcctcaaaacagtcgagcggaatgtggaagatgattatatcgccaacctccggaacaactgctggaaggagaagcagcagaaggaaggcttgctgtaccgggcacgctactttggcgacacagatatgtaccacagagcacagaagatgggcacccccagctgcagccgactgtcagagactatgaaatccctggagaatttttggtgacatgcactgagccaaggtgatggactgtatatttgaggaaagacaaacaaagaaacaaaattaaaatggaattggaggccg

SEQ ID NO: 20141 - protein, 172 aa, Homo sapiens
MFFGGGFPSSNVHVYSNGRMRYTYQQRQDRRDNQGDGGLGVFVQLMPILILILVSALSQLMVSSPPYSLSPRPSVGHIHRRVTDHLGVVYYVGDTFSEEYTGSSLKTVERNVEDDYIANLRNNCWKEKQQKEGLLYRARYFGDTDMYHRAQKMGTPSCSRLSETMKSLENFW

SEQ ID NO: 20142 - DNA, 1579 bp, Homo sapiens
ccgacggctaccacgtgaccttcctgagcttgggtttcctcctccggaagattagagggttggcgcatactcaactctaagacctccggaacatggaatctgggcgtgcaccattattgacacctacaccagccgtccctttcttagaagacatacggtagcacttccaccctcgctcaaaactcgggaaaggaggggcggagggtggatgtcatcactccgcgcccggctgcccgcgacgcgccggcgggtggcgcagcccttcgctcgcccggcctccccctccctggttccgcgttctggttccgccatggaatccaacaaggatgaagctgagcgctgtatcagcatcgccctcaaggccatccagagcaaccagcccgaccgggcgctccgcttcctggagaaggcacagcggctgtatccgacgccgcgagttcgcgccctgattgagtccctcaaccagaaaccacagactgccggtgaccaacccccacccacagacacaacccatgccacccacaggaaagcaggtgggaccgatgccccctcggccaacggtgaagctggaggagagagcaccaaaggctacactgcagaacaggttgcagctgtgaaaagggtcaagcaatgtaaagattactatgagatcctgggggtgagcagaggggcctcggatgaggacctgaagaaggcctaccgcagactggccctcaaattccacccagacaagaaccacgcacctggtgccactgaagccttcaaagccattggcacagcatatgcggtactcagcaacccggagaagaggaagcagtatgaccagttcggcgatgacaagagccaggcggcccggcacggccatgggcatggggatttccaccgtggctttgaggccgacatctcccctgaagacctcttcaacatgttctttggcggcggcttcccttctagtaacgtccacgtctacagcaacggccgcatgcgctatacctaccagcaaaggcaggaccgcagggacaaccagggtgatggcgggctaggggtgtttgtgcagctgatgcctatcctcatcctgattctcgtgtcagctctcagccagctcatggtctccagtccaccctacagtctgagtccaagaccgtccgtgggccacatccacaggcgagtcactgaccacctgggtgtcgtctactatgtgggagacactttctccgaagagtacacaggctccagcctcaaaacagtcgagcggaatgtggaagatgattatatcgccaacctccggaacaactgctggaaggagaagcagcagaaggaaggcttgctgtaccgggcacgctactttggcgacacagatatgtaccacagagcacagaagatgggcacccccagctgcagccgactgtcagaggtgcaggcctccctgcatggatagtcctgggccagccacaccaccgaggtccaaactatgaaatccctggagaatttttggtgacatgcactgagccaaggtgatggactgtatatttgaggaaagacaaacaaagaaacaaaattaaaatggaattggaggccg

SEQ ID NO: 20143 - protein, 409 aa, Homo sapiens; identical to SEQ ID NO: 20135

SEQ ID NO: 20144 - DNA, 2538 bp, Homo sapiens
gtcacgtgagagtgggcggagggggtggaggtttgtctccgctgtttcatctctatggctgtcagaggtgggcggctttgaccgagaggctgctggagctcgtgtttggacgcgatgtttcgtctgaactcactttctgctttggcagaactggctgtgggttctcgatggtaccatggaggatcacagcccatccagatccggcgaagactaatgatggtggctttcctgggagcatctgcagtaactgcaagtactggtcttttgtggaagagggcccatgcagaatctccaccatgtgtagacaacctaaaaagtgacatcggtgataaagggaagaataaagatgaaggggatgtttgtaaccatgagaaaaagactgcagatcttgcccctcacccagaagagaaaaagaagaaacgttctggattcagagacagaaaagtgatggaatatgagaataggattcgagcctactccacgccagacaaaatcttccgatattttgccaccttgaaagtcatcagtgagcctggtgaagcagaagtgtttatgacaccagaagattttgtgcgatccataacacccaatgaaaaacaaccagaacacttgggtctggatcaatatataataaaacgctttgatggaaagaaaatttcccaggaacgagaaaaatttgctgatgaaggcagtatattttacacccttggagaatgtgggctcatatccttttcagactacattttcctcacaactgttctttccactcctcagagaaattttgaaattgccttcaagatgtttgatttgaatggagatggagaagtagatatggaagaatttgaacaggcaaagcatcattcgctcccaaaccagtatgggtatgcgccacagagatcgtccaactactggcaacaccctcaagtctggcttgtgttcagccctcacaacctacttttttggagctgatctgaagggaaagctgacaatcaaaaacttcctcgaatttcagcgtaaactgcagcatgatgttctgaagcttgagtttgaacgccatgaccctgtggatgggagaattactgagaggcagtttggtggcatgctacttgcctacagtggggtgcagtccaagaagctgaccgccatgcagaggcagctcaagaagcacttcaaagaaggaaagggtctgacatttcaggaggtggagaacttctttactttcctaaagaacattaatgatgtggacactgcattgagtttttaccatatggctggagcatctcttgataaagtgaccatgcagcaggtggccaggacagtggctaaagtggagctctcagaccacgtgtgtgatgtggtgtttgcactctttgactgtgatggcaatggcgaactgagcaataaggaatttgtttccatcatgaagcaacggctgatgagaggcctggaaaagcccaaagacatgggtttcactcgcctcatgcaggccatgtggaaatgtgcacaggaaactgcctgggacttcgctttacccaaacagtaaccccacactgcaagaggggacccctccacccccagtaccctggaccccctccgcagagtctcggcagagccctttgtgctgctgcttctggaagtagtcccccttcctcccgggatgacctcaggactctgtcggtttcccctctttacccttccccgtccccgtgttctgctgggctctgattctgcccaatgagtatccccataggttctcaaaaacatgaacaagtctgtaaagctcagacatttgtcagcctcaacagcaccacccattcaagcatcctgtggataaagaattcagggaaccatccacacacctgccaaccctgggaagcatccagttctcaaatcgtttttgctatggatttatactaacaagaacattccttgacttccctcctgctggtgttttaaagccacaagtagggaagatatctggcaggcagaaagaagtctgtgatgataaacaatgatgaggatgacctaggcaccctacgctagtgtgagaagcctgcgccccaggaaggatctgtgttagtccctgggatggctccaaggcctgctctaggaaggcagcatgctcagtgggaacacagcaagattcagaatttaaagtagttgcttcatggctctgtgcactcccttttcttcctcgcagcctccctaagatgactccagtgtgaccctgtgcttagtgagcaatagtgattgagctcatgttccctgcaagtgccatttcctctccaggatgggcctctaaagctgaggcctggctcagagcctgtttgccctctgtcttaaacaattgtaaatatcacttaaattataaccatttgcaataaacatccccaaagttccctgtctcctttattttagggtcctctaggcccttttcattttatgtccccactggatttgagatcttgctggaagcagacctgttttctttctaccagagtctggttctttctgatgaagagcagctttaggcacaga

SEQ ID NO: 20145 - protein, 284 aa, Homo sapiens
MFRLNSLSALAELAVGSRWYHGGSQPIQIRRRLMMVAFLGASAVTASTGLLWKRAHAESPPCVDNLKSDIGDKGKNKDEGDVCNHEKKTADLAPHPEEKKKKRSGFRDRKVMEYENRIRAYSTPDKIFRYFATLKVISEPGEAEVFMTPEDFVRSITPNEKQPEHLGLDQYIIKRFDGKKISQEREKFADEGSIFYTLGECGLISFSDYIFLTTVLSTPQRNFEIAFKMFDLNGDGEVDMEEFEQAKHHSLPNQYGYAPQRSSNYWQHPQVWLVFSPHNLLFWS

SEQ ID NO: 20146 - DNA, 2411 bp, Homo sapiens
gtcacgtgagagtgggcggagggggtggaggtttgtctccgctgtttcatctctatggctgtcagaggtgggcggctttgaccgagaggctgctggagctcgtgtttggacgcgatgtttcgtctgaactcactttctgctttggcagaactggctgtgggttctcgatggtaccatggaggatcacagcccatccagatccggcgaagactaatgatggtggctttcctgggagcatctgcagtaactgcaagtactggtcttttgtggaagagggcccatgcagaatctccaccatgtgtagacaacctaaaaagtgacatcggtgataaagggaagaataaagatgaaggggatgtttgtaaccatgagaaaaagactgcagatcttgcccctcacccagaagagaaaaagaagaaacgttctggattcagagacagaaaagtgatggaatatgagaataggattcgagcctactccacgccagacaaaatcttccgatattttgccaccttgaaagtcatcagtgagcctggtgaagcagaagtgtttatgacaccagaagattttgtgcgatccataacacccaatgaaaaacaaccagaacacttgggtctggatcaatatataataaaacgctttgatggaaagaaaatttcccaggaacgagaaaaatttgctgatgaaggcagtatattttacacccttggagaatgtgggctcatatccttttcagactacattttcctcacaactgttctttccactcctcagagaaattttgaaattgccttcaagatgtttgatttgaatggagatggagaagtagatatggaagaatttgaacaggcaaagcatcattcgctcccaaaccagtatgggtatgcgccacagagatcgtccaactactggcaacaccctcaagtctggcttgtgttcagccctcacaacctacttttttggagctgatctgaagggaaagctgacaatcaaaaacttcctcgaatttcagcgtaaactgcagcatgatgttctgaagcttgagtttgaacgccatgaccctgtggatgggagaattactgagaggcagtttggtggcatgctacttgcctacagtggggtgcagtccaagaagctgaccgccatgcagaggcagctcaagaagcacttcaaagaaggaaagggtctgacatttcaggaggtggagaacttctttactttcctaaagaacattaatgatgtggacactgcattgagtttttaccatatggctggagcatctcttgataaagtgaccatgcagcaggtggccaggacagtggctaaagtggagctctcagaccacgtgtgtgatgtggtgtttgcactctttgactgtgatggcaatggcgaactgagcaataaggaatttgtttccatcatgaagcaacggctgatgagaggcctggaaaagcccaaagacatgggtttcactcgcctcatgcaggccatgtggaaatgtgcacaggaaactgcctgggacttcgctttacccaaacagtaaccccacactgcaagaggggacccctccacccccagtaccctggaccccctccgcagagtctcggcagagccctttgtgctgctgcttctggaagtagtcccccttcctcccgggatgacctcaggactctgtcggtttcccctctttacccttccccgtccccgtgttctgctgggctctgattctgcccaatgagtatccccataggttctcaaaaacatgaacaagtctgtaaagctcagacatttgtcagcctcaacagcaccacccattcaagcatcctgtggataaagaattcagggaaccatccacacacctgccaaccctgggaagcatccagttctcaaatcgtttttgctatggatttatactaacaagaacattccttgacttccctcctgctggtgttttaaagccacaagtagggaagatatctggcaggcagaaagaagtctgtgatgataaacaatgatgaggatgacctaggcaccctacgctagtgtgagaagcctgcgccccaggaaggatctgtgttagtccctgggatggctccaaggcctgctctaggaaggcagcatgctcagtgggaacacagcaagattcagaatttaaagtagttgcttcatggctctgtgcactcccttttcttcctcgcagcctccctaagatgactccagtgtgaccctgtgcttagtgagcaatagtgattgagctcatgttccctgcaagtgccatttcctctccaggatgggcctctaaagctgaggcctggctcagagcctgtttgccctctgtcttaaacaattgtaaatatcacttaaattataaccatttgcaataaacatccccaaagttccctgtctccttt

SEQ ID NO: 20147 - protein, 284 aa, Homo sapiens; identical to SEQ ID NO: 20145

SEQ ID NO: 20148 - DNA, 893 bp, Homo sapiens
ggcaatggcgaactgagcaataaggaatttgtttccatcatgaagcaacggctgatgagaggcctggaaaagcccaaagacatgggtttcactcgcctcatgcaggccatgtggaaatgtgcacaggaaactgcctgggacttcgctttacccaaacagtaaccccacactgcaagaggggacccctccacccccagtaccctggaccccctccgcagagtctcggcagagccctttgtgctgctgcttctggaagtagtcccccttcctcccgggatgacctcaggactctgtcggtttcccctctttacccttccccgtccccgtgttctgctgggctctgattctgcccaatgagtatccccataggttctcaaaaacatgaacaagtctgtaaagctcagacatttgtcagcctcaacagcaccacccattcaagcatcctgtggataaagaattcagggaaccatccacacacctgccaaccctgggaagcatccagttctcaaatcgtttttgctatggatttatactaacaagaacattccttgacttccctcctgctggtgttttaaagccacaagtagggaagatatctggcaggcagaaagaagtctgtgatgataaacaatgatgaggatgacctaggcaccctacgctagtgtgagaagcctgcgccccaggaaggatctgtgttagtccctgggatggctccaaggccctgtgcttagtgagcaatagtgattgagctcatgttccctgcaagtgccatttcctctccaggatgggcctctaaagctgaggcctggctcagagcctgtttgccctctgtcttaaacaattgtaaatatcacttaaattataaccatttgcaataaacatccccaaagttc

SEQ ID NO: 20149 - protein, 75 aa, Homo sapiens
MCTGNCLGLRFTQTVTPHCKRGPLHPQYPGPPPQSLGRALCAAASGSSPPSSRDDLRTLSVSPLYPSPSPCSAGL

SEQ ID NO: 20150 - DNA, 534 bp, Homo sapiens
attattattattttgatatggagtttcgctcctgtcacccaggctggagtgcaatgtcgtgatctcggcccactgcaacctctgcctcctgggttcccaagcgattctcctgccagcctgaccaacatggtgaaaccctaactctactaaagatacaaaaattagctgggcttggtggcaggcgcctgtaatcccagctacttgggaggctgaggcaggagattcacttgaacccgggaggcggaggtgcagtgagccaagattgtgccactgcactccagcctggtcaacagagtgagactctgtcttaaaaaaaaaagaatgtaattaatttgcaaaagtgaattgaggaacaaattcaacatttcatatcctttcacacctgctggaattttgttttatttttagttacagattttgccatcttccttctttcccatccaaagttctttaaattatttttaaaacatttactcagttttagctcctctttcaaattagcaactttagttcttttttatataccataaccct

SEQ ID NO: 20151 - protein, 42 aa, Homo sapiens
SRPTATSASWVPKRFSCQPDQHGETLTLLKIQKLAGLGGRRL

SEQ ID NO: 20152 - DNA, 747 bp, Homo sapiens
gtgagagtgggcggagggggtggaggtttgtctccgctgtttcatctctatggctgtcagaggtgggcggctttgaccgagaggctgctggagctcgtgtttggacgcgatgtttcgtctgaactcactttctgctttggcagaactggctgtgggttctcgatggtaccatggaggatcacagcccatccagatccggcgaagactaatgatggtggctttcctgggagcatctgcagtaactgcaagtactggtcttttgtggaagagggcccatgcagaatctccaccatgtgtagacaacctaaaaagtgacatcggtgataaagggaagaataaagatgaaggggatgtttgtaaccatgagaaaaagactgcagatcttgcccctcacccagaagagaaaaagaagaaacgttctggattcagagacagaaaagtgatggaatatgagaataggattcgagcctactccacgccagacaaaatcttccgatattttgccaccttgaaagtcatcagtgagcctggtgaagcagaagtgtttatgacaccagaagattttgtgcgatccataacacccaatgaaaaacaaccagaacacttgggtctggatcaatatataataaaacgctttgatggaaaggccagattctccaaaaagaaaatattacacagggtcagaaagaaaagtaaagggtcaattttacagaggaggaagaaagcacttcagaaagaagaaagaac

SEQ ID NO: 20153 - protein, 211 aa, Homo sapiens
MFRLNSLSALAELAVGSRWYHGGSQPIQIRRRLMMVAFLGASAVTASTGLLWKRAHAESPPCVDNLKSDIGDKGKNKDEGDVCNHEKKTADLAPHPEEKKKKRSGFRDRKVMEYENRIRAYSTPDKIFRYFATLKVISEPGEAEVFMTPEDFVRSITPNEKQPEHLGLDQYIIKRFDGKARFSKKKILHRVRKKSKGSILQRRKKALQKEE

SEQ ID NO: 20154 - DNA, 452 bp, Homo sapiens
ttgatttctggcttaactctgtatcagaatttcttgctcggatcatttggtattgttaatattcgtctatgaaataagatgtttcaaagaattcaacatgctaaggcaatacttaggaaacactgtgcttcaaggtctgcctgtctcctctgctgaacattttaaataatgggatagggatagaggtgtgagtcaccacgcctggccaggccaccattttcttagagagttgcatactgtgcagtgtctgaaagcagtcatttgatatattttgttcaattttctgtatttttgccctggtaggaagtcagatctattatcgtttgctccattatggctgtaagcaaaagtcttctttttgtatttcatcagttctgtaatatttaattaattttagtattatatcattgcagcaatggcttcaactaccagaaatacttatattatttttt

SEQ ID NO: 20155 - protein, 31 aa, Homo sapiens
WDRDRGVSHHAWPGHHFLRELHTVQCLKAVI

SEQ ID NO: 20156 - DNA, 542 bp, Homo sapiens
cacatatgggtagtggctattgtattgaacagcacagatacaaaatatttctgtcatcacaacatgttctacttgacaagagctgtgatagaacattataattaaatgaatctgcattctctagtttgagatgatagtttcatttcaaccaagtttcttgtgctttttctattaaaattctcttttagattcgaaagttgtatttcttaaaattttaagcagattttattgtaatatatttcaaataaagtagcattattatttttttcaggtctttgacctgtaatagcatttaaattaagcaatcttcgaatttgattttcaatttaagcattgatattatctgatattttatgctaataagttgtgagatggtattgaagcataatggttaagtgcaatgccattgggagctaggggcagtggcacacacctgtcatgtcagcctcccaaagtgctgggattacaggtgtgagccactgcacccagcctattatgtatattgtaacacaacaaaaactagagttgtaaggggagaaaaa

SEQ ID NO: 20157 - protein, 30 aa, Homo sapiens
MSASQSAGITGVSHCTQPIMYIVTQQKLEL

SEQ ID NO: 20158 - DNA, 584 bp, Homo sapiens
gtggggacggagtctcattctgttgcccaggctggagtgcagtggtgtgatctcggctcactgcaacctctgcctcctgggttcaagcaattctcctgcttcagcctccgaagtagctggaactacaggcgcggcaccacatctggctaatttttgtatttttagtagagatggggttttacatgttggccaggctagtctcgaactcctgacgacctcaggtgatccacctgcctcggcctcccaaaatgctgggattacaggcctgagccaccacacctggcctacccaggctagtcttggaactcccagactcaagcgatccactgcgcccatccaaaaccactttattttgaacgtggtatgtaaaataaattaccataattataactaattgctattactgggtgttaactttaaaattataattaacactagttttgtatctttatgccttattctggtggttcatcattaaaacaatttttttttctgtagaaacggggtctcactatgttgcccagggtggtctcaatctcctgggttcaagcattccgcctgccttggcttcccaaaatatgggg

SEQ ID NO: 20159 - protein, 130 aa, Homo sapiens
WGRSLILLPRLECSGVISAHCNLCLLGSSNSPASASEVAGTTGAAPHLANFCIFSRDGVLHVGQASLELLTTSGDPPASASQNAGITGLSHHTWPTQASLGTPRLKRSTAPIQNHFILNVVCKINYHNYN

SEQ ID NO: 20160 - DNA, 2949 bp, Homo sapiens
ggcgccgtttccagttgagagatggcggccgccgcaggtagatcgctcctgctgctcctctcctctcggggcggcggcggcgggggcgccggcggctgcggggcgctgactgccggctgcttccctgggctgggcgtcagccgccaccggcagcagcagcaccaccggacggtacaccagaggatcgcttcctggcagaatttgggagctgtttattgcagcactgttgtgccctctgatgatgttacagtggtttatcaaaatgggttacctgtgatatctgtgaggctaccatcccggcgtgaacgctgtcagttcacactcaagcctatctctgactctgttggtgtatttttacgacaactgcaagaagaggatcggggaattgacagagttgctatctattcaccagatggtgttcgcgttgctgcttcaacaggaatagacctcctcctccttgatgactttaagctggtcattaatgacttaacataccacgtacgaccaccaaaaagagacctcttaagtcatgaaaatgcagcaacgctgaatgatgtaaagacattggtccagcaactatacaccacactgtgcattgagcagcaccagttaaacaaggaaagggagcttattgaaagactagaggatctcaaagagcagctggctcccctggaaaaggtacgaattgagattagcagaaaagctgagaagaggaccactttggtgctatggggtggccttgcctacatggccacacagtttggcattttggcccggcttacctggtgggaatattcctgggacatcatggagccagtaacatacttcatcacttatggaagtgccatggcaatgtatgcatattttgtaatgacacgccaggaatatgtttatccagaagccagagacagacaatacttactatttttccataaaggagccaaaaagtcacgttttgacctagagaaatacaatcaactcaaggatgcaattgctcaggcagaaatggaccttaagagactgagagacccattacaagtacatctgcctctccgacaaattggtgaaaaagattgatctgcaaaaagcctctgaatcctggcagaaggaacacctgtttgcctttttaattaaagcattgcaggtggaagctgggagccatgtggggggtagagcgtttttacctttaattataaaacaaaaacagaaaggatctgagggaagaagggaatgttaaaacctgaggatcaggcattgtggaatataagctcaaagggcttagtgaatattgtcttaaccaagtatctcagtttctggatgaaaatgatgcagttatatagttgagagattcataaagagaaaacaatgctgggggtgttcgtttcttgcatcttctttgcagagtcagcaaaagagtaacacaccagcaccccactcgactctatttgtttttaatttaactgtccctatttttgacataggagtaaataaatatactagaaaagcaaattctcatgatatgctaaaatatcattagcatttattttaaattggacccagtctctgcagagttaccaggaatctttccttccagcatccctttactgaccacctacctgtacctcttggttacactcattttttccatttgataattggaaccaacttataactgtttaataattgacactttagattatctcttaataccttcttaaatgtctatatatcccagtgctctggatcagtgtctaaaaatcactggcaacactgcatgaggttgttggttttgttttgttttattaattagtctttcacaggaggaataattgccctcctttatatacttatctattgataatcccctctccctccagaacacaaatcagagggaaagggggtgttcagctgtactaccaaatcaggaagatgtaaggtttacaaattggctaagaatcatggctctgtagccatttcaaccagaataattttattgctaatctgctttgtgtgacagcattccaggccagccagatgggactgccttgtctggaggctttgttcatctcgaaggacacacacttccacactgtttgtgagccctcccacctccacaacttcagttgtaaatcaagtgtgtggatctcaaagggtgcaatttatctttatataggaatacatttctagggcttccttcaagcccactctcttcaccctattttttcttatcttaaattgagagaaagagaattaatcttatactttgtcaaaacattttctaccatatttccagatgacatctgcgcttgaagagtcaaaggaatctgtgtctaatatcctgtttttaactgctgtaggggcaggatggaaaggatgatgggggctgccacaccactgattggccttttctttcacgtgattcatccttcctcattgtggcaaggagtttctttctctttttcttcctcctttgggatcattgtgtatgaaaagaaaaactttaaatgacaaacccagactccaggtgccttgcaaaggttgaaggccagccaggattgctgctgctgctgctactcctgccaacacccctttcattggcatgacggaatgaaaggatgcatgtctccacttcctgaccctccgcccacttccttctccctccaccacccccagtcgtcagctccttccctcatttatttttgttaagttgtgtgaattatttttaacccatttatcctgtttgtgcatagggtttttaagaagaaacagcacagtgcaacgagcaaatctttttggggtgtgtgggaagcaagggagggaggacatggagaaaagttctttaaacaaatagcaaactattgaacatgtgtaaaatcctgtatcatttatgaaatatgtataaaaagcaatgtaccttctggaacaataaatacttattcaatttttgaa

SEQ ID NO: 20161 - protein, 351 aa, Homo sapiens; identical to SEQ ID NO: 2527

SEQ ID NO: 20162 - DNA, 2874 bp, Homo sapiens
agttgagagatggcggccgccgcaggtagatcgctcctgctgctcctctcctctcggggcggcggcggcgggggcgccggcggctgcggggcgctgactgccggctgcttccctgggctgggcgtcagccgccaccggcagcagcagcaccaccggacggtacaccagaggatcgcttcctggcagaatttgggagctgtttattgcagcactgttgtgccctctgatgatgttacagtggtttatcaaaatgggttacctgtgatatctgtgaggctaccatcccggcgtgaacgctgtcagttcacactcaagcctatctctgactctgttggtgtatttttacgacaactgcaagaagaggatcggggaattgacagagttgctatctattcaccagatggtgttcgcgttgctgcttcaacaggaatagacctcctcctccttgatgactttaagctggtcattaatgacttaacataccacgtacgaccaccaaaaagagtagagatggggttttgccatgttggccagaatggttttgaactcctgacctcaagttatctacctgcctcagcctcccaaagtgccgagattatagccgtacgaattgagattagcagaaaagctgagaagaggaccactttggtgctatggggtggccttgcctacatggccacacagtttggcattttggcccggcttacctggtgggaatattcctgggacatcatggagccagtaacatacttcatcacttatggaagtgccatggcaatgtatgcatattttgtaatgacacgccaggaatatgtttatccagaagccagagacagacaatacttactatttttccataaaggagccaaaaagtcacgttttgacctagagaaatacaatcaactcaaggatgcaattgctcaggcagaaatggaccttaagagactgagagacccattacaagtacatctgcctctccgacaaattggtgaaaaagattgatctgcaaaaagcctctgaatcctggcagaaggaacacctgtttgcctttttaattaaagcattgcaggtggaagctgggagccatgtggggggtagagcgtttttacctttaattataaaacaaaaacagaaaggatctgagggaagaagggaatgttaaaacctgaggatcaggcattgtggaatataagctcaaagggcttagtgaatattgtcttaaccaagtatctcagtttctggatgaaaatgatgcagttatatagttgagagattcataaagagaaaacaatgctgggggtgttcgtttcttgcatcttctttgcagagtcagcaaaagagtaacacaccagcaccccactcgactctatttgtttttaatttaactgtccctatttttgacataggagtaaataaatatactagaaaagcaaattctcatgatatgctaaaatatcattagcatttattttaaattggacccagtctctgcagagttaccaggaatctttccttccagcatccctttactgaccacctacctgtacctcttggttacactcattttttccatttgataattggaaccaacttataactgtttaataattgacactttagattatctcttaataccttcttaaatgtctatatatcccagtgctctggatcagtgtctaaaaatcactggcaacactgcatgaggttgttggttttgttttgttttattaattagtctttcacaggaggaataattgccctcctttatatacttatctattgataatcccctctccctccagaacacaaatcagagggaaagggggtgttcagctgtactaccaaatcaggaagatgtaaggtttacaaattggctaagaatcatggctctgtagccatttcaaccagaataattttattgctaatctgctttgtgtgacagcattccaggccagccagatgggactgccttgtctggaggctttgttcatctcgaaggacacacacttccacactgtttgtgagccctcccacctccacaacttcagttgtaaatcaagtgtgtggatctcaaagggtgcaatttatctttatataggaatacatttctagggcttccttcaagcccactctcttcaccctattttttcttatcttaaattgagagaaagagaattaatcttatactttgtcaaaacattttctaccatatttccagatgacatctgcgcttgaagagtcaaaggaatctgtgtctaatatcctgtttttaactgctgtaggggcaggatggaaaggatgatgggggctgccacaccactgattggccttttctttcacgtgattcatccttcctcattgtggcaaggagtttctttctctttttcttcctcctttgggatcattgtgtatgaaaagaaaaactttaaatgacaaacccagactccaggtgccttgcaaaggttgaaggccagccaggattgctgctgctgctgctactcctgccaacacccctttcattggcatgacggaatgaaaggatgcatgtctccacttcctgaccctccgcccacttccttctccctccaccacccccagtcgtcagctccttccctcatttatttttgttaagttgtgtgaattatttttaacccatttatcctgtttgtgcatagggtttttaagaagaaacagcacagtgcaacgagcaaatctttttggggtgtgtgggaagcaagggagggaggacatggagaaaagttctttaaacaaatagcaaactattgaacatgtgtaaaatcctgtatcatttatgaaatatgtataaaaagcaatgtaccttctggaacaataaatacttattcaatttttgaa

SEQ ID NO: 20163 - protein, 330 aa, Homo sapiens
MAAAAGRSLLLLLSSRGGGGGGAGGCGALTAGCFPGLGVSRHRQQQHHRTVHQRIASWQNLGAVYCSTVVPSDDVTVVYQNGLPVISVRLPSRRERCQFTLKPISDSVGVFLRQLQEEDRGIDRVAIYSPDGVRVAASTGIDLLLLDDFKLVINDLTYHVRPPKRVEMGFCHVGQNGFELLTSSYLPASASQSAEIIAVRIEISRKAEKRTTLVLWGGLAYMATQFGILARLTWWEYSWDIMEPVTYFITYGSAMAMYAYFVMTRQEYVYPEARDRQYLLFFHKGAKKSRFDLEKYNQLKDAIAQAEMDLKRLRDPLQVHLPLRQIGEKD

SEQ ID NO: 20164 - DNA, 3226 bp, Homo sapiens
cttcgttcttaacagccctgccccaaggctccctgaacggagccagatggaagttgtcccctttccctcctcctccgggcgggttggggagttctgagttgccgcggccgccttgtgtgtgccaggagagtggcagtgccatgctgctgggagctgccccggagagcagcccaggaccccggcggggccgcccctcgtcctctctcgtccccgaggggtcgggcaggaaggaaaatcaaactttattcccctctgtgacttcctctgtgtgtgtgcatggggaaccggctccctcgagatggatgctgcattgcttcaggaggcaagcttcatcctcttgggtccttaaaggtgcttttgggggtcctttcgagggctactgtataagcgtgttcacgcgtgcctgaagcgggaagggtggtcagcaggcacaggagaagcgaatatggtacaccagaggatcgcttcctggcagaatttgggagctgtttattgcagcactgttgtgccctctgatgatgttacagtggtttatcaaaatgggttacctgtgatatctgtgaggctaccatcccggcgtgaacgctgtcagttcacactcaagcctatctctgactctgttggtgtatttttacgacaactgcaagaagaggatcggggaattgacagagttgctatctattcaccagatggtgttcgcgttgctgcttcaacaggaatagacctcctcctccttgatgactttaagctggtcattaatgacttaacataccacgtacgaccaccaaaaagagacctcttaagtcatgaaaatgcagcaacgctgaatgatgtaaagacattggtccagcaactatacaccacactgtgcattgagcagcaccagttaaacaaggaaagggagcttattgaaagactagaggatctcaaagagcagctggctcccctggaaaaggtacgaattgagattagcagaaaagctgagaagaggaccactttggtgctatggggtggccttgcctacatggccacacagtttggcattttggcccggcttacctggtgggaatattcctgggacatcatggagccagtaacatacttcatcacttatggaagtgccatggcaatgtatgcatattttgtaatgacacgccaggaatatgtttatccagaagccagagacagacaatacttactatttttccataaaggagccaaaaagtcacgttttgacctagagaaatacaatcaactcaaggatgcaattgctcaggcagaaatggaccttaagagactgagagacccattacaagtacatctgcctctccgacaaattggtgaaaaagattgatctgcaaaaagcctctgaatcctggcagaaggaacacctgtttgcctttttaattaaagcattgcaggtggaagctgggagccatgtggggggtagagcgtttttacctttaattataaaacaaaaacagaaaggatctgagggaagaagggaatgttaaaacctgaggatcaggcattgtggaatataagctcaaagggcttagtgaatattgtcttaaccaagtatctcagtttctggatgaaaatgatgcagttatatagttgagagattcataaagagaaaacaatgctgggggtgttcgtttcttgcatcttctttgcagagtcagcaaaagagtaacacaccagcaccccactcgactctatttgtttttaatttaactgtccctatttttgacataggagtaaataaatatactagaaaagcaaattctcatgatatgctaaaatatcattagcatttattttaaattggacccagtctctgcagagttaccaggaatctttccttccagcatccctttactgaccacctacctgtacctcttggttacactcattttttccatttgataattggaaccaacttataactgtttaataattgacactttagattatctcttaataccttcttaaatgtctatatatcccagtgctctggatcagtgtctaaaaatcactggcaacactgcatgaggttgttggttttgttttgttttattaattagtctttcacaggaggaataattgccctcctttatatacttatctattgataatcccctctccctccagaacacaaatcagagggaaagggggtgttcagctgtactaccaaatcaggaagatgtaaggtttacaaattggctaagaatcatggctctgtagccatttcaaccagaataattttattgctaatctgctttgtgtgacagcattccaggccagccagatgggactgccttgtctggaggctttgttcatctcgaaggacacacacttccacactgtttgtgagccctcccacctccacaacttcagttgtaaatcaagtgtgtggatctcaaagggtgcaatttatctttatataggaatacatttctagggcttccttcaagcccactctcttcaccctattttttcttatcttaaattgagagaaagagaattaatcttatactttgtcaaaacattttctaccatatttccagatgacatctgcgcttgaagagtcaaaggaatctgtgtctaatatcctgtttttaactgctgtaggggcaggatggaaaggatgatgggggctgccacaccactgattggccttttctttcacgtgattcatccttcctcattgtggcaaggagtttctttctctttttcttcctcctttgggatcattgtgtatgaaaagaaaaactttaaatgacaaacccagactccaggtgccttgcaaaggttgaaggccagccaggattgctgctgctgctgctactcctgccaacacccctttcattggcatgacggaatgaaaggatgcatgtctccacttcctgaccctccgcccacttccttctccctccaccacccccagtcgtcagctccttccctcatttatttttgttaagttgtgtgaattatttttaacccatttatcctgtttgtgcatagggtttttaagaagaaacagcacagtgcaacgagcaaatctttttggggtgtgtgggaagcaagggagggaggacatggagaaaagttctttaaacaaatagcaaactattgaacatgtgtaaaatcctgtatcatttatgaaatatgtataaaaagcaatgtaccttctggaacaataaatacttattcaatttttgaa

SEQ ID NO: 20165 - protein, 302 aa, Homo sapiens
MVHQRIASWQNLGAVYCSTVVPSDDVTVVYQNGLPVISVRLPSRRERCQFTLKPISDSVGVFLRQLQEEDRGIDRVAIYSPDGVRVAASTGIDLLLLDDFKLVINDLTYHVRPPKRDLLSHENAATLNDVKTLVQQLYTTLCIEQHQLNKERELIERLEDLKEQLAPLEKVRIEISRKAEKRTTLVLWGGLAYMATQFGILARLTWWEYSWDIMEPVTYFITYGSAMAMYAYFVMTRQEYVYPEARDRQYLLFFHKGAKKSRFDLEKYNQLKDAIAQAEMDLKRLRDPLQVHLPLRQIGEKD

SEQ ID NO: 20166 - DNA, 550 bp, Homo sapiens
tgactctgggcaaatcatttaactcagtgggtaacttagtttcactatctataaaatgaggataaaaacagtacctgggtcatagtgtatcacaagaattaaatgagataatctatgtaaaattcttggcacatgatatacttgaaaaatattatcattggtataactactattgtccagcctaatctccagctattcttgcgcatactccagttgtaacaaaccagtggctgcttctcaaatacatcttactccctcatgaggtcatgtcagattggtgctgcccagaatgctgaccacacttttccagtcacattatatttccaaatgtttgctttttttttttttttctttttttgagacacagtttcgttcttgttgtccaggctggggtgcaatggcaccatgtcagctcatgcactccagcctgggcgacagagtaagactccgtctcaaaacaacaagaaatgtagtcagtaggaaggatgtcgagatctcttgaaggaaaacagcagcagatacttgaggaagaacatgctaaaggagcaga

SEQ ID NO: 20167 - protein, 70 aa, Homo sapiens [sequence omitted]

SEQ ID NO: 20168 - DNA, 483 bp, Homo sapiens
tataccagtaaaacaggcaaatgctacaaatcagaaccttttccccctccagagagccagtttattgtcactacctgtaggccccttgaagaactttgtcttttactgagtgagatcagaagctactgaataagtctccttctgcctgatgtcatcattcccactgctgaattacgaccagagcgacagtccctggaaaccatccaatttattagtgtttcccttgctgcctcagcatttctggttaatgcactacagcaaatcatttggagggacaacctgaatgaagctctgccctgtgtactctgcaaaaatgttcaaaccattatcaagagtgttggaaatgaaagacaacagcatgaaattgagaagataaaattttatcagagattgtctttttaaaacaatgacttcaaagtaagaatatacattgactaatatgtacagaattattattaaaacaaatatttatttcacaccaac

SEQ ID NO: 20169 - protein, 44 aa, Homo sapiens
MSSFPLLNYDQSDSPWKPSNLLVFPLLPQHFWLMHYSKSFGGTT

SEQ ID NO: 20170 - DNA, 828 bp, Homo sapiens
ctcgtataagtgaagtgagattcttttaaaagtactgtctttccctttgctgtgaactaaaactcatgttccttaactctcatagagatgttggtctttttctttgtaatttgtgggagttctttgtatattagggaaactaatcctttgtgattttaactgcatttctaccaccaccccctcccccacaagtttgtcactttttaacattttaagtcctttaagtctgaatctggacattcaactcttaggcacatttaaagggctgtattatatatgaaagtagggaactacctgtaaatgttgccaagtaaatacagtattagtcctgaacatatttgaagacagctatgtggatgaaggttagattagatttattccttctctttatggagaagcaaattgcagctcagcatatggaagaattttctcttattagatcagcttcaaaatggaatggaaatcctttggaatagatggattcttcgttactagatttgttattgggaaggagatgccagccttttccccagttcattgcacaaaataagcacttagtgttgaataaacgaatctttggggcatctggatggttggattagctggtttttaataactttcacactgtgtttattttttatttttttgaaacaaggtctcatgttgtcatccaggctatagtgcagtggcacaagcatggcttactctcctgagcctcgacttcctgggttcaggggatcctcccacctcagcctcttcaagtagctgggtctacatacacacgccaccattgcactccagcctaggcaacaagagcgaaactgtctg

SEQ ID NO: 20171 - protein, 41 aa, Homo sapiens [sequence omitted]

SEQ ID NO: 20172 - DNA, 398 bp, Homo sapiens
agtccggttagtgcatctaaagtccaaataccactctacagtatgaaagtattaatctatctgttctactgtgaggagctgagtttcacaaatgagaaagagtgagcaagaagcagaaaccactttaatcagagtggttactgttctaacattccaaaactgaatttatctcacgtgtttgtgggactggtttcttttttaaaaggaatataaaaagcagttttctttttttcttttttgaggcagagtcttgctctgtcacctaggctggagtgcagtgatgcaatctcggctcacggcagcctctgcctcttgggttcaagtaattctcctgcctcagcgaactcctgacctcaggtgatccacccgccttggcttcccaaagtgctgggattaca

SEQ ID NO: 20173 - protein, 45 aa, Homo sapiens
KAVFFFSFLRQSLALSPRLECSDAISAHGSLCLLGSSNSPASANS

SEQ ID NO: 20174 - DNA, 2367 bp, Homo sapiens
aaagcagtgcttctctctggggccaaggccagagctgtggacaccttatcccactcatcctcatcctcttcctctgataaagcccctaccagtgctgataaagtctttctcgtgagagcctagaggccttaaaaaaaaaagtgcttgaaagagaaggggacaaaggaacaccagtattaagaggattttccagtgtttctggcagttggtccagaaggatgcctccattcctgcttctcacctgcctcttcatcacaggcacctccgtgtcacccgtggccctagatccttgttctgcttacatcagcctgaatgagccctggaggaacactgaccaccagttggatgagtctcaaggtcctcctctatgtgacaaccatgtgaatggggagtggtaccacttcacgggcatggcgggagatgccatgcctaccttctgcataccagaaaaccactgtggaacccacgcacctgtctggctcaatggcagccaccccctagaaggcgacggcattgtgcaacgccaggcttgtgccagcttcaatgggaactgctgtctctggaacaccacggtggaagtcaaggcttgccctggaggctactatgtgtatcgtctgaccaagcccagcgtctgcttccacgtctactgtggtcatttttatgacatctgcgacgaggactgccatggcagctgctcagataccagcgagtgcacatgcgctccaggaactgtgctaggccctgacaggcagacatgctttgatgaaaatgaatgtgagcaaaacaacggtggctgcagtgagatctgtgtgaacctcaaaaactcctaccgctgtgagtgtggggttggccgtgtgctaagaagtgatggcaagacttgtgaagacgttgaaggatgccacaataacaatggtggctgcagccactcttgccttggatctgagaaaggctaccagtgtgaatgtccccggggcctggtgctgtctgaggataaccacacttgccaagtccctgtgttgtgcaaatcaaatgccattgaagtgaacatccccagggagctggttggtggcctggagctcttcctgaccaacacctcctgccgaggagtgtccaacggcacccatgtcaacatcctcttctctctcaagacatgtggtacagtggtcgatgtggtgaatgacaagattgtggccagcaacctcgtgacaggtctacccaagcagaccccggggagcagcggggacttcatcatccgaaccagcaagctgctgatcccggtgacctgcgagtttccacgcctgtacaccatttctgaaggatacgttcccaaccttcgaaactccccactggaaatcatgagccgaaatcatgggatcttcccattcactctggagatcttcaaggacaatgagtttgaagagccttaccgggaagctctgcccaccctcaagcttcgtgactccctctactttggcattgagcccgtggtgcacgtgagcggcttggaaagcttggtggagagctgctttgccacccccacctccaagatcgacgaggtcctgaaatactacctcatccgggatggctgtgtttcagatgactcggtaaagcagtacacatcccgggatcacctagcaaagcacttccaggtccctgtcttcaagtttgtgggcaaagaccacaaggaagtgtttctgcactgccgggttcttgtctgtggagtgttggacgagcgttcccgctgtgcccagggttgccaccggcgaatgcgtcgtggggcaggaggagaggactcagccggtctacagggccagacgctaacaggcggcccgatccgcatcgactgggaggactagttcgtagccatacctcgagtccctgcattggacggctctgctctttggagcttctccccccaccgccctctaagaacatctgccaacagctgggttcagacttcacactgtgagttcagactcccagcaccaactcactctgattctggtccattcagtgggcacaggtcacagcactgctgaacaatgtggcctgggtggggtttcatctttctagggttgaaaactaaactgtccacccagaaagacactcaccccatttccctcatttctttcctacacttaaatacctcgtgtatggtgcaatcagaccacaaaatcagaagctgggtataatatttcaagttacaaaccctagaaaaattaaacagttactgaaattatgacttaaatacccaatgactccttaaatatgtaaattatagttataccttgaaatttcaattcaaatgcagactaattatagggaatttggaagtgtatcaataaaacagtatataattttaaaagt

SEQ ID NO: 20175 - protein, 545 aa, Homo sapiens; identical to SEQ ID NO: 2529

SEQ ID NO: 20176 - DNA, 1128 bp, Homo sapiens
cctgcctgacatctgggtagggggtttgtccctggaattctgggacactggctggggtttgaggagagaagccagtacctacctggctgcaggatgaagctggccagtggcttcttggttttgtggctcagccttgggggtggcctggctcagagcgacacgagccctgacacggaggagtcctattcagactggggccttcggcacctccggggaagctttgaatccgtcaatagctacttcgattcttttctggagctgctgggagggaagaatggagtctgtcagtacaggtgccgatatggaaaggcaccaatgcccagacctggctacaagccccaagagcccaatggctgcggctcctatttcctgggtctcaaggtaccagaaagtatggacttgggcattccagcaatgacaaagtgctgcaaccagctggatgtctgttatgacacttgcggtgccaacaaatatcgctgtgatgcaaaattccgatggtgtctccactcgatctgctctgaccttaagcggagtctgggctttgtctccaaagtggaagcagcctgtgattccctggttgacactgtgttcaacaccgtgtggaccttgggctgccgcccctttatgaatagtcagcgggcagcttgcatctgtgcagaggaggagaaggaagagttatgaggaagaagtgattccttcctggttttgagtgacaccacagctgtcagccttcaagatgtcaagtcttcgagtcagcgtgactcattcattcttccaacagtttggacaccacaaagcaggagaaagggaacatttttctacagctggaaagtgagtcctatcctttgaggaaatttgaaaaaagacatggagtggtttgaaagctactcttcatttaagactgctctccccaaccaagacacatttgcctggaaattcagttcttagcttaaagactaaaatgcaagcaaaccctgcaattcctggacctgatagttatattcatgagtgaaattgtggggagtccagccatttgggaggcaatgactttctgctggcccatgtttcagttgccagtaagcttctcacatttaataaagtgtactttttagaacatttggaaagaga

SEQ ID NO: 20177 - protein, 195 aa, Homo sapiens; identical to SEQ ID NO: 2531

SEQ ID NO: 20178 - DNA, 588 bp, Homo sapiens
gtaatctgaaaatggttcgctattcacttgacccggagaaccccacaaaatcatgcaaatcaagaggttccaatcttcgtgttcactttaagaacactcgtgaaactgctcaggccatcaagggtatgtatatacaaaaaggcacgaagtatctgaaagatgtcactttacagaaacagtgcataccattccgacattacaatggtggagttggcaggtgtgcgcaggcaaagcagtggggctggatcttaaggtcggtggcccaaaaagagtgctgaatttttgctgcacgtgcttaaaaacacagagagtaatgctgaacttaagggtagattctctggtcattgagcatatccaagtgaacaaagcacctaagatgcaccaacggacttacagagctcatggattaacccatacatgagctcttcctgccacattgagatgatctttactgaaaaggaacagattgttcctaaaccagaagaggaggttgcccagaagaaaaagatatcccagaagaaactgaagaaacaaaaacttatggcacgggaataaattcagcattaaaataaatgtaattaaaaggaa

SEQ ID NO: 20179 - protein, 88 aa, Homo sapiens
MVRYSLDPENPTKSCKSRGSNLRVHFKNTRETAQAIKGMYIQKGTKYLKDVTLQKQCIPFRHYNGGVGRCAQAKQWGWILRSVAQKEC

SEQ ID NO: 20180 - DNA, 1409 bp, Homo sapiens
tatccaataaatggctccatgaacgtggacaagaatttcgaagaccttgtacgttgtcagaattggaatgacaaacaggcttccctttttctcctattgttgtactcttatgtgtctgatatacacatttcctagtcttaactttcaggagtttacaattgactaacactccatgattgattcagtcatgaacctcatcccatgtttcatctgtggacaattgcttactttgtgggttcttttaaaagtaacacgaaatcatcatattgcataaaaccttaaagttctgttggtatcacagaagacaaggcagagtttaaagtgaggaattttatatttaaagaactttttggttggataaaaacataatttgagcatccagttttagtatttcactacatctcagttggtgggtgttaagtggatctgaagactagtaataaactaggacactaactgggttccatgtgattgccctttcatatgatcttctaagttgatttttttcctcccaagtcttttttaaagaaagtatactgtattttaccaaccccctctcttttcttttagctcctctgtggtgaattaaacgtacttgagttaaaatatttcgattttttttttttttttaatggaaagtcctgcataacaacactgggccttcttaactaaaatgctcaccacttagcctgtttttttatcccttttttaaaatgacagatgattttgttcaggaattttgctgtttttcttagtgctaataccttgcctcttattcctgctacagcagggtggtaatattggcattctgattaaatactgtgccttaggagactggaagtttaaaaatgtacaagtcctttcagtgatgagggaattgattttttttaaaagtctttttcttagaaagccaaaatgtttgtttttttaagattctgaaatgtgttgtgacaacaatgacctatttatgatcttaaatcttttttaaaaaaatgtttgttttctgtgtggtgtttttcgtatttaaatccgaatgtatgatgtggcagtaacaggttaacttatgtaatttctttagtacatagggcttaggtttatactcttggtttccactcacactaatgtcacatggttaagaaaaacttaggctctctgaagtttcagatatttcatgaatcaagatgtgcttccttcaaagagagctctaaaatactttactgtggttatgaagttattatgggccaggcatggtggctcacgccttcaatcccagcactttgggaggccgaggcaggcggatcacctgaggctaggagttcgagaccagcctggccaacatggtgaaaccccatccctactaaaattaccaaaattagccgggtgtggtggtgcatgcctgtagtcccagc

SEQ ID NO: 20181 - protein, 76 aa, Homo sapiens
MNQDVLPSKRALKYFTVVMKLLWARHGGSRLQSQHFGRPRQADHLRLGVRDQPGQHGETPSLLKLPKLAGCGGACL

SEQ ID NO: 20182 - DNA, 8192 bp, Homo sapiens
agatggaaaattactaagaggtaagggaagattctggctaaactgacctaacaggattcttgctgaagtcagggaagagtgatcatcatccaggggatagtggaagatgaagaacccagttaggttttgagggtgatcacatggcaaggacggggaattctggctaacctgacttagcagggttcttgcttaaattggacaatgcagaggtaaataccagaagcccaaagtcagggcctacttgagaagaaagttcagaggagcctgagtagttgggtcaaggagagattctttgtcaacatgttaattctgttattttaacattaaaaattcatagcctatttggaatttatggaaatacggtgtggcagatattctgtgaaacctttttaccagttaaaaaaaaaaaaccaaacacctagatacccaataaaatcacttaagatactttaaatgcattggcaagcctggaagaaagtaaagggtgttccaaaaggcaaactgaacaatgatcccaaacttagagaattaaagaggggacaaaacacagaggctggaggtatgtgcctccaggaactagagctttgggaataacagctctgtaagaggaggatctgccacagtgtaggctgctgaatttgagaccctggcataaactctaaatctccacaaggattacaccttcagtaaagaaagaatgggtttgaaaataaatctcttgtgatacaggagccttatggggaactgtctgtttccatcctggctggggcatagtgtgtatgataggggagctacttcagggagtactatgtatggaattttccacttgtgtcatgttagcactaaaagttttgaacttcagagcattttgcattttggacttttggtatgctcaacctgtattccatgttacggatataccacagtttagccattcacccatcgaaggacatttggatagtttttagtttttggctattacaaataaagatgtgtttacatttctatgtgaaaaatgcattttcatttttctgggagaaatgccaagaggttgtattgtattttaatttagatataaatatttagatattaattctttagcttgattatagtgctgaaagtcactttactagcattattagaaaaataatactaggggccaggcgtggtggctcatgcctgtaatcccagcactttgggaggccaaggcaggaggatcgcttgaggccaggagttcaagatcaccctggtccacatagcaagactccatcttacaaaaagattgcctgatgtttatagtgcactggacattacaagggaaacttttgcggttgttgttggcatattcttcaggatattactactgatgtttagttgccactagagtatttgtattactgaatttttacaccattgaatttactgtgtttttattcacagaaagatgagccagatgctttcaaagagctggggacaggaaatagaattgctacatggctgttttatgtaagtcgtcactaaaatttttagattaagttgggatttgatgacaagattcattttaatgttttaagtttgttctgtgtagctctgattcagcatcctagtttaacatttttacaactgaataaagtgagttaagaattattttgcacttgcaactttttcaggctataagatagatgttcattatagaaacttctggacaaacttagaatttatagtgccactacctgcagataatcattaatattttaacatatagtctctctgtttagtaatatataatatgtgtatataaaaatctctatatatttgaatttctatacatacacatacacattatttcagtaaacttctgaattacatttttttattgaagtatatcagaagagtgcgcaaattaagtattataacttaattttcacaaagtgaacacttctggtgtattcagtactaagatgaagaaatagcatattacaacccccagaaaccctatctcagagttttaaaacagtatgatcataattcaatttttaaaattgtttatatatttttatatatggaaaaaagttttgattgtagtgtttgttctagttaccccaaataaagcactccaaaactctcctttctgagtggtttaaaataacaacgattttcttaatgtatctctaacagttatgaggttgactgggctcaactcatggttcctgctccaaatctgacatgtatttgccgtcaaatgcctggcactggggtatcttgaaggctaaggttgaggctggctgtcagccagaatgcctaaagtctggccaatacatgtggctgagcttcttcacagcatagtgactggattgcaagaggaagcatcccaaaagaacaatgcaaaagtacatggtattgttatgacctaccctcagaagtcacagatgttaattttgctgtattctgttacagcaattacaaaggtctgcccagcttcaaggagagggcacacagaccctaccactgcagacgaatgtcagcgtcacataaaaagagcatgtaggatgggacatattgggatgtattatatttggaaaatgcaatctgccataatgtcataacctttgttaacttaaaaaagatattttaggccaggcacagtgacacacgcctgtaatcccaacactttgagaggccgaggcgggcagatcacttgaggtcaggagttcgagaccagcctggccaacgtggtgaaaccccttctccactataaatacaaaaattagctgggtgtggtggcacacacctgtagtaccagctactcaggaggctgaggcacgagaatcacttgaacctgggaggcagaggttgcagtgagccgagatcgcgccactgcactctccagcctggataacggagcgtggctccatctcaaaaaataaaaataaaaaaaatatatatattttatatgtagacttaattttggttatttcatcactttttccattccttagccctatttgaattacatctttttgttgtctgtagtatctcactccctaccaaaatctgtctgttcagtctatttcctttttctcttcctgctaccttccctgtttgttttctttcccttcttccctatctccttcctctccgtatgcctccttttctccccaattcccaatttgtatttctctcacaactccatcttgtttccaaaaggaggtaaggtacattacaaagattcatataaaaaaagagaaataccacaaagggaaaaccaggagagggttagtacggtatacaaattcatgctgcaaaggcttgcatattttctagaggtgagtcttagaggttgtaccagtttatatcccaattttaagtgggatatgtttgtgaagtatgtttgtcagactttttgatctatgtatatttcacttattaaattagcagttattgtggctttaatttgcatttctcttattagagaggttgagcatcttttcagatgtttaaaagccattagtgtttatgtgttcctggttctgcttatatttctttgttttatgaatattgatgctgtattatttggcccactatctgtttctccctcttaatgtaaacacccttcctgtttttctaaaatagttgtatagcattttaattgattatcattttttccgttatttaaataccattcccagaggggcacatagaatatctcaaattacttttcctctcatgcacaactttttaatttcctcagagtttaattttttcattggttaagtgttcttagttctttactattagttatgtatttatcattgtaaaataccttctatctcatttaatgctttttaccttgatttaaactgtatctcatactaagatcatatcctgttttccttggatagcatttgcccaaaatcttacatttttgtgttctgtgtttgtaagtcacttgttttagatgcagctctgatataatatgtagctgggttttgctctgtgatctaatcagtctatacattctacttatgttgctttaaaaaaatctttatgatccatgtttcctttgccttgttttttgtgattctttggttaatttaaaaggtttccatttttattctaggttatctttatgactataactttatataatcctttaactttctcacttttatttaatatgtttgattcccttccatgagaaatggcaaaactgagtatttttattttacatttatttaaatatttcttgagcacctactgttcttgaggtactattgttctagacattaatgatcagcaatgaacaaaacagatgaaaattcctgcctccatggagattacattctaatacaataaaatacatatttatatctgtgtattgactcattagttttaagtcattactttttccctctggctataaataagttcctatctcaaattatatccccagtcttccatcctgatagttttttgttattcattcctttgctttttgtagtttttttacttatgtatataaacctaaatggcattttatttttgaaaaactgagtagcatgtaccaaccatgctatataagaacaagtccatatgttcccaatattctagtatccaatatcaagtctatataatggcatgttttactttattctaccagcacttttgataacaccctcttgtttcttatagatgagtgatgtgtctgcaggaggagccactgtttttcctgaagttggagctagtgtttggcccaaaaaagtaagcctgtttgttttgtttttggtttattaattttttccctaaggaagagatgcacttgtattcatggtctaattaatgaattacatttttttttctttttcattttttgagacctgttctcgctctgttgcccaggctggagcccagcagtataaacatggctcactgcagctttgacctcctgggttcaagcctcagcctcccaaatagtggggactacaggtgcatgtcaccatgcccagctaatgtttaaattttttgtagagacagtgtctccctgtattgcccaggctggtcttgaactcttgggctcaagtgatcctcccacctcagcttcccaaaatgttgggattacaggcatgaacccctgtgcctgaccaaattacatttttaaaggtatttttatggtccttgccacgagtacttagaggtaatgaatgaccaggaattagtatttaaaatttttcatttctaaaatgggttctgcattgtgttttcccctccatcttgctatgtaagatatgttagctttcttttggcaaatacttttgttgtcaaacatttttatggtatttttcatatgatcaaaaacggttcttaaagtgatataaccatattttcagaattatattagaggaaaataaaatactgctatagagttcttccgcaggaacaaagggaaaattactgctgaaaacggccgggcacggtggctcacgtctgtaatcccagcactttgggaggccaagatgggcggatcatctgaggttaggagttcgagaccagcctgaccaacatggtgaaagcccgtctctactaaaaatacaaaattagccaggcctggtgttgcacgcctgtaatcccagctatttgagacgctgaggcaggagaatcacttcaacctgggaggtggaggttgcagtgagctgagatcgtgccattgcactccagcctgggcgatagagcaagactctgtctcaaaaaaaaaaaaaaagtaataactaccgaaagcaattacctggcattgtatacttggggataattgtgaattgttctccatagggaactgctgttttctggtataatctgtttgccagtggagaaggagattatagtacacggcatgcagcctgtccagtgctagttggcaacaaatggggtaaatatttcatatattctgcgaagataatgtaatttttgtttcttattttggaactattatctgtgtcttaaaaacaaaagcccccatgtttgcttaatatgattttaacattgtacaggattcagccaaacaagtgcctaatcataatacaaatttgaaatcagaattttgatgacagattttatttttaactatttttacttattccaagaaacaatgactgactcaaaattgaataagacaatatcttcccctcaaagggttaataatctgattgagacatactaatggattataatgtagtacatattaatacaaaaatgtaaacagaagatggtgactgcctaagtttggggagtcttcttcaaagctttttctttaaatttggtcctgaagatagaacagcagttttccaaacatgttagataccaggttctaatgtgaggctcgagtagcacctaatgtgcaaaatttaaagaggcactcactctcagtcagggacatgcaagtgcaggaccacatttttaaaaagtaaaaagaaacaggtaaaattagttttaatatctattaattagccccatgtatccatttcaatctgtgttactagccacatgttgagtggttacatacaggacattacaaggttaaggagtgaggcctgatcaggattttaaaatctccccttatgattatagtgtttaagaaccactggactagaatgaggagaggctagttggtgagagagagtttagaaagctgttttctgttgtctaagtgggagatgataatggcctggattaaagcatcagtgaaagggttggagagcaaatagatttgagagagatgtaaggaaaattgtcagggtttgatgaataaagtgtagatacaagggttgaagaaggaaaaagagttaagaattaaggttcctgctttagatattttgactgggttctatggtaccagagacaaaaaaaaaatagaaaattaactgcttttgggatacatttttacatggtatacattttttaaaggtattttggaaacttgatgagcatacaatagcaatggttgataagagagttgttcctttagagtgcaaagtttgtgttcattattgtctttgtattttggaggctgtactttgaaaacaatacataaagcaatattctactcttacctgtacctgtatcttaggtccatttgtgtctcatttcaagcctcacattgaacattggaaactgtaagaaatgcacatagactggcaaatatacatgtgtatacatacatgtatgtacatacacgcacacaagtgtgtacacatatgtatataggtatataaaatctgtgttttcagcatttagccaagtttttaagtagcatctgcctttatccggttttggtgttgaacttttatcccatgatgaaactttgttatagacctagcttttagaaactaattaaatactgattagattaagggggaaaattaatatattacttttctctcacagtatccaataaatggctccatgaacgtggacaagaatttcgaagaccttgtacgttgtcagaattggaatgacaaacaggcttccctttttctcctattgttgtactcttatgtgtctgatatacacatttcctagtcttaactttcaggagtttacaattgactaacactccatgattgattcagtcatgaacctcatcccatgtttcatctgtggacaattgcttactttgtgggttcttttaaaagtaacacgaaatcatcatattgcataaaaccttaaagttctgttggtatcacagaagacaaggcagagtttaaagtgaggaattttatatttaaagaactttttggttggataaaaacataatttgagcatccagttttagtatttcactacatctcagttggtgggtgttaagctagaatgggctgtgtgataggaaacaaatgccttacagatgtgcctaggtgttctgtttacctagtgtcttactctgttttctggatctgaagactagtaataaactaggacactaactgggttccatgtgattgccctttcatatgatcttctaagttgatttttttcctcccaagtcttttttaaagaaagtatactgtattttaccaaccccctctcttttcttttagctcctctgtggtgaattaaacgtacttgagttaaaatatttcgattttttttttttttttaatggaaagtcctgcataacaacactgggccttcttaactaa

SEQ ID NO: 20183 - protein, 102 aa, Homo sapiens [sequence omitted]

SEQ ID NO: 20184 - DNA, 3049 bp, Homo sapiens
gccagcgggctgagggtaggaagtagccgctccgagtggaggcgactgggggctgaagagcgcgccgccctctcgtcccactttccaggtgtgtgatcctgtaaaattaaatcttccaagatgatctggtatatattaattataggaattctgcttccccagtctttggctcatccaggcttttttacttcaattgatgggcagagaagttagatcggctaactagtacagcgacaaaagatccagaaggatttgttgggcatccagtaaatgcattcaaattaatgaaacgtctgaatactgagtggagtgagttggagaatctggtccttaaggatatgtcagatggctttatctctaacctaaccattcagagacagtactttcctaatgatgaagatcaggttggggcagccaaagctctgttacgtctccaggatacctacaatttggatacagataccatctcaaagggtaatcttccaggagtgaaacacaaatcttttctaacggctgaggactgctttgagttgggcaaagtggcctatacagaagcagattattaccatacggaactgtggatggaacaagccctaaggcaactggatgaaggcgagatttctaccatagataaagtctctgttctagattatttgagctatgcggtatatcagcagggagacctggataaggcacttttgctcacaaagaagcttcttgaactagatcctgaacatcagagagctaatggtaacttaaaatattttgagtatataatggctaaagaaaaagatgtcaataagtctgcttcagatgaccaatctgatcagaaaactacaccaaagaaaaaaggggttgctgtggattacctgccagagagacagaagtacgaaatgctgtgccgtggggagggtatcaaaatgacccctcggagacagaaaaaactcttttgccgctaccatgatggaaaccgtaatcctaaatttattctggctccagctaaacaggaggatgaatgggacaagcctcgtattattcgcttccatgatattatttctgatgcagaaattgaaatcgtcaaagacctagcaaaaccaaggctgaggcgagccaccatttcaaacccaataacaggagacttggagacggtacattacagaattagcaaaagtgcctggctctctggctatgaaaatcctgtggtgtctcgaattaatatgagaatacaagatctaacaggactagatgtttccacagcagaggaattacaggtagcaaattatggagttggaggacagtatgaaccccattttgactttgcacggaaagatgagccagatgctttcaaagagctggggacaggaaatagaattgctacatggctgttttatatgagtgatgtgtctgcaggaggagccactgtttttcctgaagttggagctagtgtttggcccaaaaaaggaactgctgttttctggtataatctgtttgccagtggagaaggagattatagtacacggcatgcagcctgtccagtgctagttggcaacaaatgggtatccaataaatggctccatgaacgtggacaagaatttcgaagaccttgtacgttgtcagaattggaatgacaaacaggcttccctttttctcctattgttgtactcttatgtgtctgatatacacatttcctagtcttaactttcaggagtttacaattgactaacactccatgattgattcagtcatgaacctcatcccatgtttcatctgtggacaattgcttactttgtgggttcttttaaaagtaacacgaaatcatcatattgcataaaaccttaaagttctgttggtatcacagaagacaaggcagagtttaaagtgaggaattttatatttaaagaactttttggttggataaaaacataatttgagcatccagttttagtatttcactacatctcagttggtgggtgttaagctagaatgggctgtgtgataggaaacaaatgccttacagatgtgcctaggtgttctgtttacctagtgtcttactctgttttctggatctgaagactagtaataaactaggacactaactgggttccatgtgattgccctttcatatgatcttctaagttgatttttttcctcccaagtcttttttaaagaaagtatactgtattttaccaaccccctctcttttcttttagctcctctgtggtgaattaaacgtacttgagttaaaatatttcgattttttttttttttttaatggaaagtcctgcataacaacactgggccttcttaactaaaatgctcaccacttagcctgtttttttatcccttttttaaaatgacagatgattttgttcaggaattttgctgtttttcttagtgctaataccttgcctcttattcctgctacagcagggtggtaatattggcattctgattaaatactgtgccttaggagactggaagtttaaaaatgtacaagtcctttcagtgatgagggaattgattttttttaaaagtctttttcttagaaagccaaaatgtttgtttttttaagattctgaaatgtgttgtgacaacaatgacctatttatgatcttaaatcttttttaaaaaaatgtttgttttctgtgtggtgtttttcgtatttaaatccgaatgtatgatgtggcagtaacaggttaacttatgtaatttctttagtacatagggcttaggtttatactcttggtttccactcacactaatgtcacatggttaagaaaaacttaggctctctgaagtttcagatatttcatgaatcaagatgtgcttccttcaaagagagctctaaaatactttactgtggttatgaagttattatgggccaggcatggtggctcacgccttcaatcccagcactttgggaggccgaggcaggcggatcacctgaggctaggagttcgagaccagcctggccaacatggtgaaaccccatccctactaaaattaccaaaattagccgggtgtggtggtgcatgcctgtagtcccagc

SEQ ID NO: 20185 - protein, 447 aa, Homo sapiens
MKRLNTEWSELENLVLKDMSDGFISNLTIQRQYFPNDEDQVGAAKALLRLQDTYNLDTDTISKGNLPGVKHKSFLTAEDCFELGKVAYTEADYYHTELWMEQALRQLDEGEISTIDKVSVLDYLSYAVYQQGDLDKALLLTKKLLELDPEHQRANGNLKYFEYIMAKEKDVNKSASDDQSDQKTTPKKKGVAVDYLPERQKYEMLCRGEGIKMTPRRQKKLFCRYHDGNRNPKFILAPAKQEDEWDKPRIIRFHDIISDAEIEIVKDLAKPRLRRATISNPITGDLETVHYRISKSAWLSGYENPVVSRINMRIQDLTGLDVSTAEELQVANYGVGGQYEPHFDFARKDEPDAFKELGTGNRIATWLFYMSDVSAGGATVFPEVGASVWPKKGTAVFWYNLFASGEGDYSTRHAACPVLVGNKWVSNKWLHERGQEFRRPCTLSELE

SEQ ID NO: 20186 - DNA, 3240 bp, Homo sapiens
cgccagcgggctgagggtaggaagtagccgctccgagtggaggcgactgggggctgaagagcgcgccgccctctcgtcccactttccagagatgaagtcttgctatgttgcccggcctggtctcaaactcctgagctcaagtgatcctctttccttggcctcccaaagtactgggattacaggtgtgtgatcctgtaaaattaaatcttccaagatgatctggtatatattaattataggaattctgcttccccagtctttggctcatccaggcttttttacttcaattggtcagatgactgatttgatccatactgagaaagatctggtgacttctctgaaagattatattaaggcagaagaggacaagttagaacaaataaaaaaatgggcagagaagttagatcggctaactagtacagcgacaaaagatccagaaggatttgttgggcatccagtaaatgcattcaaattaatgaaacgtctgaatactgagtggagtgagttggagaatctggtccttaaggatatgtcagatggctttatctctaacctaaccattcagagacagtactttcctaatgatgaagatcaggttggggcagccaaagctctgttacgtctccaggatacctacaatttggatacagataccatctcaaagggtaatcttccaggagtgaaacacaaatcttttctaacggctgaggactgctttgagttgggcaaagtggcctatacagaagcagattattaccatacggaactgtggatggaacaagccctaaggcaactggatgaaggcgagatttctaccatagataaagtctctgttctagattatttgagctatgcggtatatcagcagggagacctggataaggcacttttgctcacaaagaagcttcttgaactagatcctgaacatcagagagctaatggtaacttaaaatattttgagtatataatggctaaagaaaaagatgtcaataagtctgcttcagatgaccaatctgatcagaaaactacaccaaagaaaaaaggggttgctgtggattacctgccagagagacagaagtacgaaatgctgtgccgtggggagggtatcaaaatgacccctcggagacagaaaaaactcttttgccgctaccatgatggaaaccgtaatcctaaatttattctggctccagctaaacaggaggatgaatgggacaagcctcgtattattcgcttccatgatattatttctgatgcagaaattgaaatcgtcaaagacctagcaaaaccaaggctgaggcgagccaccatttcaaacccaataacaggagacttggagacggtacattacagaattagcaaaagtgcctggctctctggctatgaaaatcctgtggtgtctcgaattaatatgagaatacaagatctaacaggactagatgtttccacagcagaggaattacaggtagcaaattatggagttggaggacagtatgaaccccattttgactttgcacggaaagatgagccagatgctttcaaagagctggggacaggaaatagaattgctacatggctgttttatatgagtgatgtgtctgcaggaggagccactgtttttcctgaagttggagctagtgtttggcccaaaaaaggaactgctgttttctggtataatctgtttgccagtggagaaggagattatagtacacggcatgcagcctgtccagtgctagttggcaacaaatgggtatccaataaatggctccatgaacgtggacaagaatttcgaagaccttgtacgttgtcagaattggaatgacaaacaggcttccctttttctcctattgttgtactcttatgtgtctgatatacacatttcctagtcttaactttcaggagtttacaattgactaacactccatgattgattcagtcatgaacctcatcccatgtttcatctgtggacaattgcttactttgtgggttcttttaaaagtaacacgaaatcatcatattgcataaaaccttaaagttctgttggtatcacagaagacaaggcagagtttaaagtgaggaattttatatttaaagaactttttggttggataaaaacataatttgagcatccagttttagtatttcactacatctcagttggtgggtgttaagctagaatgggctgtgtgataggaaacaaatgccttacagatgtgcctaggtgttctgtttacctagtgtcttactctgttttctggatctgaagactagtaataaactaggacactaactgggttccatgtgattgccctttcatatgatcttctaagttgatttttttcctcccaagtcttttttaaagaaagtatactgtattttaccaaccccctctcttttcttttagctcctctgtggtgaattaaacgtacttgagttaaaatatttcgattttttttttttttttaatggaaagtcctgcataacaacactgggccttcttaactaaaatgctcaccacttagcctgtttttttatcccttttttaaaatgacagatgattttgttcaggaattttgctgtttttcttagtgctaataccttgcctcttattcctgctacagcagggtggtaatattggcattctgattaaatactgtgccttaggagactggaagtttaaaaatgtacaagtcctttcagtgatgagggaattgattttttttaaaagtctttttcttagaaagccaaaatgtttgtttttttaagattctgaaatgtgttgtgacaacaatgacctatttatgatcttaaatcttttttaaaaaaatgtttgttttctgtgtggtgtttttcgtatttaaatccgaatgtatgatgtggcagtaacaggttaacttatgtaatttctttagtacatagggcttaggtttatactcttggtttccactcacactaatgtcacatggttaagaaaaacttaggctctctgaagtttcagatatttcatgaatcaagatgtgcttccttcaaagagagctctaaaatactttactgtggttatgaagttattatgggccaggcatggtggctcacgccttcaatcccagcactttgggaggccgaggcaggcggatcacctgaggctaggagttcgagaccagcctggccaacatggtgaaaccccatccctactaaaattaccaaaattagccgggtgtggtggtgcatgcctgtagtcccagc

SEQ ID NO: 20187 - protein, 534 aa, Homo sapiens; identical to SEQ ID NO: 2535

SEQ ID NO: 20188 - DNA, 3447 bp, Homo sapiens
cccacaccacggcggccggtcccagccactcctctcggcctcagactccacgggccggccacgggtgggggcagcagggaggcacgggcttggcgcctgcgcagtcgccggggcgctggtgtgatcgagctcacgtagcgagggctgcagtcgcctcctccctggcgctgccatcgcggcctagaggttataaaagggctaacgggctccctctgctgcccagtcgcgccgccagcgggctgagggtaggaagtagccgctccgagtggaggcgactgggggctgaagagcgcgccgccctctcgtcccactttccaggtgtgtgatcctgtaaaattaaatcttccaagatgatctggtatatattaattataggaattctgcttccccagtctttggctcatccaggcttttttacttcaattggtcagatgactgatttgatccatactgagaaagatctggtgacttctctgaaagattatattaaggcagaagaggacaagttagaacaaataaaaaaatgggcagagaagttagatcggctaactagtacagcgacaaaagatccagaaggatttgttgggcatccagtaaatgcattcaaattaatgaaacgtctgaatactgagtggagtgagttggagaatctggtccttaaggatatgtcagatggctttatctctaacctaaccattcagagacagtactttcctaatgatgaagatcaggttggggcagccaaagctctgttacgtctccaggatacctacaatttggatacagataccatctcaaagggtaatcttccaggagtgaaacacaaatcttttctaacggctgaggactgctttgagttgggcaaagtggcctatacagaagcagattattaccatacggaactgtggatggaacaagccctaaggcaactggatgaaggcgagatttctaccatagataaagtctctgttctagattatttgagctatgcggtatatcagcagggagacctggataaggcacttttgctcacaaagaagcttcttgaactagatcctgaacatcagagagctaatggtaacttaaaatattttgagtatataatggctaaagaaaaagatgtcaataagtctgcttcagatgaccaatctgatcagaaaactacaccaaagaaaaaaggggttgctgtggattacctgccagagagacagaagtacgaaatgctgtgccgtggggagggtatcaaaatgacccctcggagacagaaaaaactcttttgccgctaccatgatggaaaccgtaatcctaaatttattctggctccagctaaacaggaggatgaatgggacaagcctcgtattattcgcttccatgatattatttctgatgcagaaattgaaatcgtcaaagacctagcaaaaccaaggctgaggcgagccaccatttcaaacccaataacaggagacttggagacggtacattacagaattagcaaaagctgagccgagctacagtacatgaccctgagactggaaaattgaccacagcacagtacagagtatctaagagtgcctggctctctggctatgaaaatcctgtggtgtctcgaattaatatgagaatacaagatctaacaggactagatgtttccacagcagaggaattacaggtagcaaattatggagttggaggacagtatgaaccccattttgactttgcacggaaagatgagccagatgctttcaaagagctggggacaggaaatagaattgctacatggctgttttatatgagtgatgtgtctgcaggaggagccactgtttttcctgaagttggagctagtgtttggcccaaaaaaggaactgctgttttctggtataatctgtttgccagtggagaaggagattatagtacacggcatgcagcctgtccagtgctagttggcaacaaatgggtatccaataaatggctccatgaacgtggacaagaatttcgaagaccttgtacgttgtcagaattggaatgacaaacaggcttccctttttctcctattgttgtactcttatgtgtctgatatacacatttcctagtcttaactttcaggagtttacaattgactaacactccatgattgattcagtcatgaacctcatcccatgtttcatctgtggacaattgcttactttgtgggttcttttaaaagtaacacgaaatcatcatattgcataaaaccttaaagttctgttggtatcacagaagacaaggcagagtttaaagtgaggaattttatatttaaagaactttttggttggataaaaacataatttgagcatccagttttagtatttcactacatctcagttggtgggtgttaagctagaatgggctgtgtgataggaaacaaatgccttacagatgtgcctaggtgttctgtttacctagtgtcttactctgttttctggatctgaagactagtaataaactaggacactaactgggttccatgtgattgccctttcatatgatcttctaagttgatttttttcctcccaagtcttttttaaagaaagtatactgtattttaccaaccccctctcttttcttttagctcctctgtggtgaattaaacgtacttgagttaaaatatttcgattttttttttttttttaatggaaagtcctgcataacaacactgggccttcttaactaaaatgctcaccacttagcctgtttttttatcccttttttaaaatgacagatgattttgttcaggaattttgctgtttttcttagtgctaataccttgcctcttattcctgctacagcagggtggtaatattggcattctgattaaatactgtgccttaggagactggaagtttaaaaatgtacaagtcctttcagtgatgagggaattgattttttttaaaagtctttttcttagaaagccaaaatgtttgtttttttaagattctgaaatgtgttgtgacaacaatgacctatttatgatcttaaatcttttttaaaaaaatgtttgttttctgtgtggtgtttttcgtatttaaatccgaatgtatgatgtggcagtaacaggttaacttatgtaatttctttagtacatagggcttaggtttatactcttggtttccactcacactaatgtcacatggttaagaaaaacttaggctctctgaagtttcagatatttcatgaatcaagatgtgcttccttcaaagagagctctaaaatactttactgtggttatgaagttattatgggccaggcatggtggctcacgccttcaatcccagcactttgggaggccgaggcaggcggatcacctgaggctaggagttcgagaccagcctggccaacatggtgaaaccccatccctactaaaattaccaaaattagccgggtgtggtggtgcatgcctgtagtcccagc

SEQ ID NO: 20189 - protein, 383 aa, Homo sapiens
MIWYILIIGILLPQSLAHPGFFTSIGQMTDLIHTEKDLVTSLKDYIKAEEDKLEQIKKWAEKLDRLTSTATKDPEGFVGHPVNAFKLMKRLNTEWSELENLVLKDMSDGFISNLTIQRQYFPNDEDQVGAAKALLRLQDTYNLDTDTISKGNLPGVKHKSFLTAEDCFELGKVAYTEADYYHTELWMEQALRQLDEGEISTIDKVSVLDYLSYAVYQQGDLDKALLLTKKLLELDPEHQRANGNLKYFEYIMAKEKDVNKSASDDQSDQKTTPKKKGVAVDYLPERQKYEMLCRGEGIKMTPRRQKKLFCRYHDGNRNPKFILAPAKQEDEWDKPRIIRFHDIISDAEIEIVKDLAKPRLRRATISNPITGDLETVHYRISKS

SEQ ID NO: 20190 - DNA, 3376 bp, Homo sapiens
cccacaccacggcggccggtcccagccactcctctcggcctcagactccacgggccggccacgggtgggggcagcagggaggcacgggcttggcgcctgcgcagtcgccggggcgctggtgtgatcgagctcacgtagcgagggctgcagtcgcctcctccctggcgctgccatcgcggcctagaggttataaaagggctaacgggctccctctgctgcccagtcgcgccgccagcgggctgagggtaggaagtagccgctccgagtggaggcgactgggggctgaagagcgcgccgccctctcgtcccactttccaggtgtgtgatcctgtaaaattaaatcttccaagatgatctggtatatattaattataggaattctgcttccccagtctttggctcatccaggcttttttacttcaattggtcagatgactgatttgatccatactgagaaagatctggtgacttctctgaaagattatattaaggcagaagaggacaagttagaacaaataaaaaaatgggcagagaagttagatcggctaactagtacagcgacaaaagatccagaaggatttgttgggcatccagtaaatgcattcaaattaatgaaacgtctgaatactgagtggagtgagttggagaatctggtccttaaggatatgtcagatggctttatctctaacctaaccattcagagacagtactttcctaatgatgaagatcaggttggggcagccaaagctctgttacgtctccaggatacctacaatttggatacagataccatctcaaagggtaatcttccaggagtgaaacacaaatcttttctaacggctgaggactgctttgagttgggcaaagtggcctatacagaagcagattattaccatacggaactgtggatggaacaagccctaaggcaactggatgaaggcgagatttctaccatagataaagtctctgttctagattatttgagctatgcggtatatcagcagggagacctggataaggcacttttgctcacaaagaagcttcttgaactagatcctgaacatcagagagctaatggtaacttaaaatattttgagtatataatggctaaagaaaaagatgtcaataagtctgcttcagatgaccaatctgatcagaaaactacaccaaagaaaaaaggggttgctgtggattacctgccagagagacagaagtacgaaatgctgtgccgtggggagggtatcaaaatgacccctcggagacagaaaaaactcttttgccgctaccatgatggaaaccgtaatcctaaatttattctggctccagctaaacaggaggatgaatgggacaagcctcgtattattcgcttccatgatattatttctgatgcagaaattgaaatcgtcaaagacctagcaaaaccaaggctgaggcgagccaccatttcaaacccaataacaggagacttggagacggtacattacagaattagcaaaagtgcctggctctctggctatgaaaatcctgtggtgtctcgaattaatatgagaatacaagatctaacaggactagatgtttccacagcagaggaattacaggtagcaaattatggagttggaggacagtatgaaccccattttgactttgcacggaaagatgagccagatgctttcaaagagctggggacaggaaatagaattgctacatggctgttttatatgagtgatgtgtctgcaggaggagccactgtttttcctgaagttggagctagtgtttggcccaaaaaaggaactgctgttttctggtataatctgtttgccagtggagaaggagattatagtacacggcatgcagcctgtccagtgctagttggcaacaaatgggtatccaataaatggctccatgaacgtggacaagaatttcgaagaccttgtacgttgtcagaattggaatgacaaacaggcttccctttttctcctattgttgtactcttatgtgtctgatatacacatttcctagtcttaactttcaggagtttacaattgactaacactccatgattgattcagtcatgaacctcatcccatgtttcatctgtggacaattgcttactttgtgggttcttttaaaagtaacacgaaatcatcatattgcataaaaccttaaagttctgttggtatcacagaagacaaggcagagtttaaagtgaggaattttatatttaaagaactttttggttggataaaaacataatttgagcatccagttttagtatttcactacatctcagttggtgggtgttaagctagaatgggctgtgtgataggaaacaaatgccttacagatgtgcctaggtgttctgtttacctagtgtcttactctgttttctggatctgaagactagtaataaactaggacactaactgggttccatgtgattgccctttcatatgatcttctaagttgatttttttcctcccaagtcttttttaaagaaagtatactgtattttaccaaccccctctcttttcttttagctcctctgtggtgaattaaacgtacttgagttaaaatatttcgattttttttttttttttaatggaaagtcctgcataacaacactgggccttcttaactaaaatgctcaccacttagcctgtttttttatcccttttttaaaatgacagatgattttgttcaggaattttgctgtttttcttagtgctaataccttgcctcttattcctgctacagcagggtggtaatattggcattctgattaaatactgtgccttaggagactggaagtttaaaaatgtacaagtcctttcagtgatgagggaattgattttttttaaaagtctttttcttagaaagccaaaatgtttgtttttttaagattctgaaatgtgttgtgacaacaatgacctatttatgatcttaaatcttttttaaaaaaatgtttgttttctgtgtggtgtttttcgtatttaaatccgaatgtatgatgtggcagtaacaggttaacttatgtaatttctttagtacatagggcttaggtttatactcttggtttccactcacactaatgtcacatggttaagaaaaacttaggctctctgaagtttcagatatttcatgaatcaagatgtgcttccttcaaagagagctctaaaatactttactgtggttatgaagttattatgggccaggcatggtggctcacgccttcaatcccagcactttgggaggccgaggcaggcggatcacctgaggctaggagttcgagaccagcctggccaacatggtgaaaccccatccctactaaaattaccaaaattagccgggtgtggtggtgcatgcctgtagtcccagc

SEQ ID NO: 20191 - protein, 534 aa, Homo sapiens; identical to SEQ ID NO: 2535

SEQ ID NO: 20192 - DNA, 3322 bp, Homo sapiens
cccacaccacggcggccggtcccagccactcctctcggcctcagactccacgggccggccacgggtgggggcagcagggaggcacgggcttggcgcctgcgcagtcgccggggcgctggtgtgatcgagctcacgtagcgagggctgcagtcgcctcctccctggcgctgccatcgcggcctagaggttataaaagggctaacgggctccctctgctgcccagtcgcgccgccagcgggctgagggtaggaagtagccgctccgagtggaggcgactgggggctgaagagcgcgccgccctctcgtcccactttccaggtgtgtgatcctgtaaaattaaatcttccaagatgatctggtatatattaattataggaattctgcttccccagtctttggctcatccaggcttttttacttcaattggtcagatgactgatttgatccatactgagaaagatctggtgacttctctgaaagattatattaaggcagaagaggacaagttagaacaaataaaaaaatgggcagagaagttagatcggctaactagtacagcgacaaaagatccagaaggatttgttgggcatccagtaaatgcattcaaattaatgaaacgtctgaatactgagtggagtgagttggagaatctggtccttaaggatatgtcagatggctttatctctaacctaaccattcagagacagtactttcctaatgatgaagatcaggttggggcagccaaagctctgttacgtctccaggatacctacaatttggatacagataccatctcaaagggtaatcttccaggagtgaaacacaaatcttttctaacggctgaggactgctttgagttgggcaaagtggcctatacagaagcagattattaccatacggaactgtggatggaacaagccctaaggcaactggatgaaggcgagatttctaccatagataaagtctctgttctagattatttgagctatgcggtatatcagcagggagacctggataaggcacttttgctcacaaagaagcttcttgaactagatcctgaacatcagagagctaatggtaacttaaaatattttgagtatataatggctaaagaaaaagatgtcaataagtctgcttcagatgaccaatctgatcagaaaactacaccaaagaaaaaaggggttgctgtggattacctgccagagagacagaagtacgaaatgctgtgccgtggggagggtatcaaaatgacccctcggagacagaaaaaactcttttgccgctaccatgatggaaaccgtaatcctaaatttattctggctccagctaaacaggaggatgaatgggacaagcctcgtattattcgcttccatgatattatttctgatgcagaaattgaaatcgtcaaagacctagcaaaaccaaggctgagccgagctacagtacatgaccctgagactggaaaattgaccacagcacagtacagagtatctaagagtgcctggctctctggctatgaaaatcctgtggtgtctcgaattaatatgagaatacaagatctaacaggactagatgtttccacagcagaggaattacagaaagatgagccagatgctttcaaagagctggggacaggaaatagaattgctacatggctgttttatatgagtgatgtgtctgcaggaggagccactgtttttcctgaagttggagctagtgtttggcccaaaaaaggaactgctgttttctggtataatctgtttgccagtggagaaggagattatagtacacggcatgcagcctgtccagtgctagttggcaacaaatgggtatccaataaatggctccatgaacgtggacaagaatttcgaagaccttgtacgttgtcagaattggaatgacaaacaggcttccctttttctcctattgttgtactcttatgtgtctgatatacacatttcctagtcttaactttcaggagtttacaattgactaacactccatgattgattcagtcatgaacctcatcccatgtttcatctgtggacaattgcttactttgtgggttcttttaaaagtaacacgaaatcatcatattgcataaaaccttaaagttctgttggtatcacagaagacaaggcagagtttaaagtgaggaattttatatttaaagaactttttggttggataaaaacataatttgagcatccagttttagtatttcactacatctcagttggtgggtgttaagctagaatgggctgtgtgataggaaacaaatgccttacagatgtgcctaggtgttctgtttacctagtgtcttactctgttttctggatctgaagactagtaataaactaggacactaactgggttccatgtgattgccctttcatatgatcttctaagttgatttttttcctcccaagtcttttttaaagaaagtatactgtattttaccaaccccctctcttttcttttagctcctctgtggtgaattaaacgtacttgagttaaaatatttcgattttttttttttttttaatggaaagtcctgcataacaacactgggccttcttaactaaaatgctcaccacttagcctgtttttttatcccttttttaaaatgacagatgattttgttcaggaattttgctgtttttcttagtgctaataccttgcctcttattcctgctacagcagggtggtaatattggcattctgattaaatactgtgccttaggagactggaagtttaaaaatgtacaagtcctttcagtgatgagggaattgattttttttaaaagtctttttcttagaaagccaaaatgtttgtttttttaagattctgaaatgtgttgtgacaacaatgacctatttatgatcttaaatcttttttaaaaaaatgtttgttttctgtgtggtgtttttcgtatttaaatccgaatgtatgatgtggcagtaacaggttaacttatgtaatttctttagtacatagggcttaggtttatactcttggtttccactcacactaatgtcacatggttaagaaaaacttaggctctctgaagtttcagatatttcatgaatcaagatgtgcttccttcaaagagagctctaaaatactttactgtggttatgaagttattatgggccaggcatggtggctcacgccttcaatcccagcactttgggaggccgaggcaggcggatcacctgaggctaggagttcgagaccagcctggccaacatggtgaaaccccatccctactaaaattaccaaaattagccgggtgtggtggtgcatgcctgtagtcccagc

SEQ ID NO: 20193 - protein, 516 aa, Homo sapiens
MIWYILIIGILLPQSLAHPGFFTSIGQMTDLIHTEKDLVTSLKDYIKAEEDKLEQIKKWAEKLDRLTSTATKDPEGFVGHPVNAFKLMKRLNTEWSELENLVLKDMSDGFISNLTIQRQYFPNDEDQVGAAKALLRLQDTYNLDTDTISKGNLPGVKHKSFLTAEDCFELGKVAYTEADYYHTELWMEQALRQLDEGEISTIDKVSVLDYLSYAVYQQGDLDKALLLTKKLLELDPEHQRANGNLKYFEYIMAKEKDVNKSASDDQSDQKTTPKKKGVAVDYLPERQKYEMLCRGEGIKMTPRRQKKLFCRYHDGNRNPKFILAPAKQEDEWDKPRIIRFHDIISDAEIEIVKDLAKPRLSRATVHDPETGKLTTAQYRVSKSAWLSGYENPVVSRINMRIQDLTGLDVSTAEELQKDEPDAFKELGTGNRIATWLFYMSDVSAGGATVFPEVGASVWPKKGTAVFWYNLFASGEGDYSTRHAACPVLVGNKWVSNKWLHERGQEFRRPCTLSELE

SEQ ID NO: 20194 - DNA, 3376 bp, Homo sapiens
cccacaccacggcggccggtcccagccactcctctcggcctcagactccacgggccggccacgggtgggggcagcagggaggcacgggcttggcgcctgcgcagtcgccggggcgctggtgtgatcgagctcacgtagcgagggctgcagtcgcctcctccctggcgctgccatcgcggcctagaggttataaaagggctaacgggctccctctgctgcccagtcgcgccgccagcgggctgagggtaggaagtagccgctccgagtggaggcgactgggggctgaagagcgcgccgccctctcgtcccactttccaggtgtgtgatcctgtaaaattaaatcttccaagatgatctggtatatattaattataggaattctgcttccccagtctttggctcatccaggcttttttacttcaattggtcagatgactgatttgatccatactgagaaagatctggtgacttctctgaaagattatattaaggcagaagaggacaagttagaacaaataaaaaaatgggcagagaagttagatcggctaactagtacagcgacaaaagatccagaaggatttgttgggcatccagtaaatgcattcaaattaatgaaacgtctgaatactgagtggagtgagttggagaatctggtccttaaggatatgtcagatggctttatctctaacctaaccattcagagacagtactttcctaatgatgaagatcaggttggggcagccaaagctctgttacgtctccaggatacctacaatttggatacagataccatctcaaagggtaatcttccaggagtgaaacacaaatcttttctaacggctgaggactgctttgagttgggcaaagtggcctatacagaagcagattattaccatacggaactgtggatggaacaagccctaaggcaactggatgaaggcgagatttctaccatagataaagtctctgttctagattatttgagctatgcggtatatcagcagggagacctggataaggcacttttgctcacaaagaagcttcttgaactagatcctgaacatcagagagctaatggtaacttaaaatattttgagtatataatggctaaagaaaaagatgtcaataagtctgcttcagatgaccaatctgatcagaaaactacaccaaagaaaaaaggggttgctgtggattacctgccagagagacagaagtacgaaatgctgtgccgtggggagggtatcaaaatgacccctcggagacagaaaaaactcttttgccgctaccatgatggaaaccgtaatcctaaatttattctggctccagctaaacaggaggatgaatgggacaagcctcgtattattcgcttccatgatattatttctgatgcagaaattgaaatcgtcaaagacctagcaaaaccaaggctgagccgagctacagtacatgaccctgagactggaaaattgaccacagcacagtacagagtatctaagagtgcctggctctctggctatgaaaatcctgtggtgtctcgaattaatatgagaatacaagatctaacaggactagatgtttccacagcagaggaattacaggtagcaaattatggagttggaggacagtatgaaccccattttgactttgcacggaaagatgagccagatgctttcaaagagctggggacaggaaatagaattgctacatggctgttttatatgagtgatgtgtctgcaggaggagccactgtttttcctgaagttggagctagtgtttggcccaaaaaaggaactgctgttttctggtataatctgtttgccagtggagaaggagattatagtacacggcatgcagcctgtccagtgctagttggcaacaaatgggtatccaataaatggctccatgaacgtggacaagaatttcgaagaccttgtacgttgtcagaattggaatgacaaacaggcttccctttttctcctattgttgtactcttatgtgtctgatatacacatttcctagtcttaactttcaggagtttacaattgactaacactccatgattgattcagtcatgaacctcatcccatgtttcatctgtggacaattgcttactttgtgggttcttttaaaagtaacacgaaatcatcatattgcataaaaccttaaagttctgttggtatcacagaagacaaggcagagtttaaagtgaggaattttatatttaaagaactttttggttggataaaaacataatttgagcatccagttttagtatttcactacatctcagttggtgggtgttaagctagaatgggctgtgtgataggaaacaaatgccttacagatgtgcctaggtgttctgtttacctagtgtcttactctgttttctggatctgaagactagtaataaactaggacactaactgggttccatgtgattgccctttcatatgatcttctaagttgatttttttcctcccaagtcttttttaaagaaagtatactgtattttaccaaccccctctcttttcttttagctcctctgtggtgaattaaacgtacttgagttaaaatatttcgattttttttttttttttaatggaaagtcctgcataacaacactgggccttcttaactaaaatgctcaccacttagcctgtttttttatcccttttttaaaatgacagatgattttgttcaggaattttgctgtttttcttagtgctaataccttgcctcttattcctgctacagcagggtggtaatattggcattctgattaaatactgtgccttaggagactggaagtttaaaaatgtacaagtcctttcagtgatgagggaattgattttttttaaaagtctttttcttagaaagccaaaatgtttgtttttttaagattctgaaatgtgttgtgacaacaatgacctatttatgatcttaaatcttttttaaaaaaatgtttgttttctgtgtggtgtttttcgtatttaaatccgaatgtatgatgtggcagtaacaggttaacttatgtaatttctttagtacatagggcttaggtttatactcttggtttccactcacactaatgtcacatggttaagaaaaacttaggctctctgaagtttcagatatttcatgaatcaagatgtgcttccttcaaagagagctctaaaatactttactgtggttatgaagttattatgggccaggcatggtggctcacgccttcaatcccagcactttgggaggccgaggcaggcggatcacctgaggctaggagttcgagaccagcctggccaacatggtgaaaccccatccctactaaaattaccaaaattagccgggtgtggtggtgcatgcctgtagtcccagc

SEQ ID NO: 20195 - protein, 534 aa, Homo sapiens; identical to SEQ ID NO: 2533

SEQ ID NO: 20196 - DNA, 986 bp, Homo sapiens
tatccaataaatggctccatgaacgtggacaagaatttcgaagaccttgtacgttgtcagaattggaatgacaaacaggcttccctttttctcctattgttgtactcttatgtgtctgatatacacatttcctagtcttaactttcaggagtttacaattgactaacactccatgattgattcagtcatgaacctcatcccatgtttcatctgtggacaattgcttactttgtgggttcttttaaaagtaacacgaaatcatcatattgcataaaaccttaaagttctgttggtatcacagaagacaaggcagagtttaaagtgaggaattttatatttaaagaactttttggttggataaaaacataatttgagcatccagttttagtatttcactacatctcagttggtgggtgttaagtggatctgaagactagtaataaactaggacactaactgggttccatgtgattgccctttcatatgatcttctaagttgatttttttcctcccaagtcttttttaaagaaagtatactgtattttaccaaccccctctcttttcttttagctcctctgtggtgaattaaacgtacttgagttaaaatatttcgattttttttttttttttaatggaaagtcctgcataacaacactgggccttcttaactaaaatgctcaccacttagcctgtttttttatcccttttttaaaatgacagatgattttgttcaggaattttgctgtttttcttagtgctaataccttgcctcttattcctgctacagcagggtggtaatattggcattctgattaaatactgtgccttaggagactggaagtttaaaaatgtacaagtcctttcagtgatgagggaattgattttttttaaaagtctttttcttagaaagccaaaatgtttgtttttttaagattctgaaatgtgttgtgacaacaatgacctatttatgatcttaaatctttttt

SEQ ID NO: 20197 - protein, 38 aa, Homo sapiens
MNVDKNFEDLVRCQNWNDKQASLFLLLLYSYVSDIHIS

SEQ ID NO: 20198 - DNA, 8192 bp, Homo sapiens; identical to SEQ ID NO: 20182

SEQ ID NO: 20199 - protein, 102 aa, Homo sapiens [sequence omitted]

SEQ ID NO: 20200 - DNA, 2626 bp, Homo sapiens
gccagcgggctgagggtaggaagtagccgctccgagtggaggcgactgggggctgaagagcgcgccgccctctcgtcccactttccaggtgtgtgatcctgtaaaattaaatcttccaagatgatctggtatatattaattataggaattctgcttccccagtctttggctcatccaggcttttttacttcaattgatgggcagagaagttagatcggctaactagtacagcgacaaaagatccagaaggatttgttgggcatccagtaaatgcattcaaattaatgaaacgtctgaatactgagtggagtgagttggagaatctggtccttaaggatatgtcagatggctttatctctaacctaaccattcagagacagtactttcctaatgatgaagatcaggttggggcagccaaagctctgttacgtctccaggatacctacaatttggatacagataccatctcaaagggtaatcttccaggagtgaaacacaaatcttttctaacggctgaggactgctttgagttgggcaaagtggcctatacagaagcagattattaccatacggaactgtggatggaacaagccctaaggcaactggatgaaggcgagatttctaccatagataaagtctctgttctagattatttgagctatgcggtatatcagcagggagacctggataaggcacttttgctcacaaagaagcttcttgaactagatcctgaacatcagagagctaatggtaacttaaaatattttgagtatataatggctaaagaaaaagatgtcaataagtctgcttcagatgaccaatctgatcagaaaactacaccaaagaaaaaaggggttgctgtggattacctgccagagagacagaagtacgaaatgctgtgccgtggggagggtatcaaaatgacccctcggagacagaaaaaactcttttgccgctaccatgatggaaaccgtaatcctaaatttattctggctccagctaaacaggaggatgaatgggacaagcctcgtattattcgcttccatgatattatttctgatgcagaaattgaaatcgtcaaagacctagcaaaaccaaggctgaggcgagccaccatttcaaacccaataacaggagacttggagacggtacattacagaattagcaaaagtgcctggctctctggctatgaaaatcctgtggtgtctcgaattaatatgagaatacaagatctaacaggactagatgtttccacagcagaggaattacaggtagcaaattatggagttggaggacagtatgaaccccattttgactttgcacggaaagatgagccagatgctttcaaagagctggggacaggaaatagaattgctacatggctgttttatatgagtgatgtgtctgcaggaggagccactgtttttcctgaagttggagctagtgtttggcccaaaaaaggaactgctgttttctggtataatctgtttgccagtggagaaggagattatagtacacggcatgcagcctgtccagtgctagttggcaacaaatgggtatccaataaatggctccatgaacgtggacaagaatttcgaagaccttgtacgttgtcagaattggaatgacaaacaggcttccctttttctcctattgttgtactcttatgtgtctgatatacacatttcctagtcttaactttcaggagtttacaattgactaacactccatgattgattcagtcatgaacctcatcccatgtttcatctgtggacaattgcttactttgtgggttcttttaaaagtaacacgaaatcatcatattgcataaaaccttaaagttctgttggtatcacagaagacaaggcagagtttaaagtgaggaattttatatttaaagaactttttggttggataaaaacataatttgagcatccagttttagtatttcactacatctcagttggtgggtgttaagctagaatgggctgtgtgataggaaacaaatgccttacagatgtgcctaggtgttctgtttacctagtgtcttactctgttttctggatctgaagactagtaataaactaggacactaactgggttccatgtgattgccctttcatatgatcttctaagttgatttttttcctcccaagtcttttttaaagaaagtatactgtattttaccaaccccctctcttttcttttagctcctctgtggtgaattaaacgtacttgagttaaaatatttcgattttttttttttttttaatggaaagtcctgcataacaacactgggccttcttaactaaaatgctcaccacttagcctgtttttttatcccttttttaaaatgacagatgattttgttcaggaattttgctgtttttcttagtgctaataccttgcctcttattcctgctacagcagggtggtaatattggcattctgattaaatactgtgccttaggagactggaagtttaaaaatgtacaagtcctttcagtgatgagggaattgattttttttaaaagtctttttcttagaaagccaaaatgtttgtttttttaagattctgaaatgtgttgtgacaacaatgacctatttatgatcttaaatctttttt

SEQ ID NO: 20201 - protein, 447 aa, Homo sapiens; identical to SEQ ID NO: 20185

SEQ ID NO: 20202 - DNA, 2817 bp, Homo sapiens
cgccagcgggctgagggtaggaagtagccgctccgagtggaggcgactgggggctgaagagcgcgccgccctctcgtcccactttccagagatgaagtcttgctatgttgcccggcctggtctcaaactcctgagctcaagtgatcctctttccttggcctcccaaagtactgggattacaggtgtgtgatcctgtaaaattaaatcttccaagatgatctggtatatattaattataggaattctgcttccccagtctttggctcatccaggcttttttacttcaattggtcagatgactgatttgatccatactgagaaagatctggtgacttctctgaaagattatattaaggcagaagaggacaagttagaacaaataaaaaaatgggcagagaagttagatcggctaactagtacagcgacaaaagatccagaaggatttgttgggcatccagtaaatgcattcaaattaatgaaacgtctgaatactgagtggagtgagttggagaatctggtccttaaggatatgtcagatggctttatctctaacctaaccattcagagacagtactttcctaatgatgaagatcaggttggggcagccaaagctctgttacgtctccaggatacctacaatttggatacagataccatctcaaagggtaatcttccaggagtgaaacacaaatcttttctaacggctgaggactgctttgagttgggcaaagtggcctatacagaagcagattattaccatacggaactgtggatggaacaagccctaaggcaactggatgaaggcgagatttctaccatagataaagtctctgttctagattatttgagctatgcggtatatcagcagggagacctggataaggcacttttgctcacaaagaagcttcttgaactagatcctgaacatcagagagctaatggtaacttaaaatattttgagtatataatggctaaagaaaaagatgtcaataagtctgcttcagatgaccaatctgatcagaaaactacaccaaagaaaaaaggggttgctgtggattacctgccagagagacagaagtacgaaatgctgtgccgtggggagggtatcaaaatgacccctcggagacagaaaaaactcttttgccgctaccatgatggaaaccgtaatcctaaatttattctggctccagctaaacaggaggatgaatgggacaagcctcgtattattcgcttccatgatattatttctgatgcagaaattgaaatcgtcaaagacctagcaaaaccaaggctgaggcgagccaccatttcaaacccaataacaggagacttggagacggtacattacagaattagcaaaagtgcctggctctctggctatgaaaatcctgtggtgtctcgaattaatatgagaatacaagatctaacaggactagatgtttccacagcagaggaattacaggtagcaaattatggagttggaggacagtatgaaccccattttgactttgcacggaaagatgagccagatgctttcaaagagctggggacaggaaatagaattgctacatggctgttttatatgagtgatgtgtctgcaggaggagccactgtttttcctgaagttggagctagtgtttggcccaaaaaaggaactgctgttttctggtataatctgtttgccagtggagaaggagattatagtacacggcatgcagcctgtccagtgctagttggcaacaaatgggtatccaataaatggctccatgaacgtggacaagaatttcgaagaccttgtacgttgtcagaattggaatgacaaacaggcttccctttttctcctattgttgtactcttatgtgtctgatatacacatttcctagtcttaactttcaggagtttacaattgactaacactccatgattgattcagtcatgaacctcatcccatgtttcatctgtggacaattgcttactttgtgggttcttttaaaagtaacacgaaatcatcatattgcataaaaccttaaagttctgttggtatcacagaagacaaggcagagtttaaagtgaggaattttatatttaaagaactttttggttggataaaaacataatttgagcatccagttttagtatttcactacatctcagttggtgggtgttaagctagaatgggctgtgtgataggaaacaaatgccttacagatgtgcctaggtgttctgtttacctagtgtcttactctgttttctggatctgaagactagtaataaactaggacactaactgggttccatgtgattgccctttcatatgatcttctaagttgatttttttcctcccaagtcttttttaaagaaagtatactgtattttaccaaccccctctcttttcttttagctcctctgtggtgaattaaacgtacttgagttaaaatatttcgattttttttttttttttaatggaaagtcctgcataacaacactgggccttcttaactaaaatgctcaccacttagcctgtttttttatcccttttttaaaatgacagatgattttgttcaggaattttgctgtttttcttagtgctaataccttgcctcttattcctgctacagcagggtggtaatattggcattctgattaaatactgtgccttaggagactggaagtttaaaaatgtacaagtcctttcagtgatgagggaattgattttttttaaaagtctttttcttagaaagccaaaatgtttgtttttttaagattctgaaatgtgttgtgacaacaatgacctatttatgatcttaaatctttttt

SEQ ID NO: 20203 - protein, 534 aa, Homo sapiens; identical to SEQ ID NO: 2535

SEQ ID NO: 20204 - DNA, 2953 bp, Homo sapiens
cccacaccacggcggccggtcccagccactcctctcggcctcagactccacgggccggccacgggtgggggcagcagggaggcacgggcttggcgcctgcgcagtcgccggggcgctggtgtgatcgagctcacgtagcgagggctgcagtcgcctcctccctggcgctgccatcgcggcctagaggttataaaagggctaacgggctccctctgctgcccagtcgcgccgccagcgggctgagggtaggaagtagccgctccgagtggaggcgactgggggctgaagagcgcgccgccctctcgtcccactttccaggtgtgtgatcctgtaaaattaaatcttccaagatgatctggtatatattaattataggaattctgcttccccagtctttggctcatccaggcttttttacttcaattggtcagatgactgatttgatccatactgagaaagatctggtgacttctctgaaagattatattaaggcagaagaggacaagttagaacaaataaaaaaatgggcagagaagttagatcggctaactagtacagcgacaaaagatccagaaggatttgttgggcatccagtaaatgcattcaaattaatgaaacgtctgaatactgagtggagtgagttggagaatctggtccttaaggatatgtcagatggctttatctctaacctaaccattcagagacagtactttcctaatgatgaagatcaggttggggcagccaaagctctgttacgtctccaggatacctacaatttggatacagataccatctcaaagggtaatcttccaggagtgaaacacaaatcttttctaacggctgaggactgctttgagttgggcaaagtggcctatacagaagcagattattaccatacggaactgtggatggaacaagccctaaggcaactggatgaaggcgagatttctaccatagataaagtctctgttctagattatttgagctatgcggtatatcagcagggagacctggataaggcacttttgctcacaaagaagcttcttgaactagatcctgaacatcagagagctaatggtaacttaaaatattttgagtatataatggctaaagaaaaagatgtcaataagtctgcttcagatgaccaatctgatcagaaaactacaccaaagaaaaaaggggttgctgtggattacctgccagagagacagaagtacgaaatgctgtgccgtggggagggtatcaaaatgacccctcggagacagaaaaaactcttttgccgctaccatgatggaaaccgtaatcctaaatttattctggctccagctaaacaggaggatgaatgggacaagcctcgtattattcgcttccatgatattatttctgatgcagaaattgaaatcgtcaaagacctagcaaaaccaaggctgaggcgagccaccatttcaaacccaataacaggagacttggagacggtacattacagaattagcaaaagtgcctggctctctggctatgaaaatcctgtggtgtctcgaattaatatgagaatacaagatctaacaggactagatgtttccacagcagaggaattacaggtagcaaattatggagttggaggacagtatgaaccccattttgactttgcacggaaagatgagccagatgctttcaaagagctggggacaggaaatagaattgctacatggctgttttatatgagtgatgtgtctgcaggaggagccactgtttttcctgaagttggagctagtgtttggcccaaaaaaggaactgctgttttctggtataatctgtttgccagtggagaaggagattatagtacacggcatgcagcctgtccagtgctagttggcaacaaatgggtatccaataaatggctccatgaacgtggacaagaatttcgaagaccttgtacgttgtcagaattggaatgacaaacaggcttccctttttctcctattgttgtactcttatgtgtctgatatacacatttcctagtcttaactttcaggagtttacaattgactaacactccatgattgattcagtcatgaacctcatcccatgtttcatctgtggacaattgcttactttgtgggttcttttaaaagtaacacgaaatcatcatattgcataaaaccttaaagttctgttggtatcacagaagacaaggcagagtttaaagtgaggaattttatatttaaagaactttttggttggataaaaacataatttgagcatccagttttagtatttcactacatctcagttggtgggtgttaagctagaatgggctgtgtgataggaaacaaatgccttacagatgtgcctaggtgttctgtttacctagtgtcttactctgttttctggatctgaagactagtaataaactaggacactaactgggttccatgtgattgccctttcatatgatcttctaagttgatttttttcctcccaagtcttttttaaagaaagtatactgtattttaccaaccccctctcttttcttttagctcctctgtggtgaattaaacgtacttgagttaaaatatttcgattttttttttttttttaatggaaagtcctgcataacaacactgggccttcttaactaaaatgctcaccacttagcctgtttttttatcccttttttaaaatgacagatgattttgttcaggaattttgctgtttttcttagtgctaataccttgcctcttattcctgctacagcagggtggtaatattggcattctgattaaatactgtgccttaggagactggaagtttaaaaatgtacaagtcctttcagtgatgagggaattgattttttttaaaagtctttttcttagaaagccaaaatgtttgtttttttaagattctgaaatgtgttgtgacaacaatgacctatttatgatcttaaatctttttt

SEQ ID NO: 20205 - protein, 534 aa, Homo sapiens; identical to SEQ ID NO: 2535

SEQ ID NO: 20206 - DNA, 2899 bp, Homo sapiens
cccacaccacggcggccggtcccagccactcctctcggcctcagactccacgggccggccacgggtgggggcagcagggaggcacgggcttggcgcctgcgcagtcgccggggcgctggtgtgatcgagctcacgtagcgagggctgcagtcgcctcctccctggcgctgccatcgcggcctagaggttataaaagggctaacgggctccctctgctgcccagtcgcgccgccagcgggctgagggtaggaagtagccgctccgagtggaggcgactgggggctgaagagcgcgccgccctctcgtcccactttccaggtgtgtgatcctgtaaaattaaatcttccaagatgatctggtatatattaattataggaattctgcttccccagtctttggctcatccaggcttttttacttcaattggtcagatgactgatttgatccatactgagaaagatctggtgacttctctgaaagattatattaaggcagaagaggacaagttagaacaaataaaaaaatgggcagagaagttagatcggctaactagtacagcgacaaaagatccagaaggatttgttgggcatccagtaaatgcattcaaattaatgaaacgtctgaatactgagtggagtgagttggagaatctggtccttaaggatatgtcagatggctttatctctaacctaaccattcagagacagtactttcctaatgatgaagatcaggttggggcagccaaagctctgttacgtctccaggatacctacaatttggatacagataccatctcaaagggtaatcttccaggagtgaaacacaaatcttttctaacggctgaggactgctttgagttgggcaaagtggcctatacagaagcagattattaccatacggaactgtggatggaacaagccctaaggcaactggatgaaggcgagatttctaccatagataaagtctctgttctagattatttgagctatgcggtatatcagcagggagacctggataaggcacttttgctcacaaagaagcttcttgaactagatcctgaacatcagagagctaatggtaacttaaaatattttgagtatataatggctaaagaaaaagatgtcaataagtctgcttcagatgaccaatctgatcagaaaactacaccaaagaaaaaaggggttgctgtggattacctgccagagagacagaagtacgaaatgctgtgccgtggggagggtatcaaaatgacccctcggagacagaaaaaactcttttgccgctaccatgatggaaaccgtaatcctaaatttattctggctccagctaaacaggaggatgaatgggacaagcctcgtattattcgcttccatgatattatttctgatgcagaaattgaaatcgtcaaagacctagcaaaaccaaggctgagccgagctacagtacatgaccctgagactggaaaattgaccacagcacagtacagagtatctaagagtgcctggctctctggctatgaaaatcctgtggtgtctcgaattaatatgagaatacaagatctaacaggactagatgtttccacagcagaggaattacagaaagatgagccagatgctttcaaagagctggggacaggaaatagaattgctacatggctgttttatatgagtgatgtgtctgcaggaggagccactgtttttcctgaagttggagctagtgtttggcccaaaaaaggaactgctgttttctggtataatctgtttgccagtggagaaggagattatagtacacggcatgcagcctgtccagtgctagttggcaacaaatgggtatccaataaatggctccatgaacgtggacaagaatttcgaagaccttgtacgttgtcagaattggaatgacaaacaggcttccctttttctcctattgttgtactcttatgtgtctgatatacacatttcctagtcttaactttcaggagtttacaattgactaacactccatgattgattcagtcatgaacctcatcccatgtttcatctgtggacaattgcttactttgtgggttcttttaaaagtaacacgaaatcatcatattgcataaaaccttaaagttctgttggtatcacagaagacaaggcagagtttaaagtgaggaattttatatttaaagaactttttggttggataaaaacataatttgagcatccagttttagtatttcactacatctcagttggtgggtgttaagctagaatgggctgtgtgataggaaacaaatgccttacagatgtgcctaggtgttctgtttacctagtgtcttactctgttttctggatctgaagactagtaataaactaggacactaactgggttccatgtgattgccctttcatatgatcttctaagttgatttttttcctcccaagtcttttttaaagaaagtatactgtattttaccaaccccctctcttttcttttagctcctctgtggtgaattaaacgtacttgagttaaaatatttcgattttttttttttttttaatggaaagtcctgcataacaacactgggccttcttaactaaaatgctcaccacttagcctgtttttttatcccttttttaaaatgacagatgattttgttcaggaattttgctgtttttcttagtgctaataccttgcctcttattcctgctacagcagggtggtaatattggcattctgattaaatactgtgccttaggagactggaagtttaaaaatgtacaagtcctttcagtgatgagggaattgattttttttaaaagtctttttcttagaaagccaaaatgtttgtttttttaagattctgaaatgtgttgtgacaacaatgacctatttatgatcttaaatctttttt

SEQ ID NO: 20207 - protein, 516 aa, Homo sapiens; identical to SEQ ID NO: 20193

SEQ ID NO: 20208 - DNA, 2953 bp, Homo sapiens
cccacaccacggcggccggtcccagccactcctctcggcctcagactccacgggccggccacgggtgggggcagcagggaggcacgggcttggcgcctgcgcagtcgccggggcgctggtgtgatcgagctcacgtagcgagggctgcagtcgcctcctccctggcgctgccatcgcggcctagaggttataaaagggctaacgggctccctctgctgcccagtcgcgccgccagcgggctgagggtaggaagtagccgctccgagtggaggcgactgggggctgaagagcgcgccgccctctcgtcccactttccaggtgtgtgatcctgtaaaattaaatcttccaagatgatctggtatatattaattataggaattctgcttccccagtctttggctcatccaggcttttttacttcaattggtcagatgactgatttgatccatactgagaaagatctggtgacttctctgaaagattatattaaggcagaagaggacaagttagaacaaataaaaaaatgggcagagaagttagatcggctaactagtacagcgacaaaagatccagaaggatttgttgggcatccagtaaatgcattcaaattaatgaaacgtctgaatactgagtggagtgagttggagaatctggtccttaaggatatgtcagatggctttatctctaacctaaccattcagagacagtactttcctaatgatgaagatcaggttggggcagccaaagctctgttacgtctccaggatacctacaatttggatacagataccatctcaaagggtaatcttccaggagtgaaacacaaatcttttctaacggctgaggactgctttgagttgggcaaagtggcctatacagaagcagattattaccatacggaactgtggatggaacaagccctaaggcaactggatgaaggcgagatttctaccatagataaagtctctgttctagattatttgagctatgcggtatatcagcagggagacctggataaggcacttttgctcacaaagaagcttcttgaactagatcctgaacatcagagagctaatggtaacttaaaatattttgagtatataatggctaaagaaaaagatgtcaataagtctgcttcagatgaccaatctgatcagaaaactacaccaaagaaaaaaggggttgctgtggattacctgccagagagacagaagtacgaaatgctgtgccgtggggagggtatcaaaatgacccctcggagacagaaaaaactcttttgccgctaccatgatggaaaccgtaatcctaaatttattctggctccagctaaacaggaggatgaatgggacaagcctcgtattattcgcttccatgatattatttctgatgcagaaattgaaatcgtcaaagacctagcaaaaccaaggctgagccgagctacagtacatgaccctgagactggaaaattgaccacagcacagtacagagtatctaagagtgcctggctctctggctatgaaaatcctgtggtgtctcgaattaatatgagaatacaagatctaacaggactagatgtttccacagcagaggaattacaggtagcaaattatggagttggaggacagtatgaaccccattttgactttgcacggaaagatgagccagatgctttcaaagagctggggacaggaaatagaattgctacatggctgttttatatgagtgatgtgtctgcaggaggagccactgtttttcctgaagttggagctagtgtttggcccaaaaaaggaactgctgttttctggtataatctgtttgccagtggagaaggagattatagtacacggcatgcagcctgtccagtgctagttggcaacaaatgggtatccaataaatggctccatgaacgtggacaagaatttcgaagaccttgtacgttgtcagaattggaatgacaaacaggcttccctttttctcctattgttgtactcttatgtgtctgatatacacatttcctagtcttaactttcaggagtttacaattgactaacactccatgattgattcagtcatgaacctcatcccatgtttcatctgtggacaattgcttactttgtgggttcttttaaaagtaacacgaaatcatcatattgcataaaaccttaaagttctgttggtatcacagaagacaaggcagagtttaaagtgaggaattttatatttaaagaactttttggttggataaaaacataatttgagcatccagttttagtatttcactacatctcagttggtgggtgttaagctagaatgggctgtgtgataggaaacaaatgccttacagatgtgcctaggtgttctgtttacctagtgtcttactctgttttctggatctgaagactagtaataaactaggacactaactgggttccatgtgattgccctttcatatgatcttctaagttgatttttttcctcccaagtcttttttaaagaaagtatactgtattttaccaaccccctctcttttcttttagctcctctgtggtgaattaaacgtacttgagttaaaatatttcgattttttttttttttttaatggaaagtcctgcataacaacactgggccttcttaactaaaatgctcaccacttagcctgtttttttatcccttttttaaaatgacagatgattttgttcaggaattttgctgtttttcttagtgctaataccttgcctcttattcctgctacagcagggtggtaatattggcattctgattaaatactgtgccttaggagactggaagtttaaaaatgtacaagtcctttcagtgatgagggaattgattttttttaaaagtctttttcttagaaagccaaaatgtttgtttttttaagattctgaaatgtgttgtgacaacaatgacctatttatgatcttaaatctttttt

SEQ ID NO: 20209 - protein, 534 aa, Homo sapiens; identical to SEQ ID NO: 2533

SEQ ID NO: 20210 - DNA, 3024 bp, Homo sapiens
cccacaccacggcggccggtcccagccactcctctcggcctcagactccacgggccggccacgggtgggggcagcagggaggcacgggcttggcgcctgcgcagtcgccggggcgctggtgtgatcgagctcacgtagcgagggctgcagtcgcctcctccctggcgctgccatcgcggcctagaggttataaaagggctaacgggctccctctgctgcccagtcgcgccgccagcgggctgagggtaggaagtagccgctccgagtggaggcgactgggggctgaagagcgcgccgccctctcgtcccactttccaggtgtgtgatcctgtaaaattaaatcttccaagatgatctggtatatattaattataggaattctgcttccccagtctttggctcatccaggcttttttacttcaattggtcagatgactgatttgatccatactgagaaagatctggtgacttctctgaaagattatattaaggcagaagaggacaagttagaacaaataaaaaaatgggcagagaagttagatcggctaactagtacagcgacaaaagatccagaaggatttgttgggcatccagtaaatgcattcaaattaatgaaacgtctgaatactgagtggagtgagttggagaatctggtccttaaggatatgtcagatggctttatctctaacctaaccattcagagacagtactttcctaatgatgaagatcaggttggggcagccaaagctctgttacgtctccaggatacctacaatttggatacagataccatctcaaagggtaatcttccaggagtgaaacacaaatcttttctaacggctgaggactgctttgagttgggcaaagtggcctatacagaagcagattattaccatacggaactgtggatggaacaagccctaaggcaactggatgaaggcgagatttctaccatagataaagtctctgttctagattatttgagctatgcggtatatcagcagggagacctggataaggcacttttgctcacaaagaagcttcttgaactagatcctgaacatcagagagctaatggtaacttaaaatattttgagtatataatggctaaagaaaaagatgtcaataagtctgcttcagatgaccaatctgatcagaaaactacaccaaagaaaaaaggggttgctgtggattacctgccagagagacagaagtacgaaatgctgtgccgtggggagggtatcaaaatgacccctcggagacagaaaaaactcttttgccgctaccatgatggaaaccgtaatcctaaatttattctggctccagctaaacaggaggatgaatgggacaagcctcgtattattcgcttccatgatattatttctgatgcagaaattgaaatcgtcaaagacctagcaaaaccaaggctgaggcgagccaccatttcaaacccaataacaggagacttggagacggtacattacagaattagcaaaagctgagccgagctacagtacatgaccctgagactggaaaattgaccacagcacagtacagagtatctaagagtgcctggctctctggctatgaaaatcctgtggtgtctcgaattaatatgagaatacaagatctaacaggactagatgtttccacagcagaggaattacaggtagcaaattatggagttggaggacagtatgaaccccattttgactttgcacggaaagatgagccagatgctttcaaagagctggggacaggaaatagaattgctacatggctgttttatatgagtgatgtgtctgcaggaggagccactgtttttcctgaagttggagctagtgtttggcccaaaaaaggaactgctgttttctggtataatctgtttgccagtggagaaggagattatagtacacggcatgcagcctgtccagtgctagttggcaacaaatgggtatccaataaatggctccatgaacgtggacaagaatttcgaagaccttgtacgttgtcagaattggaatgacaaacaggcttccctttttctcctattgttgtactcttatgtgtctgatatacacatttcctagtcttaactttcaggagtttacaattgactaacactccatgattgattcagtcatgaacctcatcccatgtttcatctgtggacaattgcttactttgtgggttcttttaaaagtaacacgaaatcatcatattgcataaaaccttaaagttctgttggtatcacagaagacaaggcagagtttaaagtgaggaattttatatttaaagaactttttggttggataaaaacataatttgagcatccagttttagtatttcactacatctcagttggtgggtgttaagctagaatgggctgtgtgataggaaacaaatgccttacagatgtgcctaggtgttctgtttacctagtgtcttactctgttttctggatctgaagactagtaataaactaggacactaactgggttccatgtgattgccctttcatatgatcttctaagttgatttttttcctcccaagtcttttttaaagaaagtatactgtattttaccaaccccctctcttttcttttagctcctctgtggtgaattaaacgtacttgagttaaaatatttcgattttttttttttttttaatggaaagtcctgcataacaacactgggccttcttaactaaaatgctcaccacttagcctgtttttttatcccttttttaaaatgacagatgattttgttcaggaattttgctgtttttcttagtgctaataccttgcctcttattcctgctacagcagggtggtaatattggcattctgattaaatactgtgccttaggagactggaagtttaaaaatgtacaagtcctttcagtgatgagggaattgattttttttaaaagtctttttcttagaaagccaaaatgtttgtttttttaagattctgaaatgtgttgtgacaacaatgacctatttatgatcttaaatctttttt

SEQ ID NO: 20211 - protein, 383 aa, Homo sapiens; identical to SEQ ID NO: 20189

SEQ ID NO: 20212 - DNA, 278 bp, Homo sapiens
ggcttcctgatccctgtgcataataagtttacttcactgcttacaaacactgagaagtcaccagatctttctcagtatggatcaaatcagtcatctgacctagaaggggaagaaggttatcaaatactcatatccttcaacacaagtatgttaagaataagaatgattgagactgtttcattctatgagacaatttaactggcatgaatcagatatgctggagactatcttttcttcctttttaccagataaaccaaaataaagccaaaaacttttct

SEQ ID NO: 20213 - DNA, 3000 bp, Homo sapiens
cttgtgccttagcctcccgagtagctggaactacagacatgcgccatgatgtccatctaattttcatatatatatatatgtattttttttttaacagacatgggggtttcaccatgttggccaggctggtctcgaacttctgacctcaggtgatccacccagctcggccacccaaagtactgggattacaggtgtgagccacacctggtttccttattattttcacttgtcaaatgtgtatgtacgtatatttgtgtgtgtatgttttttaatgttgtacatacatactttttttttttctttttcactctgttgtccaggctggagtgcagtggtgtgatctcagcttactgcaacctctgcctcccaggttcaagcaattctcctgtctcagcctccagagtagctgggattacaggtgcacgccaccatgcctggctagtttttatatttttagtagaggtgcggtttcaacatattggtcaggctggtctcgaactcctgacctcaggtgatccacccacctcagcctcccaaagtgcttggattacaggtgtgagccaccatgcccagctgaaacatacatttttatgttgtaggttttcttcaaaggactccaaattctacaacagcaggaatcatatacccagcacttaccatagtctggcttatatgggcaggcaattatttatggatgaatgaatttctattgccacagtgcaggttttaattcttttcaacaaagattataagctccttaaaagcagagattgtctaattaaagtttgatcttccacagctcagtaggcagtgtcttggacacagaaggtaggtgttctataaatatttattctatgaatcttgaattactaacctagactctctttctcttctaattcacatagcatatgtgattgattaaagttcacaactcattgttggtaatgtcatataaattattaggcttgttgtccagttttgaaaaatctccaataagctatttatttatttagacacaggatctctttctgttgcccaggctggagtgcagtagtgagaccacagcttgctgcatcctatatcctgatcctctagcctcagcctcctgaatagctgggactacagacacatatcaccacacccagctaattaaaaaaactttttttgtagaggtaaggtctcaccatcttgccctggctggtctcaaacttctggcctaggtgggaggattgcttgaacccaggagttcaagaccagcctggacacatggtgagacctgtctctgcaaacaaaacaaaatcctacagaaaacccggacatggtcgtgcaggcctgtagtcccagctacttgggaggtgggaggatcgctggagcgcagtagttggaggttacggtgagctatgatcatgcaactccactccagcctgggtgacagagtgaaaccctgtctctaagaaaaaaacaacacttttttggctaggtattgatgaatgctaaatctttacaattttacacatccaataattggaataatttcccacagattagcttcaggttcccaaaatttcaaccctgcttctcttctactattcacatagtttttgatgctagaacattggacacattaaaataacttcaagagttctggccctgcacctttgttttgcaatgctgggtggatcagcacaacgggcaattggagtattcttggaagccactgggacagctggcaatatcttaactacacatggaagtgactgtgggttataaaaatatatcccagtaaattcaaaccaaatgtattcctaactcaacttccctttagctaaatttcaaaaatgtttgcttgccactccaacactagacaaagggaaacatggtggagggaagtcactaaggactaaagattgcagtttaaaatacattacttttataaattttacagaagcataggacagtgtgaacatattactagggacccttccagggacttggaaagggctagtgtaaatgagggcacctgaagctgaagcctccttagcttcacagtaaatctgcttcagagtctacggccattttaattactgagtaaactgtcaactttcagagtcagctctatgtagggctagtgaatatgttgattacagctccatttgaggaagtttttttttttttttttgagatggagtctgactctgtccccaggctggagtgcaatggtgtgatctcagctcactgcaacctctgcctcctgggtccaaatgattctcatgcctccgcctcctgagtagctgggattacaggtgtttgccaccatgcccagctaatttttgcatttttagtagagacagggtttcaccatgttggccaggatggtcttgatctcctgaccttgtgatccgtctgccttggcctcgcaaagtgcagggattacaggtgtgagccaccgcacgccctgcctctttggtcttataattactttatactcctaaaaagtattgaggactccaaaaagcttttatgtggatcatatttatcaacatttactatattaggaattaaaacaaacatataaaatatttattcatttaaaacaacaataataaacctgttacatgttaacataacataaataactttttttttgagagagggtctggccatgttgcccaggctgatttcgaactcctgggctcaggtgatcttcccgcctcggcctcccaaagtgctgggattacaggtgtgagccacttcatttggcctaataacatatttttaatgaaaaataactattttccaaagcaaaataatttagtgagaagagtggcattattttacatttctgcaaatctcttcagtgtctgggctaatagaagattctcatatctgtgtctgcgttccatctgtatcacaggcatgtagtctctggaagacctcactgtattgttattagagtgaaaaaggcagtaagtcttagtatgaaaataaagtcttagtatg

SEQ ID NO: 20214 - protein, 146 aa, Homo sapiens
MFFNVVHTYFFFFFFTLLSRLECSGVISAYCNLCLPGSSNSPVSASRVAGITGARHHAWLVFIFLVEVRFQHIGQAGLELLTSGDPPTSASQSAWITGVSHHAQLKHTFLCCRFSSKDSKFYNSRNHIPSTYHSLAYMGRQLFMDE

SEQ ID NO: 20215 - DNA, 510 bp, Homo sapiens
ctggagaacacagcagcatgcctgggaactgaactacaattcccagagtgcatctctaggaggattctgggaagtgtggcagaagcagcaatggtccctccagggaacggaagccgttgaacgtgaacatttggagtttcctcttttgtgctgattcctgaggactaggaaggtgccccgaaaagaattcagagacctgacaatgtccctgtattgtggaatagcttgcaggagaaaatttttttggtgctataggctgctgtcaacctatgttactaagacacgatttctacatggttgtcaatcatgcctatgtaatgaagccaccataaaaacccaaaaggacagggttcagagagcctctggatagctgaacacatggaagttcctggagggtggtgcacccagggagtcatggaagctctgcaccctccccccacatacctgacctaaatgcatctcttcatttgtatccttcgtaatatcctatataataaaccagtaaacatc

SEQ ID NO: 20216 - protein, 55 aa, Homo sapiens
MSLYCGIACRRKFFWCYRLLSTYVTKTRFLHGCQSCLCNEATIKTQKDRVQRASG

SEQ ID NO: 20217 - DNA, 1623 bp, Homo sapiens
gcagcaatggtccctccagggaacggaagccgttgaacgtgaacatttggagtttcctcttttgtgctgattcctgaggactaggaaggtgccccgaaaagaattcagagacctgacaatgtccctgtattgtggaatagcttgcaggagaaaatttttttggtgctataggctgctgtcaacctatgttactaagacacggtatttatttgaactgaaggaagatgatgatgcatgtaaaaaagcccagcaaacaggagcgttttacctctttcatagtctggctcctctgcttcagacttcagcacatcaatacctggccccccggcacagcctgttagagttggaaaggctcctgggtaaatttggacaggatgcacaaagaatagaagattctgtgctgattggatgctctgagcagcaggaagcatggtttgctctggatctaggtctggatagctccttttccataagtgcctccttacacaaacctgaaatggagacagagctcaaggggtctttcattgagctgagaaaggcactctttcaactcaatgcaagggatgcctccttgctgtccacggctcaagctcttctccgctggcatgatgctcatcagttctgcagcagaagtgggcagcccaccaagaagaacgtggctggcagcaagcgtgtgtgcccttccaataatataatctattatccacaggtgaaagtgtggaagagaccatccgccgagaagttgcagaagaggtgggattggaggtggaaagcctgcagtactatgcatcccagcattggcccttccctagtggctcactcatgattgcttgccatgcaactgtgaaaccagggcagacagaaatccaggtgaacttgagagaattagagacagctgcctggttcagtcatgatgaggtagccacagccctgaagagaaagggcccctatactcagcaacagaatgggactttcccattctggctgccccctaagttagccatctcccaccaactgattaaggagtgggtggaaaaacagacctgttcttccctgcctgcttagcccggatcaagtcacttagatcgctccttggtattcctgagggacaaactagagatcagttgacaaaggagaagtgacaaaagataagctgcagaaggacctcagaagggcagagcaaagggtgagcctacagtaagacacttctatcagcagtgttaatggaagaaattcctaccaatgggcaatcaaaaaagccagtgtgagaagaaaactgatgagctgtcaactgtcaaaaatcagggggaagggggaagcattagtttggatgtaggcccttgttcagtcattttctctaaggccttggaagcaaacatcttctggcatatggcttgttaatgttgtgtttacactaactgccaaaatgtgcctgttgtaagtttggttaaaacttttatcttagtattgaaaatatatagcaagttttaagtcattactgagttacttgttacccttacagaattaagaaaaatagcacagtatgacattttaaaattcatgtacaggtgcattctagttacatgaacatgctagttaaataaaagtcacaattaagtcatt

SEQ ID NO: 20218 - protein, 235 aa, Homo sapiens
MSLYCGIACRRKFFWCYRLLSTYVTKTRYLFELKEDDDACKKAQQTGAFYLFHSLAPLLQTSAHQYLAPRHSLLELERLLGKFGQDAQRIEDSVLIGCSEQQEAWFALDLGLDSSFSISASLHKPEMETELKGSFIELRKALFQLNARDASLLSTAQALLRWHDAHQFCSRSGQPTKKNVAGSKRVCPSNNIIYYPQVKVWKRPSAEKLQKRWDWRWKACSTMHPSIGPSLVAHS

SEQ ID NO: 20219 - DNA, 1468 bp, Homo sapiens
gcagcaatggtccctccagggaacggaagccgttgaacgtgaacatttggagtttcctcttttgtgctgattcctgaggactaggaaggtgccccgaaaagaattcagagacctgacaatgtccctgtattgtggaatagcttgcaggagaaaatttttttggtgctataggctgctgtcaacctatgttactaagacacggtatttatttgaactgaaggaagatgatgatgcatgtaaaaaagcccagcaaacaggagcgttttacctctttcatagtctggctcctctgcttcagacttcagcacatcaatacctggccccccggcacagcctgttagagttggaaaggctcctgggtaaatttggacaggatgcacaaagaatagaagattctgtgctgattggatgctctgagcagcaggaagcatggtttgctctggatctaggtctggatagctccttttccataagtgcctccttacacaaacctgaaatggagacagagctcaaggggtctttcattgagctgagaaaggcactctttcaactcaatgcaagggatgcctccttgctgtccacggctcaagctcttctccgctggcatgatgctcatcagttctgcagcagaagtgggcagcccaccaagaagaacgtggctggcagcaagcgtgtgtgcccttccaataatataatctattatccacagatccaggtgaacttgagagaattagagacagctgcctggttcagtcatgatgaggtagccacagccctgaagagaaagggcccctatactcagcaacagaatgggactttcccattctggctgccccctaagttagccatctcccaccaactgattaaggagtgggtggaaaaacagacctgttcttccctgcctgcttagcccggatcaagtcacttagatcgctccttggtattcctgagggacaaactagagatcagttgacaaaggagaagtgacaaaagataagctgcagaaggacctcagaagggcagagcaaagggtgagcctacagtaagacacttctatcagcagtgttaatggaagaaattcctaccaatgggcaatcaaaaaagccagtgtgagaagaaaactgatgagctgtcaactgtcaaaaatcagggggaagggggaagcattagtttggatgtaggcccttgttcagtcattttctctaaggccttggaagcaaacatcttctggcatatggcttgttaatgttgtgtttacactaactgccaaaatgtgcctgttgtaagtttggttaaaacttttatcttagtattgaaaatatatagcaagttttaagtcattactgagttacttgttacccttacagaattaagaaaaatagcacagtatgacattttaaaattcatgtacaggtgcattctagttacatgaacatgctagttaaataaaagtcacaattaagtcatt

SEQ ID NO: 20220 - protein, 263 aa, Homo sapiens
MSLYCGIACRRKFFWCYRLLSTYVTKTRYLFELKEDDDACKKAQQTGAFYLFHSLAPLLQTSAHQYLAPRHSLLELERLLGKFGQDAQRIEDSVLIGCSEQQEAWFALDLGLDSSFSISASLHKPEMETELKGSFIELRKALFQLNARDASLLSTAQALLRWHDAHQFCSRSGQPTKKNVAGSKRVCPSNNIIYYPQIQVNLRELETAAWFSHDEVATALKRKGPYTQQQNGTFPFWLPPKLAISHQLIKEWVEKQTCSSLPA

SEQ ID NO: 20221 - DNA, 2137 bp, Homo sapiens
gcagcaatggtccctccagggaacggaagccgttgaacgtgaacatttggagtttcctcttttgtgctgattcctgaggactaggaaggtgccccgaaaagaattcagagacctgacaatgtccctgtattgtggaatagcttgcaggagaaaatttttttggtgctataggctgctgtcaacctatgttactaagacacggtatttatttgaactgaaggaagatgatgatgcatgtaaaaaagcccagcaaacaggagcgttttacctctttcatagtctggctcctctgcttcagacttcagcacatcaatacctggccccccggcacagcctgttagagttggaaaggctcctgggtaaatttggacaggatgcacaaagaatagaagattctgtgctgattggatgctctgagcagcaggaagcatggtttgctctggatctaggtctggatagctccttttccataagtgcctccttacacaaacctgaaatggagacagagctcaaggggtctttcattgagctgagaaaggcactctttcaactcaatgcaagggatgcctccttgctgtccacggctcaagctcttctccgctggcatgatgctcatcagttctgcagcagaagtgggcagcccaccaagaagaacgtggctggcagcaagcgtgtgtgcccttccaataatataatctattatccacagatggctcctgtggcgatcacgctggtgtcagatgggacccgatgcctgcttgcccgccaaagctcctttcccaagggaatgtattctgccttggcaggtttttgtgatatagcctacagggctgtcctgaattaatctgagtgcttgtaggtgaaagtgtggaagagaccatccgccgagaagttgcagaagaggtgggattggaggtggaaagcctgcagtactatgcatcccagcattggcccttccctagtggctcactcatgattgcttgccatgcaactgtgaaaccagggcagacagaaatccaggtgaacttgagagaattagagacagctgcctggttcagtcatgatgaggtagccacagccctgaagagaaagggcccctatactcagcaacagaatgggactttcccattctggctgccccctaagttagccatctcccaccaactgattaaggagtgggtggaaaaacagacctgttcttccctgcctgcttagcccggatcaagtcacttagatcgctccttggtattcctgagggacaaactagagatcagttgacaaaggagaagtgacaaaagataagctgcagaaggacctcagaagggcagagcaaagggtgagcctacagtaagacacttctatcagcagtgttaatggaagaaattcctaccaatgggcaatcaaaaaagccagtgtgagaagaaaactgatgagctgtcaactgtcaaaaatcagggggaagggggaagcattagtttggatgtaggcccttgttcagtcattttctctaaggccttggaagcaaacatcttctggcatatggcttgttaatgttgtgtttacactaactgccaaaatgtgcctgttgtaagtttggttaaaacttttatcttagtattgaaaatatatagcaagttttaagtcattactgagttacttgttacccttacagaattaagaaaaatagcacagtatgacattttaaaattcatgtacaggtgcattctagttacatgaacatgctagttaaataaaagtcacaattaagtcattatgactcagagtactttataataaatcagatgccctgaggctctgttgaggaagtagaatcccaatgggactccagacagtaaatctttttcgctgttttcagctctgtcacatgctcagtttgtgacccagggaaaagactattgctttgccatgcctgttttcctaaataaaacagttgctggcatttgcacatccacaacgtgttgattaacaaagggattggtggagataaacagatgccaaacctgacctatttcttaaactttatggaataaactaaatttaggatttctcatcattcatatatgatgccataagggagaagagtttatttggggaaaataaaagaaatttccacacc

SEQ ID NO: 20222 - protein, 241 aa, Homo sapiens
MSLYCGIACRRKFFWCYRLLSTYVTKTRYLFELKEDDDACKKAQQTGAFYLFHSLAPLLQTSAHQYLAPRHSLLELERLLGKFGQDAQRIEDSVLIGCSEQQEAWFALDLGLDSSFSISASLHKPEMETELKGSFIELRKALFQLNARDASLLSTAQALLRWHDAHQFCSRSGQPTKKNVAGSKRVCPSNNIIYYPQMAPVAITLVSDGTRCLLARQSSFPKGMYSALAGFCDIAYRAVLN

SEQ ID NO: 20223 - DNA, 1987 bp, Homo sapiens
gcagcaatggtccctccagggaacggaagccgttgaacgtgaacatttggagtttcctcttttgtgctgattcctgaggactaggaaggtgccccgaaaagaattcagagacctgacaatgtccctgtattgtggaatagcttgcaggagaaaatttttttggtgctataggctgctgtcaacctatgttactaagacacggtatttatttgaactgaaggaagatgatgatgcatgtaaaaaagcccagcaaacaggagcgttttacctctttcatagtctggctcctctgcttcagacttcagcacatcaatacctggccccccggcacagcctgttagagttggaaaggctcctgggtaaatttggacaggatgcacaaagaatagaagattctgtgctgattggatgctctgagcagcaggaagcatggtttgctctggatctaggtctggatagctccttttccataagtgcctccttacacaaacctgaaatggagacagagctcaaggggtctttcattgagctgagaaaggcactctttcaactcaatgcaagggatgcctccttgctgtccacggctcaagctcttctccgctggcatgatgctcatcagttctgcagcagaagtgggcagcccaccaagaagaacgtggctggcagcaagcgtgtgtgcccttccaataatataatctattatccacaggtgaaagtgtggaagagaccatccgccgagaagttgcagaagaggtgggattggaggtggaaagcctgcagtactatgcatcccagcattggcccttccctagtggctcactcatgattgcttgccatgcaactgtgaaaccagggcagacagaaatccaggtgaacttgagagaattagagacagctgcctggttcagtcatgatgaggtagccacagccctgaagagaaagggcccctatactcagcaacagaatgggactttcccattctggctgccccctaagttagccatctcccaccaactgattaaggagtgggtggaaaaacagacctgttcttccctgcctgcttagcccggatcaagtcacttagatcgctccttggtattcctgagggacaaactagagatcagttgacaaaggagaagtgacaaaagataagctgcagaaggacctcagaagggcagagcaaagggtgagcctacagtaagacacttctatcagcagtgttaatggaagaaattcctaccaatgggcaatcaaaaaagccagtgtgagaagaaaactgatgagctgtcaactgtcaaaaatcagggggaagggggaagcattagtttggatgtaggcccttgttcagtcattttctctaaggccttggaagcaaacatcttctggcatatggcttgttaatgttgtgtttacactaactgccaaaatgtgcctgttgtaagtttggttaaaacttttatcttagtattgaaaatatatagcaagttttaagtcattactgagttacttgttacccttacagaattaagaaaaatagcacagtatgacattttaaaattcatgtacaggtgcattctagttacatgaacatgctagttaaataaaagtcacaattaagtcattatgactcagagtactttataataaatcagatgccctgaggctctgttgaggaagtagaatcccaatgggactccagacagtaaatctttttcgctgttttcagctctgtcacatgctcagtttgtgacccagggaaaagactattgctttgccatgcctgttttcctaaataaaacagttgctggcatttgcacatccacaacgtgttgattaacaaagggattggtggagataaacagatgccaaacctgacctatttcttaaactttatggaataaactaaatttaggatttctcatcattcatatatgatgccataagggagaagagtttatttggggaaaataaaagaaatttccacacc

SEQ ID NO: 20224 - protein, 235 aa, Homo sapiens; identical to SEQ ID NO: 20218

SEQ ID NO: 20225 - DNA, 1832 bp, Homo sapiens
gcagcaatggtccctccagggaacggaagccgttgaacgtgaacatttggagtttcctcttttgtgctgattcctgaggactaggaaggtgccccgaaaagaattcagagacctgacaatgtccctgtattgtggaatagcttgcaggagaaaatttttttggtgctataggctgctgtcaacctatgttactaagacacggtatttatttgaactgaaggaagatgatgatgcatgtaaaaaagcccagcaaacaggagcgttttacctctttcatagtctggctcctctgcttcagacttcagcacatcaatacctggccccccggcacagcctgttagagttggaaaggctcctgggtaaatttggacaggatgcacaaagaatagaagattctgtgctgattggatgctctgagcagcaggaagcatggtttgctctggatctaggtctggatagctccttttccataagtgcctccttacacaaacctgaaatggagacagagctcaaggggtctttcattgagctgagaaaggcactctttcaactcaatgcaagggatgcctccttgctgtccacggctcaagctcttctccgctggcatgatgctcatcagttctgcagcagaagtgggcagcccaccaagaagaacgtggctggcagcaagcgtgtgtgcccttccaataatataatctattatccacagatccaggtgaacttgagagaattagagacagctgcctggttcagtcatgatgaggtagccacagccctgaagagaaagggcccctatactcagcaacagaatgggactttcccattctggctgccccctaagttagccatctcccaccaactgattaaggagtgggtggaaaaacagacctgttcttccctgcctgcttagcccggatcaagtcacttagatcgctccttggtattcctgagggacaaactagagatcagttgacaaaggagaagtgacaaaagataagctgcagaaggacctcagaagggcagagcaaagggtgagcctacagtaagacacttctatcagcagtgttaatggaagaaattcctaccaatgggcaatcaaaaaagccagtgtgagaagaaaactgatgagctgtcaactgtcaaaaatcagggggaagggggaagcattagtttggatgtaggcccttgttcagtcattttctctaaggccttggaagcaaacatcttctggcatatggcttgttaatgttgtgtttacactaactgccaaaatgtgcctgttgtaagtttggttaaaacttttatcttagtattgaaaatatatagcaagttttaagtcattactgagttacttgttacccttacagaattaagaaaaatagcacagtatgacattttaaaattcatgtacaggtgcattctagttacatgaacatgctagttaaataaaagtcacaattaagtcattatgactcagagtactttataataaatcagatgccctgaggctctgttgaggaagtagaatcccaatgggactccagacagtaaatctttttcgctgttttcagctctgtcacatgctcagtttgtgacccagggaaaagactattgctttgccatgcctgttttcctaaataaaacagttgctggcatttgcacatccacaacgtgttgattaacaaagggattggtggagataaacagatgccaaacctgacctatttcttaaactttatggaataaactaaatttaggatttctcatcattcatatatgatgccataagggagaagagtttatttggggaaaataaaagaaatttccacacc

SEQ ID NO: 20226 - protein, 263 aa, Homo sapiens; identical to SEQ ID NO: 20220

SEQ ID NO: 20227 - DNA, 2016 bp, Homo sapiens
gcagcaatggtccctccagggaacggaagccgttgaacgtgaacatttggagtttcctcttttgtgctgattcctgaggactaggaaggtgccccgaaaagaattcagagacctgacaatgtccctgtattgtggaatagcttgcaggagaaaatttttttggtgctataggctgctgtcaacctatgttactaagacacggtatttatttgaactgaaggaagatgatgatgcatgtaaaaaagcccagcaaacaggagcgttttacctctttcatagtctggctcctctgcttcagacttcagcacatcaatacctggccccccggcacagcctgttagagttggaaaggctcctgggtaaatttggacaggatgcacaaagaatagaagattctgtgctgattggatgctctgagcagcaggaagcatggtttgctctggatctaggtctggatagctccttttccataagtgcctccttacacaaacctgaaatggagacagagctcaaggggtctttcattgagctgagaaaggcactctttcaactcaatgcaagggatgcctccttgctgtccacggctcaagctcttctccgctggcatgatgctcatcagttctgcagcagaagtgggcagcccaccaagaagaacgtggctggcagcaagcgtgtgtgcccttccaataatataatctattatccacaggtgaaagtgtggaagagaccatccgccgagaagttgcagaagaggtgggattggaggtggaaagcctgcagtactatgcatcccagcattggcccttccctagtggctcactcatgattgcttgccatgcaactgtgaaaccagggcagacagaaatccaggtgaacttgagagaattagagacagctgcctggttcagtcatgatgaggtagccacagccctgaagagaaagggcccctatactcagcaacagaatgggactttcccattctggctgccccctaagttagccatctcccaccaactgattaaggagtgggtggaaaaacagacctgttcttccctgcctgcttagcccggatcaagtcacttagatcgctccttggtattcctgagggacaaactagagatcagttgacaaaggagaagtgacaaaagataagctgcagaaggacctcagaagggcagagcaaagggtgagcctacagtaagacacttctatcagcagtgttaatggaagaaattcctaccaatgggcaatcaaaaaagccagtgtgagaagaaaactgatgagctgtcaactgtcaaaaatcagggggaagggggaagcattagtttggatgtaggcccttgttcagtcattttctctaaggccttggaagcaaacatcttctggcatatggcttgttaatgttgtgtttacactaactgccaaaatgtgcctgttgtaagtttggttaaaacttttatcttagtattgaaaatatatagcaagttttaagtcattactgagttacttgttacccttacagaattaagaaaaatagcacagtatgacattttaaaattcatgtacaggtgcattctagttacatgaacatgctagttaaataaaagtcacaattaagtcattatgactcagagtactttataataaatcagatgccctgaggctctgttgaggaagtagaatcccaatgggactccagacagtaaatctttttcgctgttttcagctctgtcacatgctcagtttgtgacccagggaaaagactattgctttgccatgcctgttttcctaaataaaacagttgctggcatttgcacatccacaacgtgttgattaacaaagggattggtggagataaacagatgccaaacctgacctatttcttaaactttatggaataaactaaatttaggatttctcatcattcatatatgatgccataagggagaagagtttatttggggaaaataaaagaaatttccacacctttgttctgatgtctttttctgtcctgtg

SEQ ID NO: 20228 - protein, 235 aa, Homo sapiens; identical to SEQ ID NO: 20218

SEQ ID NO: 20229 - DNA, 1861 bp, Homo sapiens
gcagcaatggtccctccagggaacggaagccgttgaacgtgaacatttggagtttcctcttttgtgctgattcctgaggactaggaaggtgccccgaaaagaattcagagacctgacaatgtccctgtattgtggaatagcttgcaggagaaaatttttttggtgctataggctgctgtcaacctatgttactaagacacggtatttatttgaactgaaggaagatgatgatgcatgtaaaaaagcccagcaaacaggagcgttttacctctttcatagtctggctcctctgcttcagacttcagcacatcaatacctggccccccggcacagcctgttagagttggaaaggctcctgggtaaatttggacaggatgcacaaagaatagaagattctgtgctgattggatgctctgagcagcaggaagcatggtttgctctggatctaggtctggatagctccttttccataagtgcctccttacacaaacctgaaatggagacagagctcaaggggtctttcattgagctgagaaaggcactctttcaactcaatgcaagggatgcctccttgctgtccacggctcaagctcttctccgctggcatgatgctcatcagttctgcagcagaagtgggcagcccaccaagaagaacgtggctggcagcaagcgtgtgtgcccttccaataatataatctattatccacagatccaggtgaacttgagagaattagagacagctgcctggttcagtcatgatgaggtagccacagccctgaagagaaagggcccctatactcagcaacagaatgggactttcccattctggctgccccctaagttagccatctcccaccaactgattaaggagtgggtggaaaaacagacctgttcttccctgcctgcttagcccggatcaagtcacttagatcgctccttggtattcctgagggacaaactagagatcagttgacaaaggagaagtgacaaaagataagctgcagaaggacctcagaagggcagagcaaagggtgagcctacagtaagacacttctatcagcagtgttaatggaagaaattcctaccaatgggcaatcaaaaaagccagtgtgagaagaaaactgatgagctgtcaactgtcaaaaatcagggggaagggggaagcattagtttggatgtaggcccttgttcagtcattttctctaaggccttggaagcaaacatcttctggcatatggcttgttaatgttgtgtttacactaactgccaaaatgtgcctgttgtaagtttggttaaaacttttatcttagtattgaaaatatatagcaagttttaagtcattactgagttacttgttacccttacagaattaagaaaaatagcacagtatgacattttaaaattcatgtacaggtgcattctagttacatgaacatgctagttaaataaaagtcacaattaagtcattatgactcagagtactttataataaatcagatgccctgaggctctgttgaggaagtagaatcccaatgggactccagacagtaaatctttttcgctgttttcagctctgtcacatgctcagtttgtgacccagggaaaagactattgctttgccatgcctgttttcctaaataaaacagttgctggcatttgcacatccacaacgtgttgattaacaaagggattggtggagataaacagatgccaaacctgacctatttcttaaactttatggaataaactaaatttaggatttctcatcattcatatatgatgccataagggagaagagtttatttggggaaaataaaagaaatttccacacctttgttctgatgtctttttctgtcctgtg

SEQ ID NO: 20230 - protein, 263 aa, Homo sapiens; identical to SEQ ID NO: 20220

SEQ ID NO: 20231 - DNA, 838 bp, Homo sapiens
gtattattcctactttaataaccccaaaactagtgtgatatactataaaaaatgtatttaaagtcattatttctggctcatacaccactcagaatgtaaactggtatgatatttttacaggttgatttggaaatatctattaaagtgtcaaataataagcctctctttttcctcagcaattccatgtttaggaatttaccctaggaaggaaaggatatgtacaagaacgttaactgaaaattatgataaaatggattaatacgcgacttaagaacaaatagaaggtgctgggattacaggcaagagccactgcccccggccttatttatatttttcaaatgactagaagtatacataccaaactattaaagagtgactaatttgggggagtgggatgaagacaaatattgaaaaaggtgcctgtaatttttattttgttcatttttctgtactgaaaaaaaaattagccatgtgtacttattccttttaagacaaaagaaaagcctaataaaatagtagttcctgagactaactggttaatgaggctacctccatgccactgttccccaaaacacctcaccatattccatgagccaaagggaattcatttggtgagtttcttggaccttgggaactgctgcctgatgttttgcctagtttctgctactaaattaaccttagccagttgtagattatcatggctgctgactcatgagctgatggtcacagagctatttatgtttttaaaagtacaatgtttgatagagatgaaaggtaatagcagtcttacccaactactaaatgatgaggcaaggtgctttaacattaagagtttctt

SEQ ID NO: 20232 - protein, 98 aa, Homo sapiens
MRLPPCHCSPKHLTIFHEPKGIHLVSFLDLGNCCLMFCLVSATKLTLASCRLSWLLTHELMVTELFMFLKVQCLIEMKGNSSLTQLLNDEARCFNIKS

SEQ ID NO: 20233 - DNA, 3086 bp, Homo sapiens
acagcagtgacgacacacaaggtttcggggactgagtgggtttcagactttctctcaggatttccgctggcttcaggttccggtcaggcgtcgggacagagcctgatccaggcttcggcggccggtggcagctctcgatcagctctcgcagtcggagaggcggctaaggaaaggtgccacagcagagacgcgaaggagaggccctagaaccttttcaaagaagaatggaagaaaccatgaagcttgctacgatggaagacacagtggagtactgcctgttcctgataccagatgagtcaagggactcagataaacataaagagattcttcagaagtacattgagagaataatcactcggtttgcacctatgctggtcccctacatctggcagaatcagcctttcaatcttaaatataaacctgggaaaggaggtgttcctgctcatatgtttggcgtgacaaagtttggggataacattgaggatgaatggtttattgtttatgtaataaagcagatcacaaaggaatttccagagttagtagcaaggattgaagacaatgatggtgaattcttgttaatagaagctgctgactttctccctaaatggctggatcctgaaaatagcaccaatagggtatttttctgccatggggaattgtgtattatccctgcaccaagaaaatctggagcagaatcttggttacccaccacacccccaacaattccacaagcattgaatataatcacagcacattcagaaaaaatacttgcttcagaatctatacgagctgctgtgaataggcgcatcagagggtacccagaaaaaattcaggcctcacttcatcgagcacactgcttccttccagctggcattgtggcagtgctaaagcagcgccccagattggtggctgcagcagtccaggcattttacctacgagaccctattgacctgcgagcttgtcgtgttttcaagacattcttgcctgaaacacgaataatgacatcggtcacattcactaaatgtctatatgcacaattggtgcaacaaaggtttgtgccagaccggcggagtggatacaggctgcctcctccatctgatccccagtaccgagcccatgaattgggcatgaaattggctcatggatttgagatcttatgctccaaatgtagcccacatttttctgactgcaagaaatcccttgtgactgcctcaccactctgggccagtttccttgaaagtctgaaaaagaatgattactttaagggactgatagaaggttctgctcagtaccgggaaaggctagaaatggcagagaattacttccagctctcagtagactggccagaaagttctcttgctatgagccctggtgaagaaatcttaaccttattacagacaataccatttgatatagaagaccttaagaaagaagcagctaatcttcccccagaggatgatgaccagtggttagatctctcaccagatcagctggaccagctgctgcaggaagctgttggcaaaaaagaatccgagtctgtttccaaggaggagaaggagcagaactatgacttaactgaagtctcagagagcatgaaagctttcatatccaaagtctcaacccacaagggagcagagctgcctcgagaaccttctgaggctccaatcacttttgatgcagattcttttcttaattattttgataagattttagggccaaggcctaatgagtcagattctgatgatctggatgatgaagactttgaatgtttagatagtgatgatgacttggactttgaaacacacgaacctggcgaagaggcttccctgaaaggaacacttgataatctcaagtcatacatggcccagatggaccaggaactagcacacacctgcatcagcaaaagtttcaccactaggaaccaagtggaacctgtatcccagactaccgataacaattcagatgaggaagattctggtacgggagaatctgttatggcaccagtagatgtagacctgaacctggtttcaaatatattggaatcctatagctcccaagctggactggcaggacctgcttccaatcttttacaaagcatgggagtgcagctgcctgacaacaccgatcacagaccaacaagtaagccaacaaaaaattaaccagcacatttagcttctcttttttctttttaaataaatattgaatatgattctgttcatttctagtttagattactcatttagtaaaaatgtttcttcattacaagttttacagattgacttctccatgagccccaaatgtggccctcttggcacaagtctttgtgatctcagctgtgggttatacacaggttttgaactcggcagggtagaatctagcccctagacaaccttgagatgaaattcacacacttcatgctaaagacataccctaccacaatatacccttggagtaattctaaatatttaaatttctcccttactgctattcatcctcagatcaaaatttcaagttgacaaatttggatttgaaaactcattcactttttcaatttttttaatgaggcataacatgcatatggttaagtgcacaaatcttaagtgtacagtcagtgaatttttgcatgtatgtatgtacctgaagcaagatatagaacttatttacttgtaaataacagctatattgatatgtcacataccaaaaaatttaccctttaaattatacaattcagtggtttttagtatatttacaaaattgtgcaaccatccctaccatctaattctagaatattagaaaccccatactcactaatagtctctcattcccttctactcccagcccctagaaaccactagtctactttctgtctctatggatttgcctattttggatatttcatacctgatactgtacttaattgttttaattaattaattggtttgatatttaatataactgatatatcttttgctaagatgaaatgtttatttcttaaaatgatgctcatattcctcctaaaataaatcaagtattatctatatatcataaaattcaccattaaaagcaaaaaaaaagtcttctttaca

SEQ ID NO: 20234 - protein, 644 aa, Homo sapiens; identical to SEQ ID NO: 2539

SEQ ID NO: 20235 - DNA, 2217 bp, Homo sapiens
acagcagtgacgacacacaaggtttcggggactgagtgggtttcagactttctctcaggatttccgctggcttcaggttccggtcaggcgtcgggacagagcctgatccaggcttcggcggccggtggcagctctcgatcagctctcgcagtcggagaggcggctaaggaaaggtgccacagcagagacgcgaaggagaggccctagaaccttttcaaagaagaatggaagaaaccatgaagcttgctacgatggaagacacagtggagtactgcctgttcctgataccagatgagtcaagggactcagataaacataaagagattcttcagaagtacattgagagaataatcactcggtttgcacctatgctggtcccctacatctggcagaatcagcctttcaatcttaaatataaacctgggaaaggaggtgttcctgctcatatgtttggcgtgacaaagtttggggataacattgaggatgaatggtttattgtttatgtaataaagcagatcacaaaggaatttccagagttagtagcaaggattgaagacaatgatggtgaattcttgttaatagaagctgctgactttctccctaaatggctggatcctgaaaatagcaccaatagggtatttttctgccatggggaattgtgtattatccctgcaccaagaaaatctggagcagaatcttggttacccaccacacccccaacaattccacaagcattgaatataatcacagcacattcagaaaaaatacttgcttcagaatctatacgagctgctgtgaataggcgcatcagagggtacccagaaaaaattcaggcctcacttcatcgagcacactgcttccttccagctggcattgtggcagtgctaaagcagcgccccagattggtggctgcagcagtccaggcattttacctacgagaccctattgacctgcgagcttgtcgtgttttcaagacattcttgcctgaaacacgaataatgacatcggtcacattcactaaatgtctatatgcacaattggtgcaacaaaggtttgtgccagaccggcggagtggatacaggctgcctcctccatctgatccccagtaccgagcccatgaattgggcatgaaattggctcatggatttgagatcttatgctccaaatgtagcccacatttttctgactgcaagaaatcccttgtgactgcctcaccactctgggccagtttccttgaaagtctgaaaaagaatgattactttaagggactgatagaaggttctgctcagtaccgggaaaggctagaaatggcagagaattacttccagctctcagtagactggccagaaagttctcttgctatgagccctggtgaagaaatcttaaccttattacagacaataccatttgatatagaagaccttaagaaagaagcagctaatcttcccccagaggatgatgaccagtggttagatctctcaccagatcagctggaccagctgctgcaggaagctgttggcaaaaaagaatccgagtctgtttccaaggaggagaaggagcagaactatgacttaactgaagtctcagagagcatgaaagctttcatatccaaagtctcaacccacaagggagcagagctgcctcgagaaccttctgaggctccaatcacttttgatgcagattcttttcttaattattttgataagattttagggccaaggcctaatgagtcagattctgatgatctggatgatgaagactttgaatgtttagatagtgatgatgacttggactttgaaacacacgaacctggcgaagaggcttccctgaaaggaacacttgataatctcaagtcatacatggcccagatggaccaggaactagcacacacctgcatcagcaaaagtttcaccactaggaaccaagtggaacctgtatcccagactaccgataacaattcagatgaggaagattctggtacgggagaatctgttatggcaccagtagatgtagacctgaacctggtttcaaatatattggaatcctatagctcccaagctggactggcaggacctgcttccaatcttttacaaagcatgggagtgcagctgcctgacaacaccgatcacagaccaacaagtaagccaacaaaaaattaaccagcacatttagcttctcttttttctttttaaataaatattgaatatgattctgttc

SEQ ID NO: 20236 - protein, 644 aa, Homo sapiens; identical to SEQ ID NO: 2539

SEQ ID NO: 20237 - DNA, 683 bp, Homo sapiens
acagcagtgacgacacacaaggtttcggggactgagtgggtttcagactttctctcaggatttccgctggcttcaggttccggtcaggcgtcgggacagagcctgatccaggcttcggcggccggtggcagctctcgatcagctctcgcagtcggagaggcggctaaggaaaggtgccacagcagagacgcgaaggagaggccctagaaccttttcaaagaagaatggaagaaaccatgaagcttgctacgatggaagacacagtggagtactgcctgttcctgataccagatgagtcaagggactcagataaacataaagagattcttcagaagtacattgagagaataatcactcggtttgcacctatgctggtcccctacatctggcagaatcagcctttcaatcttaaatataaacctgggaaaggaggtgttcctgctcatatgtttggcgtgacaaagtttggggataacattgaggatgaatggtttattgtttatgtaataaagcagatcacaaaggaatttccagagttagtagcaagcaccaatagggtatttttctgccatggggaattgtgtattatccctgcaccaagaaaatctggagcagaatcttggttacccaccacacccccaacaattccacaagcattgaatataatcacagcacattcagaa

SEQ ID NO: 20238 - protein, 152 aa, Homo sapiens
MEETMKLATMEDTVEYCLFLIPDESRDSDKHKEILQKYIERIITRFAPMLVPYIWQNQPFNLKYKPGKGGVPAHMFGVTKFGDNIEDEWFIVYVIKQITKEFPELVASTNRVFFCHGELCIIPAPRKSGAESWLPTTPPTIPQALNIITAHS

SEQ ID NO: 20239 - DNA, 611 bp, Homo sapiens
cttccttgacatactgatctttacttcattgtgggtttctgatttggctactagagatcttgatgacaagctacttatgaggcctgggtccagtaccatcctttcaactcgaaattggccaaatcgagctgtggagtttagtacatcatctctgtcatacacagtgcagtccaccaggagacgcaatccaccaccacgaactcttcatcccgactcgctctcctctccctcaccgacgcccctgagtcgaaataatctgctaccacctattggcacagctgaagtggaacatgtgagcactgtggggccacaaagacagatgaaaccccatggcgactctagtcgagctcaaagtgcggtggtggatgaacctaactatcagcagccacaagaaaggctccttttgcccgactttttccccaggcccaacacaactcaatcatttttggtagagtgacgtacttcctagaatggtcttgatagttggggaaagaaaaggtggggggaataatagtttggcagacttaagattttatctagaggcttaacccagaataaaagttgagtttccaacaataaaaagtgttataaatacattttgttcaaattct

SEQ ID NO: 20240 - protein, 126 aa, Homo sapiens
MRPGSSTILSTRNWPNRAVEFSTSSLSYTVQSTRRRNPPPRTLHPDSLSSPSPTPLSRNNLLPPIGTAEVEHVSTVGPQRQMKPHGDSSRAQSAVVDEPNYQQPQERLLLPDFFPRPNTTQSFLVE

SEQ ID NO: 20241 - DNA, 2519 bp, Homo sapiens
aaaaatatcctcaaaggtatgagataataaggccacagcagtgttttcaatgcggcttccaagttaagcattattatgtggatgtagctatatctataccaacagagctataaatgcattcatttggggatgagtagtcttgatgtataattaatctctcattccttctgacagtactttttttcaaagttgaaaagtaagttgctttgttacttctgggacatgaaagtatcattcagtttcaattactgtcttaaggataaggaatactgcaagctgctccagatcctactgaagggaatgaaggtttaggaactttacccgagaactatagttattagggaaaacgataaccagaaggtccagaactgtcaagaattccatcatcagctgggaatttacaaatccaaatcagcagagaagtgcaataccagatagggacaaatgttttattccagttctgtgggagagaaaaggccagcttctgttgtgtacccagagtatagagcttcaaaacaaaatcagaaaacactattttaaaaactaattttccaaaaatcctgagatctctacttgaaaacataggtagcctaaagctttctgtgcacattaaactcatctgcttcatttatctgatttctaatcaatttgctggtattgttataacttcatgctttcataccttcgtgtttgttggtgggatctgcagcccagtggcacccgactcgctctcctctccctcaccgacgcccctgagtcgaaataatctgctaccacctattggcacagctgaagtggaacatgtgagcactgtggggccacaaagacagatggtatgtttctttcatattgcctctccatgtacttaccatacaacctaatgggcagtaattctgcaggatctgtgccctgatcttgatttatactgtgttttgtcaaaagtacaaacacagtgctaatttatgacgtggaattggagctgtttggcctgcacttaccatatctgccatggtcgatagggttttaactacataccacattacagatagttttcactgtttctgtaacttttgtctcctctgcagaaaccccatggcgactctagtcgagctcaaagtgcggtggtggatgaacctaactatcagcagccacaagaaaggctccttttgcccgactttttccccaggcccaacacaactcaatcatttttgctggatacacagtatcgtcgctcatgtgcagttgagtatcctcatcaggcccgacctggcaggggatctgcaggtcctcagttacatgggtctacaaaatctcaaagcggaggcagaccagtctctcgaaccaggcagggaccataaggcaaatgagaagaatctatcaggctgcaggaaacacgagatttcatgaagcagtattcagtcatcaagtgatgcagagcttgtatagaagatcgactagaaatcatcttcatgaagagtgattttggcacaagtgaccgaagaacaaaacaccatagcagccaaaaatgacatgagtgttgtttctatctccagttactgtctctttcagcagaaattaacctatcccattggaaaggcaagtttgtacccaaagatgcaacagtgaataatacccaaatcactgctcatgttatctcttaacaatgatcagttcaatcatataggatttgatgagctcacacatacacaaaaagcagcaaatcatcagtgacaatatcactggcttcagaatacttcagcctgtgttcatttctggagagttgtactcagttttaagtcattttgctgttgaaaatctgacctcatcaaatagatgtcattcctaaaactctctttagatgtcctaccctatcagcagattaaaatggaaggggtgtgtaactaaaaacataaatgttaagcattagtataaagtaacttctgtaataaattatatcgcatattttttcagataggacagctcaaccttacgatgcctacctgatgccaggtgatgcttattttcttcctaaagtaggttactggtcatatcttttttccaaatattaaatgcaccttgccagatattctcctgcagctctaaggaaaggaaatcaatttaaaaataatttgtagaatctactattgagccaccaaagtataattccctaaaagtttaagaaaccctggcaattaattcagcataaacatatcctataaacagcaggagaggttcagctttctgattttactgtggaccttttcctaagggcattcatgaatgcagcaacagttttaactatggcttacatttattttaaatttcactaaatacaaatcttgattgtcatgccagttttagatcttattaattttcagaatggataaattcaaataatcataaattacggtaactttttattataccaaggtgttctaatgccatcatatgaagacagatgcttcaaacaacctgcattaaattatatttttaataaaattaaaatctatttttaacct

SEQ ID NO: 20242 - protein, 132 aa, Homo sapiens [sequence omitted]

SEQ ID NO: 20243 - DNA, 313 bp, Homo sapiens
acctattggcacagctgaagtggaacatgtgagcactgtggggccacaaagacagatgaaaccccatggcgactctagtcgagctcaaagtgcggtggtggatgaacctaactatcagcagccacaagaaaggctccttttgcccgactttttccccaggcccaacacaactcaatcatttttggtagagtgacgtacttcctagaatggtcttgatagttggggaaagaaaaggtggggggaataatagtttggcagacttaagattttatctagaggcttaacccagaataaaagttgagtttccaacaat

SEQ ID NO: 20244 - protein, 45 aa, Homo sapiens
MKPHGDSSRAQSAVVDEPNYQQPQERLLLPDFFPRPNTTQSFLVE

SEQ ID NO: 20245 - DNA, 1480 bp, Homo sapiens
agctgaagtggaacatgtgagcactgtggggccacaaagacagatgaaaccccatggcgactctagtcgagctcaaagtgcggtggtggatgaacctaactatcagcagccacaagaaaggctccttttgcccgactttttccccaggcccaacacaactcaatcatttttgctggatacacagtatcgtcgctcatgtgcagttgagtatcctcatcaggcccgacctggcaggggatctgcaggtcctcagttacatgggtctacaaaatctcaaagcggaggcagaccagtctctcgaaccaggcagggaccataaggcaaatgagaagaatctatcaggctgcaggaaacacgagatttcatgaagcagtattcagtcatcaagtgatgcagagcttgtatagaagatcgactagaaatcatcttcatgaagagtgattttggcacaagtgaccgaagaacaaaacaccatagcagccaaaaatgacatgagtgttgtttctatctccagttactgtctctttcagcagaaattaacctatcccattggaaaggcaagtttgtacccaaagatgcaacagtgaataatacccaaatcactgctcatgttatctcttaacaatgatcagttcaatcatataggatttgatgagctcacacatacacaaaaagcagcaaatcatcagtgacaatatcactggcttcagaatacttcagcctgtgttcatttctggagagttgtactcagttttaagtcattttgctgttgaaaatctgacctcatcaaatagatgtcattcctaaaactctctttagatgtcctaccctatcagcagattaaaatggaaggggtgtgtaactaaaaacataaatgttaagcattagtataaagtaacttctgtaataaattatatcgcatattttttcagataggacagctcaaccttacgatgcctacctgatgccaggtgatgcttattttcttcctaaagtaggttactggtcatatcttttttccaaatattaaatgcaccttgccagatattctcctgcagctctaaggaaaggaaatcaatttaaaaataatttgtagaatctactattgagccaccaaagtataattccctaaaagtttaagaaaccctggcaattaattcagcataaacatatcctataaacagcaggagaggttcagctttctgattttactgtggaccttttcctaagggcattcatgaatgcagcaacagttttaactatggcttacatttattttaaatttcactaaatacaaatcttgattgtcatgccagttttagatcttattaattttcagaatggataaattcaaataatcataaattacggtaactttttattataccaaggtgttctaatgccatcatatgaagacagatgcttcaaacaacctgcattaaattatatttttaataaaattaaaatctatttttaacct

SEQ ID NO: 20246 - protein, 104 aa, Homo sapiens [sequence omitted]

SEQ ID NO: 20247 - DNA, 3511 bp, Homo sapiens
agctgaagtggaacatgtgagcactgtggggccacaaagacagatgaaaccccatggcgactctagtcgagctcaaagtgcggtggtggatgaacctaactatcagcagccacaagaaaggctccttttgcccgactttttccccaggcccaacacaactcaatcatttttgctggatacacagtatcgtcgctcatgtgcagttgagtatcctcatcaggcccgacctggcaggggatctgcaggtcctcagttacatgggtctacaaaatctcaaagcggaggcagaccagtctctcgaaccaggcagggaccataaggcaaatgagaagaatctatcaggctgcaggaaacacgagatttcatgaagcagtattcagtcatcaagtgatgcagagcttgtatagaagatcgactagaaatcatcttcatgaagagtgattttggcacaagtgaccgaagaacaaaacaccatagcagccaaaaatgacatgagtgttgtttctatctccagttactgtctctttcagcagaaattaacctatcccattggaaaggcaagtttgtacccaaagatgcaacagtgaataatacccaaatcactgctcatgttatctcttaacaatgatcagttcaatcatataggatttgatgagctcacacatacacaaaaagcagcaaatcatcagtgacaatatcactggcttcagaatacttcagcctgtgttcatttctggagagttgtactcagttttaagtcattttgctgttgaaaatctgacctcatcaaatagatgtcattcctaaaactctctttagatgtcctaccctatcagcagattaaaatggaaggggtgtgtaactaaaaacataaatgttaagcattagtataaagtaacttctgtaataaattatatcgcatattttttcagataggacagctcaaccttacgatgcctacctgatgccaggtgatgcttattttcttcctaaagtaggttactggtcatatcttttttccaaatattaaatgcaccttgccagatattctcctgcagctctaaggaaaggaaatcaatttaaaaataatttgtagaatctactattgagccaccaaagtataattccctaaaagtttaagaaaccctggcaattaattcagcataaacatatcctataaacagcaggagaggttcagctttctgattttactgtggaccttttcctaagggcattcatgaatgcagcaacagttttaactatggcttacatttattttaaatttcactaaatacaaatcttgattgtcatgccagttttagatcttattaattttcagaatggataaattcaaataatcataaattacggtaactttttattataccaaggtgttctaatgccatcatatgaagacagatgcttcaaacaacctgcattaaattatatttttaataaaattaaaatctatttttaacctatttgtagtcacaaaccgaaaacgtgtcgtctttaccttagagctaaaggcttactttatgcatacggtatatttaatagtctacaaatcaaagatttaaacagtcccttaaaaattccatatattctcataccaactcatctacatagaaatgaaaatctctattgttctcacaaaccattaccatgagttcactataacaactggatcaatatggcttgcctttcaaagttaaagaatcagaaaggggcctgtaagaagtcatttagcccaattccctcaccctgtgtgttttccctcaaagccagtgcaatttttttttaaccaaaaaactggacatgtttaatacatacagtttgacaaatttggatttcactctttgttttgatgtagtaactcttttataaaagggaacagattcagacaagctcagtggcccaactgaagacattcagcaattaatggcaggacttcagtaatcagtggcaggactacaacatacatctcttcatgctagggaaaccaggctctctattataaagctgaccagggctattgttttccccttttctctcatcctaaacaccattcatatttttcctaggtcacattttagtgggatcatttacaaagcccccagaacttaatcatcatgttttaccttttttattgaattatatacacctcttacaaaaatgcttgaagtaatttaacacctgtacatcagtacaaaacctggctgagtaaaatgaagagaggatctattcaagatcattaagaccaaatgtaaactgggaagtatgtggaagatagctgtccagcaagtgtctggaaggtgttctagctgggtagagagcctattctaacagacacgcacatcgcagaaagcagcatgaacagaaccacatcctagataagagttctgtgtacagaagatccatggaggcaagtgctgtcaggaaggacactgcctccctccaccctcccaaatgtcaccaccaagttccttcaggtgagacctcacacaatgtcaagtgctttctaggaaatactaagatcaggttgagagattctgcttggtctagtcaatctgaaaaattcaggctggaaagacaccttttctcaagagctgaattgacttttgccttcaaatcctgcctgcaccttgcctacgatggcatcaatttacacctaaggacctttgaagagaaaaattccattatttcttttctttcttgagagcagattttttccctcctcctttggaagatttgcagtactttgcttccatctgagccagaaaattgtccatttccttttgccgatccttttgtctgctctgtttgagaagttaaaacacaagctttcacaacattatccatagacagaaagtacctagtggttgccaggggctggaaaagtggaataactactaatgggtatggagtttttttggaatggtgaaaatgtcctacaattggtgttaataattgtaaaactttgtaaatacacttaaaaccaccaaattgtacactttaaaaggacaaatagaaggtatgcggttatgtcttaaaagaagaaaacaaaatacaacattccaaagaaaatattagcagtaggaatcagatcattaaagatgtggcaacaaactgccaagtttacctgaatggctgccttcaggctatccacgccttcatcaagccccaactcctttctgctcatttctgcttctttggcctcttcctgagcctgaaacaggaactcacatgagactcagggccaccaggaaatgcttaaaatacatactctttcccaaaagcaaatctataattctgtttcaattttatgaatatatgaatagacaaaatgaatcgaattacataactatgtcattcattaaatggcaacaatgctgacagcaagcagtagatcctctgattccaattaccatttgttttttacccaattctatttgctagaggtagtaagtactctggcactcataaatcacatgatgataaaaaggaacat

SEQ ID NO: 20248 - protein, 104 aa, Homo sapiens [sequence omitted]

SEQ ID NO: 20249 - DNA, 3663 bp, Homo sapiens
gtaattctgcaggatctgtgccctgatcttgatttatactgtgttttgtcaaaagtacaaacacagtgctaatttatgacgtggaattggagctgtttggcctgcacttaccatatctgccatggtcgatagggttttaactacataccacattacagatagttttcactgtttctgtaacttttgtctcctctgcagaaaccccatggcgactctagtcgagctcaaagtgcggtggtggatgaacctaactatcagcagccacaagaaaggctccttttgcccgactttttccccaggcccaacacaactcaatcatttttgctggatacacagtatcgtcgctcatgtgcagttgagtatcctcatcaggcccgacctggcaggggatctgcaggtcctcagttacatgggtctacaaaatctcaaagcggaggcagaccagtctctcgaaccaggcagggaccataaggcaaatgagaagaatctatcaggctgcaggaaacacgagatttcatgaagcagtattcagtcatcaagtgatgcagagcttgtatagaagatcgactagaaatcatcttcatgaagagtgattttggcacaagtgaccgaagaacaaaacaccatagcagccaaaaatgacatgagtgttgtttctatctccagttactgtctctttcagcagaaattaacctatcccattggaaaggcaagtttgtacccaaagatgcaacagtgaataatacccaaatcactgctcatgttatctcttaacaatgatcagttcaatcatataggatttgatgagctcacacatacacaaaaagcagcaaatcatcagtgacaatatcactggcttcagaatacttcagcctgtgttcatttctggagagttgtactcagttttaagtcattttgctgttgaaaatctgacctcatcaaatagatgtcattcctaaaactctctttagatgtcctaccctatcagcagattaaaatggaaggggtgtgtaactaaaaacataaatgttaagcattagtataaagtaacttctgtaataaattatatcgcatattttttcagataggacagctcaaccttacgatgcctacctgatgccaggtgatgcttattttcttcctaaagtaggttactggtcatatcttttttccaaatattaaatgcaccttgccagatattctcctgcagctctaaggaaaggaaatcaatttaaaaataatttgtagaatctactattgagccaccaaagtataattccctaaaagtttaagaaaccctggcaattaattcagcataaacatatcctataaacagcaggagaggttcagctttctgattttactgtggaccttttcctaagggcattcatgaatgcagcaacagttttaactatggcttacatttattttaaatttcactaaatacaaatcttgattgtcatgccagttttagatcttattaattttcagaatggataaattcaaataatcataaattacggtaactttttattataccaaggtgttctaatgccatcatatgaagacagatgcttcaaacaacctgcattaaattatatttttaataaaattaaaatctatttttaacctatttgtagtcacaaaccgaaaacgtgtcgtctttaccttagagctaaaggcttactttatgcatacggtatatttaatagtctacaaatcaaagatttaaacagtcccttaaaaattccatatattctcataccaactcatctacatagaaatgaaaatctctattgttctcacaaaccattaccatgagttcactataacaactggatcaatatggcttgcctttcaaagttaaagaatcagaaaggggcctgtaagaagtcatttagcccaattccctcaccctgtgtgttttccctcaaagccagtgcaatttttttttaaccaaaaaactggacatgtttaatacatacagtttgacaaatttggatttcactctttgttttgatgtagtaactcttttataaaagggaacagattcagacaagctcagtggcccaactgaagacattcagcaattaatggcaggacttcagtaatcagtggcaggactacaacatacatctcttcatgctagggaaaccaggctctctattataaagctgaccagggctattgttttccccttttctctcatcctaaacaccattcatatttttcctaggtcacattttagtgggatcatttacaaagcccccagaacttaatcatcatgttttaccttttttattgaattatatacacctcttacaaaaatgcttgaagtaatttaacacctgtacatcagtacaaaacctggctgagtaaaatgaagagaggatctattcaagatcattaagaccaaatgtaaactgggaagtatgtggaagatagctgtccagcaagtgtctggaaggtgttctagctgggtagagagcctattctaacagacacgcacatcgcagaaagcagcatgaacagaaccacatcctagataagagttctgtgtacagaagatccatggaggcaagtgctgtcaggaaggacactgcctccctccaccctcccaaatgtcaccaccaagttccttcaggtgagacctcacacaatgtcaagtgctttctaggaaatactaagatcaggttgagagattctgcttggtctagtcaatctgaaaaattcaggctggaaagacaccttttctcaagagctgaattgacttttgccttcaaatcctgcctgcaccttgcctacgatggcatcaatttacacctaaggacctttgaagagaaaaattccattatttcttttctttcttgagagcagattttttccctcctcctttggaagatttgcagtactttgcttccatctgagccagaaaattgtccatttccttttgccgatccttttgtctgctctgtttgagaagttaaaacacaagctttcacaacattatccatagacagaaagtacctagtggttgccaggggctggaaaagtggaataactactaatgggtatggagtttttttggaatggtgaaaatgtcctacaattggtgttaataattgtaaaactttgtaaatacacttaaaaccaccaaattgtacactttaaaaggacaaatagaaggtatgcggttatgtcttaaaagaagaaaacaaaatacaacattccaaagaaaatattagcagtaggaatcagatcattaaagatgtggcaacaaactgccaagtttacctgaatggctgccttcaggctatccacgccttcatcaagccccaactcctttctgctcatttctgcttctttggcctcttcctgagcctgaaacaggaactcacatgagactcagggccaccaggaaatgcttaaaatacatactctttcccaaaagcaaatctataattctgtttcaattttatgaatatatgaatagacaaaatgaatcgaattacataactatgtcattcattaaatggcaacaatgctgacagcaagcagtagatcctctgattccaattaccatttgttttttacccaattctatttgctagaggtagtaagtactctggcactcataaatcacatgatgataaaaaggaacat

SEQ ID NO: 20250 - protein, 132 aa, Homo sapiens [sequence omitted]

SEQ ID NO: 20251 - DNA, 762 bp, Homo sapiens
ggaatttttctcttcaaaggtccttaggtgtaaattgatgccatcgtaggcaagagctgcaggagaatatctggcaaggtgcatttaatatttggaaaaaagatatgaccagtaacctactttaggaagaaaataagcatcacctggcatcagatcccctgccaggtcgggcctgatgaggatactcaactgcacatgagcgacgatactgtgtatccagctacaagacaaaagaggagacacttcttatgatgcatcttctcacaaaggataatattttagcaggttcacaggaacaccttgaaatcaacagtggtaaaaggcatagactaccaacttgagggaaaagtcagctgagtgcactgggttgaatttcaagtagaaaatcccaagccagatgcccacaaagccatttattgtaaaaattgcagattcttcaatattattactatgccgttaaggaaatcaggagttataaataatccatatggtttaatatttcagttagttctaagggggttcgtctcatttctttttgttggctgctgcatatattttaaatgaatgctttcatttaaaacaaccagccttttcagcaacattgaaatacttatgactttaccaccatatcgaaatttaactttacatttactttttagcattatgaaatgcaaatatttcacagttacctcaaggaattaaaaaatgtagagatacgactacaatattaaaatgcaaatatcaaataaagctatatatgac

SEQ ID NO: 20252 - protein, 45 aa, Homo sapiens
MLSFKTTSLFSNIEILMTLPPYRNLTLHLLFSIMKCKYFTVTSRN

SEQ ID NO: 20253 - DNA, 431 bp, Homo sapiens
cactaattaaaaagaagcaagatgtctgatttactcacttccacttcagtgttacataagttatacctgaggtttttttttttttttggaggtggagtctcactctgtccccccaggtgcattctggcctgatcagcagagtgagactgtctcaaaaaagacatccctcaattttctcccatcacttctttgttagtacatctacagagtataatttaaagataaaaagagttaatgcgatagaatcagactcagcatatcctgatggtttagaatttcttttcttaccttggcctaacagattaactgatcaaagcagtttaatccataggaatatggattttgcctgcataataaaatccatgctatgttcttaaagaatattttgaacattacaacaaggactaatttgggttgaactttttagattt

SEQ ID NO: 20254 - protein, 36 aa, Homo sapiens [sequence omitted]

SEQ ID NO: 20255 - DNA, 4834 bp, Homo sapiens
cttattcttgtacttttctttcttgctggtaattttatggagcaggttaagaaggctgctctgtgttaggataaactgtataccaataatgttgacaacctgtaatgagtgttgcattttacttcttgtatcttttccttcctaccttgatgccagtaatctataagggatctttatagtttgaatgtatttgaataacttcagtatactttagttctacttttttatttgactcacaaccattcttaggtctcaagtattcccatgtgttttaaaagcctgaagtcagtgagatgaaattcaacatcaagaatttgaagtaacttgtaaggaaaaataatataaagataccattggggcagtggctcacacctgtaatctcagcactttgggaggctgaggtggaaggatcacttgaagccagagtttgagaccagcctgtgcaacacagcaagaccccgtctctacaaaaacttaaaaaattagctggctgtggtgttgctcacccatagttccagctactcgggaagctgaggcagtaagatcacttgagcccaggaggccgatgctgcagtgaactgtgattgttccactacagtccagcctgggtgacagagaaaagaaaaagaaaacattacataatttggctagagcataataatttgattttctggtttttgaaaatttgagttgcaataaaaggatatttcagtgtgcgatttcaattttccgtagcaaatgtatatatagaaaaatgttaaaatagatgtatttgaataccttaaaaaatacaagaaactggaagaaagataatattgcaaagcatctacatatatcctaggccttttgtgtacaaggttatttgtgacaattgtaaggtattatgaaggcaggtaggattatctccgttttacagatagggaagctgaggcctagaggtggaaacttgcccagtgatgtaagattcatctcccggttatgccctcctggaaagcccttcccaacatattatgttgtccatagagggaaaaatgagcaaagacagatggcttaactctggtgtgtgactaagatataggaaatttatagaggaggttctatcaatgtgccgacttactttgtgttttatgttctgagaacgattaccagccatctcaaattctgtggttgtcaaagctcccctggggttgttgctggttggcccccacttgctttgagactttgatgccagggcaggttgagaggaactgacttcagctgagtttgatcttggatctgggaaagagaaatgctttgaaaatcacggcaactctgggaagtttaaaagatattaatgtatcctggagagtttgaggctttgcagaaacttattggcagagcagaatgattctgaaaaatgctacatcagtgaggggatatttgataaggtattttctgccaactcgggtattcacttagcattgtttatcctttaagatatgtatacacatacttcctctgtgagtttaccctactaacaaagttttatccccagcctcaaccttgctttgggtctccaggcccaagtttctcaccatctcttggatgattgctccagcccactctgctgccacctgggatccaacatgttcaaacccagctgtgaacttcacagagtattaaaagaaagagcctttgcttcagcagtttatgttattaagacggaggcttgggtcatgttatctctctccaccaatgtgtaaggtgaaagtcctattaggtaagagtttttggaagacccgtgttttgtgctttttgggtttcagtatagggttttttcctacagggctagagggaaagtaccccagcatttccaaccagtggggtgcaaaattatttgggtctacagctttacctattcctttcaagaacatttttgaaaaaacacatctgttaagttgaaccatgtgtaactgctgaatgctgatgtttggccgttttctacttaaaaaaataggccagcagtttgtaaattcaagctaatatatgaactttttgaaaaagttgttcttggacactaaaaggtaagacggacgccagatttccagagcaaggggaggagagacccgagcaacatcacttccctgaagacctagctcctgcgcgcggccggggactgtgactccacatgccggcgttacttacccgggcccgcgcctgactcgccacacctcattttgcggccgccgtaaagcgcggatgcgcggcgtggccacgccccttcagtgcttgtgacgcaggcgccctgggctttttgggcgcgaaaaagaagcagtcctgggttgtacccggcgcagctgggagcggctgcttcctccggggtcgtatctccgcccggcatggggctgctggacctttgcgaggaagtgttcggcaccgccgacctttaccgggtgctgggcgtgcgacgcgaggcctccgacggcgaggtccgacgaggctaccacaaggtgtccctgcaggtacacccggaccgggtgggtgagggcgacaaggaggacgccacccgccgcttccagatcctgggaaaagtctattccgttctcagtgacagagaacagagagcagtgtacgatgagcagggaacagtggacgaggactctcctgtgctcacccaagaccgagactgggaggcgtattggcggctactctttaaaaagatatctttagaggacattcaagcttttgaaaagacatacaaaggttcggaagaagagctggctgatattaagcaggcctatctggacttcaagggtgacatggatcagatcatggagtctgtgctttgcgtgcagtacacagaggaacccaggataaggaatatcattcagcaagctattgacgccggagaggtcccatcctataatgcctttgtcaaagaatcgaaacaaaagatgaatgcaaggaaaaggagggctcaggaagaggccaaagaagcagaaatgagcagaaaggagttggggcttgatgaaggcgtggatagcctgaaggcagccattcagagcagacaaaaggatcggcaaaaggaaatggacaattttctggctcagatggaagcaaagtactgcaaatcttccaaaggaggagggaaaaaatctgctctcaagaaagaaaagaaataatggaatttttctcttcaaaggtccttaggtgtaaattgatgccatcgtaggcaaggtgcaggcaggatttgaaggcaaaagtcaattcagctcttgagaaaaggtgtctttccagcctgaatttttcagattgactagaccaagcagaatctctcaacctgatcttagtatttcctagaaagcacttgacattgtgtgaggtctcacctgaaggaacttggtggtgacatttgggagggtggagggaggcagtgtccttcctgacagcacttgcctccatggatcttctgtacacagaactcttatctaggatgtggttctgttcatgctgctttctgcgatgtgcgtgtctgttagaataggctctctacccagctagaacaccttccagacacttgctggacagctatcttccacatacttcccagtttacatttggtcttaatgatcttgaatagatcctctcttcattttactcagccaggttttgtactgatgtacaggtgttaaattacttcaagcatttttgtaagaggtgtatataattcaataaaaaaggtaaaacatgatgattaagttctgggggctttgtaaatgatcccactaaaatgtgacctaggaaaaatatgaatggtgtttaggatgagagaaaaggggaaaacaatagccctggtcagctttataatagagagcctggtttccctagcatgaagagatgtatgttgtagtcctgccactgattactgaagtcctgccattaattgctgaatgtcttcagttgggccactgagcttgtctgaatctgttcccttttataaaagagttactacatcaaaacaaagagtgaaatccaaatttgtcaaactgtatgtattaaacatgtccagttttttggttaaaaaaaaattgcactggctttgagggaaaacacacagggtgagggaattgggctaaatgacttcttacaggcccctttctgattctttaactttgaaaggcaagccatattgatccagttgttatagtgaactcatggtaatggtttgtgagaacaatagagattttcatttctatgtagatgagttggtatgagaatatatggaatttttaagggactgtttaaatctttgatttgtagactattaaatataccgtatgcataaagtaagcctttagctctaaggtaaagacgacacgttttcggtttgtgactacaaataggttaaaaatagattttaattttattaaaaatataatttaatgcaggttgtttgaagcatctgtcttcatatgatggcattagaacaccttggtataataaaaagttaccgtaatttatgattatttgaatttatccattctgaaaattaataagatctaaaactggcatgacaatcaagatttgtatttagtgaaatttaaaataaatgtaagccatagttaaaactgttgctgcattcatgaatgcccttaggaaaaggtccacagtaaaatcagaaagctgaacctctcctgctgtttataggatatgtttatgctgaattaattgccagggtttcttaaacttttagggaattatactttggtggctcaatagtagattctacaaattatttttaaattgatttcctttccttagagctgcaggagaatatctggcaaggtgcatttaa

SEQ ID NO: 20256 - protein, 260 aa, Homo sapiens; identical to SEQ ID NO: 2541

SEQ ID NO: 20257 - DNA, 4603 bp, Homo sapiens
cttattcttgtacttttctttcttgctggtaattttatggagcaggttaagaaggctgctctgtgttaggataaactgtataccaataatgttgacaacctgtaatgagtgttgcattttacttcttgtatcttttccttcctaccttgatgccagtaatctataagggatctttatagtttgaatgtatttgaataacttcagtatactttagttctacttttttatttgactcacaaccattcttaggtctcaagtattcccatgtgttttaaaagcctgaagtcagtgagatgaaattcaacatcaagaatttgaagtaacttgtaaggaaaaataatataaagataccattggggcagtggctcacacctgtaatctcagcactttgggaggctgaggtggaaggatcacttgaagccagagtttgagaccagcctgtgcaacacagcaagaccccgtctctacaaaaacttaaaaaattagctggctgtggtgttgctcacccatagttccagctactcgggaagctgaggcagtaagatcacttgagcccaggaggccgatgctgcagtgaactgtgattgttccactacagtccagcctgggtgacagagaaaagaaaaagaaaacattacataatttggctagagcataataatttgattttctggtttttgaaaatttgagttgcaataaaaggatatttcagtgtgcgatttcaattttccgtagcaaatgtatatatagaaaaatgttaaaatagatgtatttgaataccttaaaaaatacaagaaactggaagaaagataatattgcaaagcatctacatatatcctaggccttttgtgtacaaggttatttgtgacaattgtaaggtattatgaaggcaggtaggattatctccgttttacagatagggaagctgaggcctagaggtggaaacttgcccagtgatgtaagattcatctcccggttatgccctcctggaaagcccttcccaacatattatgttgtccatagagggaaaaatgagcaaagacagatggcttaactctggtgtgtgactaagatataggaaatttatagaggaggttctatcaatgtgccgacttactttgtgttttatgttctgagaacgattaccagccatctcaaattctgtggttgtcaaagctcccctggggttgttgctggttggcccccacttgctttgagactttgatgccagggcaggttgagaggaactgacttcagctgagtttgatcttggatctgggaaagagaaatgctttgaaaatcacggcaactctgggaagtttaaaagatattaatgtatcctggagagtttgaggctttgcagaaacttattggcagagcagaatgattctgaaaaatgctacatcagtgaggggatatttgataaggtattttctgccaactcgggtattcacttagcattgtttatcctttaagatatgtatacacatacttcctctgtgagtttaccctactaacaaagttttatccccagcctcaaccttgctttgggtctccaggcccaagtttctcaccatctcttggatgattgctccagcccactctgctgccacctgggatccaacatgttcaaacccagctgtgaacttcacagagtattaaaagaaagagcctttgcttcagcagtttatgttattaagacggaggcttgggtcatgttatctctctccaccaatgtgtaaggtgaaagtcctattaggtaagagtttttggaagacccgtgttttgtgctttttgggtttcagtatagggttttttcctacagggctagagggaaagtaccccagcatttccaaccagtggggtgcaaaattatttgggtctacagctttacctattcctttcaagaacatttttgaaaaaacacatctgttaagttgaaccatgtgtaactgctgaatgctgatgtttggccgttttctacttaaaaaaataggccagcagtttgtaaattcaagctaatatatgaactttttgaaaaagttgttcttggacactaaaaggtaagacggacgccagatttccagagcaaggggaggagagacccgagcaacatcacttccctgaagacctagctcctgcgcgcggccggggactgtgactccacatgccggcgttacttacccgggcccgcgcctgactcgccacacctcattttgcggccgccgtaaagcgcggatgcgcggcgtggccacgccccttcagtgcttgtgacgcaggcgccctgggctttttgggcgcgaaaaagaagcagtcctgggttgtacccggcgcagctgggagcggctgcttcctccggggtcgtatctccgcccggcatggggctgctggacctttgcgaggaagtgttcggcaccgccgacctttaccgggtgctgggcgtgcgacgcgaggcctccgacggcgaggtccgacgaggctaccacaaggtgtccctgcaggtacacccggaccgggtgggtgagggcgacaaggaggacgccacccgccgcttccagatcctgggaaaagtctattccgttctcagtgacagagaacagagagcagtgtacgatgagcagggaacagtggacgaggactctcctgtgctcacccaagaccgagactgggaggcgtattggcggctactctttaaaaagatatctttagaggacattcaagcttttgaaaagacatacaaaggttcggaagaagagctggctgatattaagcaggcctatctggacttcaagggtgacatggatcagatcatggagtctgtgctttgcgtgcagtacacagaggaacccaggataaggaatatcattcagcaagctattgacgccggagaggtcccatcctataatgcctttgtcaaagaatcgaaacaaaagatgaatgcaaggaaaaggagggctcaggaagaggccaaagaagcagaaatgagcagaaaggagttggggcttgatgaaggcgtggatagcctgaaggcagccattcagagcagacaaaaggatcggcaaaaggaaatggacaattttctggctcagatggaagcaaagtactgcaaatcttccaaaggaggagggaaaaaatctgctctcaagaaagaaaagaaataatggaatttttctcttcaaaggtccttaggtgtaaattgatgccatcgtaggcaaggtgcaggcaggatttgaaggcaaaagtcaattcagctcttgagaaaaggtgtctttccagcctgaatttttcagattgactagaccaagcagaatctctcaacctgatcttagtatttcctagaaagcacttgacattgtgtgaggtctcacctgaaggaacttggtggtgacatttgggagggtggagggaggcagtgtccttcctgacagcacttgcctccatggatcttctgtacacagaactcttatctaggatgtggttctgttcatgctgctttctgcgatgtgcgtgtctgttagaataggctctctacccagctagaacaccttccagacacttgctggacagctatcttccacatacttcccagtttacatttggtcttaatgatcttgaatagatcctctcttcattttactcagccaggttttgtactgatgtacaggtgttaaattacttcaagcatttttgtaagaggtgtatataattcaataaaaaaggtaaaacatgatgattaagttctgggggctttgtaaatgatcccactaaaatgtgacctaggaaaaatatgaatggtgtttaggatgagagaaaaggggaaaacaatagccctggtcagctttataatagagagcctggtttccctagcatgaagagatgtatgttgtagtcctgccactgattactgaagtcctgccattaattgctgaatgtcttcagttgggccactgagcttgtctgaatctgttcccttttataaaagagttactacatcaaaacaaagagtgaaatccaaatttgtcaaactgtatgtattaaacatgtccagttttttggttaaaaaaaaattgcactggctttgagggaaaacacacagggtgagggaattgggctaaatgacttcttacaggcccctttctgattctttaactttgaaaggcaagccatattgatccagttgttatagtgaactcatggtaatggtttgtgagaacaatagagattttcatttctatgtagatgagttggtatgagaatatatggaatttttaagggactgtttaaatctttgatttgtagactattaaatataccgtatgcataaagtaagcctttagctctaaggtaaagacgacacgttttcggtttgtgactacaaataggttaaaaatagattttaattttattaaaaatataatttaatgcaggttgtttgaagcatctgtcttcatatgatggcattagaacaccttggtataataaaaagttaccgtaatttatgattatttgaatttatccattctgaaaattaataagatctaaaactggcatgacaatcaagatttgtatttagtgaaatttaaaataaatgtaagccatagtt

SEQ ID NO: 20258 - protein, 260 aa, Homo sapiens; identical to SEQ ID NO: 2541

SEQ ID NO: 20259 - DNA, 3735 bp, Homo sapiens
cttattcttgtacttttctttcttgctggtaattttatggagcaggttaagaaggctgctctgtgttaggataaactgtataccaataatgttgacaacctgtaatgagtgttgcattttacttcttgtatcttttccttcctaccttgatgccagtaatctataagggatctttatagtttgaatgtatttgaataacttcagtatactttagttctacttttttatttgactcacaaccattcttaggtctcaagtattcccatgtgttttaaaagcctgaagtcagtgagatgaaattcaacatcaagaatttgaagtaacttgtaaggaaaaataatataaagataccattggggcagtggctcacacctgtaatctcagcactttgggaggctgaggtggaaggatcacttgaagccagagtttgagaccagcctgtgcaacacagcaagaccccgtctctacaaaaacttaaaaaattagctggctgtggtgttgctcacccatagttccagctactcgggaagctgaggcagtaagatcacttgagcccaggaggccgatgctgcagtgaactgtgattgttccactacagtccagcctgggtgacagagaaaagaaaaagaaaacattacataatttggctagagcataataatttgattttctggtttttgaaaatttgagttgcaataaaaggatatttcagtgtgcgatttcaattttccgtagcaaatgtatatatagaaaaatgttaaaatagatgtatttgaataccttaaaaaatacaagaaactggaagaaagataatattgcaaagcatctacatatatcctaggccttttgtgtacaaggttatttgtgacaattgtaaggtattatgaaggcaggtaggattatctccgttttacagatagggaagctgaggcctagaggtggaaacttgcccagtgatgtaagattcatctcccggttatgccctcctggaaagcccttcccaacatattatgttgtccatagagggaaaaatgagcaaagacagatggcttaactctggtgtgtgactaagatataggaaatttatagaggaggttctatcaatgtgccgacttactttgtgttttatgttctgagaacgattaccagccatctcaaattctgtggttgtcaaagctcccctggggttgttgctggttggcccccacttgctttgagactttgatgccagggcaggttgagaggaactgacttcagctgagtttgatcttggatctgggaaagagaaatgctttgaaaatcacggcaactctgggaagtttaaaagatattaatgtatcctggagagtttgaggctttgcagaaacttattggcagagcagaatgattctgaaaaatgctacatcagtgaggggatatttgataaggtattttctgccaactcgggtattcacttagcattgtttatcctttaagatatgtatacacatacttcctctgtgagtttaccctactaacaaagttttatccccagcctcaaccttgctttgggtctccaggcccaagtttctcaccatctcttggatgattgctccagcccactctgctgccacctgggatccaacatgttcaaacccagctgtgaacttcacagagtattaaaagaaagagcctttgcttcagcagtttatgttattaagacggaggcttgggtcatgttatctctctccaccaatgtgtaaggtgaaagtcctattaggtaagagtttttggaagacccgtgttttgtgctttttgggtttcagtatagggttttttcctacagggctagagggaaagtaccccagcatttccaaccagtggggtgcaaaattatttgggtctacagctttacctattcctttcaagaacatttttgaaaaaacacatctgttaagttgaaccatgtgtaactgctgaatgctgatgtttggccgttttctacttaaaaaaataggccagcagtttgtaaattcaagctaatatatgaactttttgaaaaagttgttcttggacactaaaaggtaagacggacgccagatttccagagcaaggggaggagagacccgagcaacatcacttccctgaagacctagctcctgcgcgcggccggggactgtgactccacatgccggcgttacttacccgggcccgcgcctgactcgccacacctcattttgcggccgccgtaaagcgcggatgcgcggcgtggccacgccccttcagtgcttgtgacgcaggcgccctgggctttttgggcgcgaaaaagaagcagtcctgggttgtacccggcgcagctgggagcggctgcttcctccggggtcgtatctccgcccggcatggggctgctggacctttgcgaggaagtgttcggcaccgccgacctttaccgggtgctgggcgtgcgacgcgaggcctccgacggcgaggtccgacgaggctaccacaaggtgtccctgcaggtacacccggaccgggtgggtgagggcgacaaggaggacgccacccgccgcttccagatcctgggaaaagtctattccgttctcagtgacagagaacagagagcagtgtacgatgagcagggaacagtggacgaggactctcctgtgctcacccaagaccgagactgggaggcgtattggcggctactctttaaaaagatatctttagaggacattcaagcttttgaaaagacatacaaaggttcggaagaagagctggctgatattaagcaggcctatctggacttcaagggtgacatggatcagatcatggagtctgtgctttgcgtgcagtacacagaggaacccaggataaggaatatcattcagcaagctattgacgccggagaggtcccatcctataatgcctttgtcaaagaatcgaaacaaaagatgaatgcaaggaaaaggagggctcaggaagaggccaaagaagcagaaatgagcagaaaggagttggggcttgatgaaggcgtggatagcctgaaggcagccattcagagcagacaaaaggatcggcaaaaggaaatggacaattttctggctcagatggaagcaaagtactgcaaatcttccaaaggaggagggaaaaaatctgctctcaagaaagaaaagaaataatggaatttttctcttcaaaggtccttaggtgtaaattgatgccatcgtaggcaaggtgcaggcaggatttgaaggcaaaagtcaattcagctcttgagaaaaggtgtctttccagcctgaatttttcagattgactagaccaagcagaatctctcaacctgatcttagtatttcctagaaagcacttgacattgtgtgaggtctcacctgaaggaacttggtggtgacatttgggagggtggagggaggcagtgtccttcctgacagcacttgcctccatggatcttctgtacacagaactcttatctaggatgtggttctgttcatgctgctttctgcgatgtgcgtgtctgttagaataggctctctacccagctagaacaccttccagacacttgctggacagctatcttccacatacttcccagtttacatttggtcttaatgatcttgaatagatcctctcttcattttactcagccaggttttgtactgatgtacaggtgttaaattacttcaagcatttttgtaagaggtgtatataattcaataaaaaaggtaaaacatgatgatt

SEQ ID NO: 20260 - protein, 260 aa, Homo sapiens; identical to SEQ ID NO: 2541

SEQ ID NO: 20261 - DNA, 1046 bp, Homo sapiens
aggtattatgaaggcaggtaggattatctccgttttacagatagggaagctgaggcctagaggtggaaacttgcccagtgatgtaagattcatctcccggttatgccctcctggaaagcccttcccaacatattatgttgtccatagagggaaaaatgagcaaagacagatggcttaactctggtgtgtgactaagatataggaaatttatagaggaggttctatcaatgtgccgacttactttgtgttttatgttctgagaacgattaccagccatctcaaattctgtggttgtcaaagctcccctggggttgttgctggttggcccccacttgctttgagactttgatgccagggcaggttgagaggaactgacttcagctgagtttgatcttggatctgggaaagagaaatgctttgaaaatcacggcaactctgggaagtttaaaagatattaatgtatcctggagagtttgaggctttgcagaaacttattggcagagcagaatgattctgaaaaatgctacatcagtgaggggatatttgataaggtattttctgccaactcgggtattcacttagcattgtttatcctttaagatatgtatacacatacttcctctgtgagtttaccctactaacaaagttttatccccagcctcaaccttgctttgggtctccaggcccaagtttctcaccatctcttggatgattgctccagcccactctgctgccacctgggatccaacatgttcaaacccagctgtgaacttcacagagtattaaaagaaagagcctttgcttcagcagtttatgttattaagacggaggcttgggtcatgttatctctctccaccaatgtgtaaggtgaaagtcctattaggtaagacggacgccagatttccagagcaaggggaggagagacccgagcaacatcacttccctgaagacctagctcctgcgcgcggccggggactgtgactccacatgccggcgttacttacccgggcccgcgcctgactcgccacacctcattttgcggccgc

SEQ ID NO: 20262 - protein, 55 aa, Homo sapiens
MLLRRRLGSCYLSPPMCKVKVLLGKTDARFPEQGEERPEQHHFPEDLAPARGRGL

SEQ ID NO: 20263 - DNA, 4057 bp, Homo sapiens
ggggagagctctcccaggcgcgatggaggcaacccgaacctgaagcagccacactgccttacatttgatccttctctcagttttttccccacttaatcaccgctgaaaaatttccaccccattgaagcagctaaggctccgacaagctactctcctctgcaaggcctaccgtgggggccacttaaccatccgccttgccctgggtggctgcaccaatcggccgttctaccgcattgtggctgctcacaacaagtgtcccagggatggccgtttcgtagagcagctgggctcctatgatccattgcccaacagtcatggagaaaaactcgttgccctcaacctagacaggatccgtcattggattggctgcggggcccacctctctaagcctatggaaaagcttctgggtcttgctggctttttccctctgcatcctatgatgatcacaaatgctgagagactgcgaaggaaacgggcacgtgaagtcctgttagcttctcagaaaacagatgcagaagctacagatacagaggctacagaaacataaatgagctgactttagtgagcatagcagtgggaacaaggtcaaggtccttttgaaacactgcagcgatcttaattttgttagatttggagttcaataaatggagtatcctgagttgcccttgctcttctggcctggcctgcacagggcccagggagagatttgttcttgtgtgacttagagctgggtgtgggtactaattagcttttttcgactttgtcttgggatagacagtggctatgggaggattggacttttgagttgggctctgggtctcttggacaactttacaatttactggcttccaagacttcctgcttcaaaacccccagccagactattcatggcccattcagatcttcatgttcatcccacaagtgcaagaacagttaacctttcttaattgatttttgtaattggaggtttatattgtcttgcctaatgcatattctctttttttttttttttttgagacggagtcttgttctgttgccaggctggagtgcggtggtgcaatctcagctcactgcaatctccacctcctgggttcaagaggttctcctgcctcagcctcctgagtagccggggagctacaagcatgcaccaccacacccagctaattttttttttttttttgagaggagtctcgctctgtcgcccaggcttgagtgcagtggcgcgatctcggctcactgcaagctctgtctcctgggttcatgccattctcctgcttcagcctcccgagtagtcccaggagtagctgggactacaggtgcccaccaccacacccagctaatttttttgtatttttagtagagatggggtttcaccatgttatccaggatggttttgatctcctgacctcgtgatccgcccgccttggcctcccaaaagtgctgggattataggcgtgagccaccgcccgggcaaatttttgtatttttagtagagatggggtttcaccgtgttggccaggatggtctcaatctgaccttgtgatctgcccacctcggcctcccaaagtgctaggattactggcgtgagccaccactcctagccttaatgcatattcttaaatatacaaaggtagatttgttatgaaaattgctttggggctctaataacctaccttttaagaatgagaaactgctgggcttaagggagttcagtatgaatcaagattgaaccattcaaatgtggctgtgatttctgcatatatcatagatgggatccttctgagaatactggaatagggaattaggacaccaagccaattcagctgtgaaccttattcttgtacttttctttcttgctggtaattttatggagcaggttaagaaggctgctctgtgttaggataaactgtataccaataatgttgacaacctgtaatgagtgttgcattttacttcttgtatcttttccttcctaccttgatgccagtaatctataagggatctttatagtttgaatgtatttgaataacttcagtatactttagttctacttttttatttgactcacaaccattcttaggtctcaagtattcccatgtgttttaaaagcctgaagtcagtgagatgaaattcaacatcaagaatttgaagtaacttgtaaggaaaaataatataaagataccattggggcagtggctcacacctgtaatctcagcactttgggaggctgaggtggaaggatcacttgaagccagagtttgagaccagcctgtgcaacacagcaagaccccgtctctacaaaaacttaaaaaattagctggctgtggtgttgctcacccatagttccagctactcgggaagctgaggcagtaagatcacttgagcccaggaggccgatgctgcagtgaactgtgattgttccactacagtccagcctgggtgacagagaaaagaaaaagaaaacattacataatttggctagagcataataatttgattttctggtttttgaaaatttgagttgcaataaaaggatatttcagtgtgcgatttcaattttccgtagcaaatgtatatatagaaaaatgttaaaatagatgtatttgaataccttaaaaaatacaagaaactggaagaaagataatattgcaaagcatctacatatatcctaggccttttgtgtacaaggttatttgtgacaattgtaaggtattatgaaggcaggtaggattatctccgttttacagatagggaagctgaggcctagaggtggaaacttgcccagtgatgtaagattcatctcccggttatgccctcctggaaagcccttcccaacatattatgttgtccatagagggaaaaatgagcaaagacagatggcttaactctggtgtgtgactaagatataggaaatttatagaggaggttctatcaatgtgccgacttactttgtgttttatgttctgagaacgattaccagccatctcaaattctgtggttgtcaaagctcccctggggttgttgctggttggcccccacttgctttgagactttgatgccagggcaggttgagaggaactgacttcagctgagtttgatcttggatctgggaaagagaaatgctttgaaaatcacggcaactctgggaagtttaaaagatattaatgtatcctggagagtttgaggctttgcagaaacttattggcagagcagaatgattctgaaaaatgctacatcagtgaggggatatttgataaggtattttctgccaactcgggtattcacttagcattgtttatcctttaagatatgtatacacatacttcctctgtgagtttaccctactaacaaagttttatccccagcctcaaccttgctttgggtctccaggcccaagtttctcaccatctcttggatgattgctccagcccactctgctgccacctgggatccaacatgttcaaacccagctgtgaacttcacagagtattaaaagaaagagcctttgcttcagcagtttatgttattaagacggaggcttgggtcatgttatctctctccaccaatgtgtaaggtgaaagtcctattaggtaagagtttttggaagacccgtgttttgtgctttttgggtttcagtatagggttttttcctacagggctagagggaaagtaccccagcatttccaaccagtggggtgcaaaattatttgggtctacagctttacctattcctttcaagaacatttttgaaaaaacacatctgttaagttgaaccatgtgtaactgctgaatgctgatgtttggccgttttctacttaaaaaaataggccagcagtttgtaaattcaagctaatatatgaactttttgaaaaagttgttcttggacactaaaaggtaagacggacgccagatttccagagcaaggggaggagagacccgagcaacatcacttccctgaagacctagctcctgcgcgcggccggggactgtgactccacatgccggcgttacttacccgggcccgcgcctgactcgccacacctcattttgcggccgc

SEQ ID NO: 20264 - protein, 51 aa, Homo sapiens [sequence omitted]

SEQ ID NO: 20265 - DNA, 2370 bp, Homo sapiens
attgtgggaagtatagggcggcaagcggaggaggcgtggcgagcggatcatccgcttccggagtcgaggttttcgggcttgtaccgcttggcggtgcggcctggtgtcggcttgcaggttctttctgtgtttgttctctgccctgccaaggccgtagagctggtgcgtgcgggtagcggggctctccgaggagccgcacgccggcggcaccatggtccacctcactactctcctctgcaaggcctaccgtgggggccacttaaccatccgccttgccctgggtggctgcaccaatcggccgttctaccgcattgtggctgctcacaacaagtgtcccagggatggccgtttcgtagagcagctgggctcctatgatccattgcccaacagtcatggagaaaaactcgttgccctcaacctagacaggatccgtcattggattggctgcggggcccacctctctaagcctatggaaaagcttctgggtcttgctggctttttccctctgcatcctatgatgatcacaaatgctgagagactgcgaaggaaacgggcacgtgaagtcctgttagcttctcagaaaacagatgcagaagctacagatacagaggctacagaaacataaatgagctggctgtggtgttgctcacccatagttccagctactcgggaagctgaggcagtaagatcacttgagcccaggaggccgatgctgcagtgaactgtgattgttccactacagtccagcctgggtgacagagaaaagaaaaagaaaacattacataatttggctagagcataataatttgattttctggtttttgaaaatttgagttgcaataaaaggatatttcagtgtgcgatttcaattttccgtagcaaatgtatatatagaaaaatgttaaaatagatgtatttgaataccttaaaaaatacaagaaactggaagaaagataatattgcaaagcatctacatatatcctaggccttttgtgtacaaggttatttgtgacaattgtaaggtattatgaaggcaggtaggattatctccgttttacagatagggaagctgaggcctagaggtggaaacttgcccagtgatgtaagattcatctcccggttatgccctcctggaaagcccttcccaacatattatgttgtccatagagggaaaaatgagcaaagacagatggcttaactctggtgtgtgactaagatataggaaatttatagaggaggttctatcaatgtgccgacttactttgtgttttatgttctgagaacgattaccagccatctcaaattctgtggttgtcaaagctcccctggggttgttgctggttggcccccacttgctttgagactttgatgccagggcaggttgagaggaactgacttcagctgagtttgatcttggatctgggaaagagaaatgctttgaaaatcacggcaactctgggaagtttaaaagatattaatgtatcctggagagtttgaggctttgcagaaacttattggcagagcagaatgattctgaaaaatgctacatcagtgaggggatatttgataaggtattttctgccaactcgggtattcacttagcattgtttatcctttaagatatgtatacacatacttcctctgtgagtttaccctactaacaaagttttatccccagcctcaaccttgctttgggtctccaggcccaagtttctcaccatctcttggatgattgctccagcccactctgctgccacctgggatccaacatgttcaaacccagctgtgaacttcacagagtattaaaagaaagagcctttgcttcagcagtttatgttattaagacggaggcttgggtcatgttatctctctccaccaatgtgtaaggtgaaagtcctattaggtaagagtttttggaagacccgtgttttgtgctttttgggtttcagtatagggttttttcctacagggctagagggaaagtaccccagcatttccaaccagtggggtgcaaaattatttgggtctacagctttacctattcctttcaagaacatttttgaaaaaacacatctgttaagttgaaccatgtgtaactgctgaatgctgatgtttggccgttttctacttaaaaaaataggccagcagtttgtaaattcaagctaatatatgaactttttgaaaaagttgttcttggacactaaaaggtaagacggacgccagatttccagagcaaggggaggagagacccgagcaacatcacttccctgaagacctagctcctgcgcgcggccggggactgtgactccacatgccggcgttacttacccgggcccgcgcctgactcgccacacctcattttgcggccgc

SEQ ID NO: 20266 - protein, 137 aa, Homo sapiens; identical to SEQ ID NO: 2543

SEQ ID NO: 20267 - DNA, 2462 bp, Homo sapiens
attgtgggaagtatagggcggcaagcggaggaggcgtggcgagcggatcatccgcttccggagtcgaggttttcgggcttgtaccgcttggcggtgcggcctggtgtcggcttgcaggttctttctgtgtttgttctctgccctgccaaggccgtagagctggtgcgtgcgggtagcggggctctccgaggagccgcacgccggcggcaccatggtccacctcactactctcctctgcaaggcctaccgtgggggccacttaaccatccgccttgccctgggtggctgcaccaatcggccgttctaccgcattgtggctgctcacaacaagtgtcccagggatggccgtttcgtagagcagctgggctcctatgatccattgcccaacagtcatggagaaaaactcgttgccctcaacctagacaggatccgtcattggattggctgcggggcccacctctctaagcctatggaaaagcttctgggtctcaagtattcccatgtgttttaaaagcctgaagtcagtgagatgaaattcaacatcaagaatttgaagtaacttgtaaggaaaaataatataaagataccattggggcagtggctcacacctgtaatctcagcactttgggaggctgaggtggaaggatcacttgaagccagagtttgagaccagcctgtgcaacacagcaagaccccgtctctacaaaaacttaaaaaattagctggctgtggtgttgctcacccatagttccagctactcgggaagctgaggcagtaagatcacttgagcccaggaggccgatgctgcagtgaactgtgattgttccactacagtccagcctgggtgacagagaaaagaaaaagaaaacattacataatttggctagagcataataatttgattttctggtttttgaaaatttgagttgcaataaaaggatatttcagtgtgcgatttcaattttccgtagcaaatgtatatatagaaaaatgttaaaatagatgtatttgaataccttaaaaaatacaagaaactggaagaaagataatattgcaaagcatctacatatatcctaggccttttgtgtacaaggttatttgtgacaattgtaaggtattatgaaggcaggtaggattatctccgttttacagatagggaagctgaggcctagaggtggaaacttgcccagtgatgtaagattcatctcccggttatgccctcctggaaagcccttcccaacatattatgttgtccatagagggaaaaatgagcaaagacagatggcttaactctggtgtgtgactaagatataggaaatttatagaggaggttctatcaatgtgccgacttactttgtgttttatgttctgagaacgattaccagccatctcaaattctgtggttgtcaaagctcccctggggttgttgctggttggcccccacttgctttgagactttgatgccagggcaggttgagaggaactgacttcagctgagtttgatcttggatctgggaaagagaaatgctttgaaaatcacggcaactctgggaagtttaaaagatattaatgtatcctggagagtttgaggctttgcagaaacttattggcagagcagaatgattctgaaaaatgctacatcagtgaggggatatttgataaggtattttctgccaactcgggtattcacttagcattgtttatcctttaagatatgtatacacatacttcctctgtgagtttaccctactaacaaagttttatccccagcctcaaccttgctttgggtctccaggcccaagtttctcaccatctcttggatgattgctccagcccactctgctgccacctgggatccaacatgttcaaacccagctgtgaacttcacagagtattaaaagaaagagcctttgcttcagcagtttatgttattaagacggaggcttgggtcatgttatctctctccaccaatgtgtaaggtgaaagtcctattaggtaagagtttttggaagacccgtgttttgtgctttttgggtttcagtatagggttttttcctacagggctagagggaaagtaccccagcatttccaaccagtggggtgcaaaattatttgggtctacagctttacctattcctttcaagaacatttttgaaaaaacacatctgttaagttgaaccatgtgtaactgctgaatgctgatgtttggccgttttctacttaaaaaaataggccagcagtttgtaaattcaagctaatatatgaactttttgaaaaagttgttcttggacactaaaaggtaagacggacgccagatttccagagcaaggggaggagagacccgagcaacatcacttccctgaagacctagctcctgcgcgcggccggggactgtgactccacatgccggcgttacttacccgggcccgcgcctgactcgccacacctcattttgcggccgc

SEQ ID NO: 20268 - protein, 99 aa, Homo sapiens
MVHLTTLLCKAYRGGHLTIRLALGGCTNRPFYRIVAAHNKCPRDGRFVEQLGSYDPLPNSHGEKLVALNLDRIRHWIGCGAHLSKPMEKLLGLKYSHVF

SEQ ID NO: 20269 - DNA, 4135 bp, Homo sapiens
attgtgggaagtatagggcggcaagcggaggaggcgtggcgagcggatcatccgcttccggagtcgaggttttcgggcttgtaccgcttggcggtgcggcctggtgtcggcttgcaggttctttctgtgtttgttctctgccctgccaaggccgtagagctggtgcgtgcgggtagcggggctctccgaggagccgcacgccggcggcaccatggtccacctcactactctcctctgcaaggcctaccgtgggggccacttaaccatccgccttgccctgggtggctgcaccaatcggccgttctaccgcattgtggctgctcacaacaagtgtcccagggatggccgtttcgtagagcagctgggctcctatgatccattgcccaacagtcatggagaaaaactcgttgccctcaacctagacaggatccgtcattggattggctgcggggcccacctctctaagcctatggaaaagcttctgggtcttgctggctttttccctctgcatcctatgatgatcacaaatgctgagagactgcgaaggaaacgggcacgtgaagtcctgttagcttctcagaaaacagatgcagaagctacagatacagaggctacagaaacataaatgagctgactttagtgagcatagcagtgggaacaaggtcaaggtccttttgaaacactgcagcgatcttaattttgttagatttggagttcaataaatggagtatcctgagttgcccttgctcttctggcctggcctgcacagggcccagggagagatttgttcttgtgtgacttagagctgggtgtgggtactaattagcttttttcgactttgtcttgggatagacagtggctatgggaggattggacttttgagttgggctctgggtctcttggacaactttacaatttactggcttccaagacttcctgcttcaaaacccccagccagactattcatggcccattcagatcttcatgttcatcccacaagtgcaagaacagttaacctttcttaattgatttttgtaattggaggtttatattgtcttgcctaatgcatattctctttttttttttttttttgagacggagtcttgttctgttgccaggctggagtgcggtggtgcaatctcagctcactgcaatctccacctcctgggttcaagaggttctcctgcctcagcctcctgagtagccggggagctacaagcatgcaccaccacacccagctaattttttttttttttttgagaggagtctcgctctgtcgcccaggcttgagtgcagtggcgcgatctcggctcactgcaagctctgtctcctgggttcatgccattctcctgcttcagcctcccgagtagtcccaggagtagctgggactacaggtgcccaccaccacacccagctaatttttttgtatttttagtagagatggggtttcaccatgttatccaggatggttttgatctcctgacctcgtgatccgcccgccttggcctcccaaaagtgctgggattataggcgtgagccaccgcccgggcaaatttttgtatttttagtagagatggggtttcaccgtgttggccaggatggtctcaatctgaccttgtgatctgcccacctcggcctcccaaagtgctaggattactggcgtgagccaccactcctagccttaatgcatattcttaaatatacaaaggtagatttgttatgaaaattgctttggggctctaataacctaccttttaagaatgagaaactgctgggcttaagggagttcagtatgaatcaagattgaaccattcaaatgtggctgtgatttctgcatatatcatagatgggatccttctgagaatactggaatagggaattaggacaccaagccaattcagctgtgaaccttattcttgtacttttctttcttgctggtaattttatggagcaggttaagaaggctgctctgtgttaggataaactgtataccaataatgttgacaacctgtaatgagtgttgcattttacttcttgtatcttttccttcctaccttgatgccagtaatctataagggatctttatagtttgaatgtatttgaataacttcagtatactttagttctacttttttatttgactcacaaccattcttaggtctcaagtattcccatgtgttttaaaagcctgaagtcagtgagatgaaattcaacatcaagaatttgaagtaacttgtaaggaaaaataatataaagataccattggggcagtggctcacacctgtaatctcagcactttgggaggctgaggtggaaggatcacttgaagccagagtttgagaccagcctgtgcaacacagcaagaccccgtctctacaaaaacttaaaaaattagctggctgtggtgttgctcacccatagttccagctactcgggaagctgaggcagtaagatcacttgagcccaggaggccgatgctgcagtgaactgtgattgttccactacagtccagcctgggtgacagagaaaagaaaaagaaaacattacataatttggctagagcataataatttgattttctggtttttgaaaatttgagttgcaataaaaggatatttcagtgtgcgatttcaattttccgtagcaaatgtatatatagaaaaatgttaaaatagatgtatttgaataccttaaaaaatacaagaaactggaagaaagataatattgcaaagcatctacatatatcctaggccttttgtgtacaaggttatttgtgacaattgtaaggtattatgaaggcaggtaggattatctccgttttacagatagggaagctgaggcctagaggtggaaacttgcccagtgatgtaagattcatctcccggttatgccctcctggaaagcccttcccaacatattatgttgtccatagagggaaaaatgagcaaagacagatggcttaactctggtgtgtgactaagatataggaaatttatagaggaggttctatcaatgtgccgacttactttgtgttttatgttctgagaacgattaccagccatctcaaattctgtggttgtcaaagctcccctggggttgttgctggttggcccccacttgctttgagactttgatgccagggcaggttgagaggaactgacttcagctgagtttgatcttggatctgggaaagagaaatgctttgaaaatcacggcaactctgggaagtttaaaagatattaatgtatcctggagagtttgaggctttgcagaaacttattggcagagcagaatgattctgaaaaatgctacatcagtgaggggatatttgataaggtattttctgccaactcgggtattcacttagcattgtttatcctttaagatatgtatacacatacttcctctgtgagtttaccctactaacaaagttttatccccagcctcaaccttgctttgggtctccaggcccaagtttctcaccatctcttggatgattgctccagcccactctgctgccacctgggatccaacatgttcaaacccagctgtgaacttcacagagtattaaaagaaagagcctttgcttcagcagtttatgttattaagacggaggcttgggtcatgttatctctctccaccaatgtgtaaggtgaaagtcctattaggtaagagtttttggaagacccgtgttttgtgctttttgggtttcagtatagggttttttcctacagggctagagggaaagtaccccagcatttccaaccagtggggtgcaaaattatttgggtctacagctttacctattcctttcaagaacatttttgaaaaaacacatctgttaagttgaaccatgtgtaactgctgaatgctgatgtttggccgttttctacttaaaaaaataggccagcagtttgtaaattcaagctaatatatgaactttttgaaaaagttgttcttggacactaaaaggtaagacggacgccagatttccagagcaaggggaggagagacccgagcaacatcacttccctgaagacctagctcctgcgcgcggccggggactgtgactccacatgccggcgttacttacccgggcccgcgcctgactcgccacacctcattttgcggccgc

SEQ ID NO: 20270 - protein, 137 aa, Homo sapiens; identical to SEQ ID NO: 2543

SEQ ID NO: 20271 - DNA, 3573 bp, Homo sapiens
aaactgctggcctatttttttaagtagaaaacggccaaacatcagcattcagcagttacacatggttcaacttaacagatgtgttttttcaaaaatgttcttgaaaggaataggtaaagctgtagacccaaataattttgcaccccactggttggaaatgctggggtactttccctctagccctgtaggaaaaaaccctatactgaaacccaaaaagcacaaaacacgggtcttccaaaaactcttacctaataggactttcaccttacacattggtggagagagataacatgacccaagcctccgtcttaataacataaactgctgaagcaaaggctctttcttttaatactctgtgaagttcacagctgggtttgaacatgttggatcccaggtggcagcagagtgggctggagcaatcatccaagagatggtgagaaacttgggcctggagacccaaagcaaggttgaggctggggataaaactttgttagtagggtaaactcacagaggaagtatgtgtatacatatcttaaaggataaacaatgctaagtgaatacccgagttggcagaaaataccttatcaaatatcccctcactgatgtagcatttttcagaatcattctgctctgccaataagtttctgcaaagcctcaaactctccaggatacattaatatcttttaaacttcccagagttgccgtgattttcaaagcatttctctttcccagatccaagatcaaactcagctgaagtcagttcctctcaacctgccctggcatcaaagtctcaaagcaagtgggggccaaccagcaacaaccccaggggagctttgacaaccacagaatttgagatggctggtaatcgttctcagaacataaaacacaaacagacagccctgattgctattccaatgtcatcacaaacccccaggatgcttggaaggccaaggaatcaaggtcagctgtatccacagccctagtctcaagccttcatcctcttacccgatagcaggcgattcccagtcctagccagatagatgagccccagtctcaggaagatgaagtgcatctcagaagcatccactacaaagctaatggttcgttcatagcatgccttggcctcagaatgatttccactcagaaaatagagatggcccttcaggccccagacattggggttctgggaaagtgaaaagcaagtagtatatgggataaggtagtatttaaaagtaccttgatgatctttgtttaacatttaaatttagatagattgtccatttcctttctcttttctttttcagatcaaccgttttctttttctaagagcactcagaaacataaccatttaattgtacaaggagacatttttctagctctgccctcagatttctttcttgcattcttcaaagccattttgggtgtggagtaaatattaagaaaaacattcaagcataaccccaatactgttcacatgagaaaatataagaaatctagaaaaattgaaataaacactatcagctaaagatatccttttctctgctctttgcaaaactcatgattactttattattattattttttgagatggagtcttgcactgtcgcccaggctggagagtgcaatggctcaatctccgctcactgcaacctccgcctcccaggttcaggcgagtctcctgcctcaccctcctgagtagctgggattacaggcacctgccaccacgcccatctaattttttgtatttttagtagagatggggtttcactatgttggccaggctggtcttgaactcctgacctcgtgatctgcctgcctcggcctcccaaagtgctgcgattacagttgtgagccaccgcgcccagccaactcatgattacttaagaaaagcaaatggaagggtatagagagatgagtttactgacagctgatgaccacccttctgttcaccagaaatctacgtgtgatatggcatcaccacctttaaataaagccccttctccagactcaagaggctttagcaaaagtcattaccaggtagtccatctgggctgcttgttgaaggtattcctctgccttggcaaagttcttcttaagaatgtgtgtttgggccagcaccaagtaatattcacagctggggcctccttgagggcataacagctcatgtgcaagcactctgtgcacatactgcaaggataatcagattataagcaacatataaatggctgcattgcgtctttttcggttgaaggattctgtctctgataataaataatacgaaatgtattacagaatgaaataattatcctcaacttcaaaaggtaaagggtgaattacaaacattctgcacttcatagttccattaccagctattcacctagtcaccaaatgaagacattaccaagtgaataacttgcaatattgtacaattctggtcttgctggtcatcatactaggtgagtgttagactgcatgtattatgcagcagacaaaggcacatcatcaaccaccccatttacaaaggaggtaacattttcaggcagctgacattgtaaggaaacttaagtgaggtaaaactgcctttctaacaatctagacttgaaatcttagaaacataaatgtctgttttggatccacctccaaacattggttatgtttaccagttttgtagtttgggtcaatttttgtattttgtttttttttttttctttttttagagacagggtcttactctgtcacccagggctgcttactgcagccttctggcctcaagcaatcctcctgccttggcttcccaaaagtgctggaattataggggtgagccccatgcctggccaaatctttgctttttacactttataagacctacaaaattaacaaagttagatatacttcttaagtcgagggtaaatccttcttttcatctcccactgttcccatctcagcctataatgtagaaaattctacattatacttacacctttttaggagaatactagagggaacagctgcagctattttttccacctgccttctgggtctctgacctgggggagctaatgacttatttagctgtggaagaagagagtctgtttctattttgcggagggttaatgtgttaaagcctcctgcttaatgtggctcaatcccacccagttaataattcttgccctttcttgagcttgcctgcccttgagtagggcatgcacttggcaggatcaaaaccaaacactcctggctcctgagtcttgatctctcctactgcttgctcatgaatatgcttctttcttcccatgtaataggcagacttcctagaatgctcttcttctctgagaggaggcttcaattcttcagctgctctacctgtgactgcatgggtaagtcaaatgtggggctagttatgttgtccagccaagttttaccaataaaaataagctaatatttttattcccccacatagtactgtgtatgtttctagttggatctaacctagaagggaagaagggaatgatttggctcctgtgaacccccaacactcacaaaatgaattcccataataaagtgatatcaggc

SEQ ID NO: 20272 - protein, 42 aa, Homo sapiens
MAGNRSQNIKHKQTALIAIPMSSQTPRMLGRPRNQGQLYPQP

SEQ ID NO: 20273 - DNA, 323 bp, Homo sapiens
gtcagttcctctcaacctgccctggcatcaaagtctcaaagcaagtgggggccaaccagcaacaaccccaggggagctttgacaaccacagaatttgagatggctggtaatcgttctcagaacataaaacacaaacggtcccatcaggacatctataaaccatggagtttcaggtgcaaggttggaaatccacaggaactcactctcatgtgtgcatcattcagtgatttctccacacacagtgggctgtcagatacatttatagttttttttctttacattgtgcatccttttcttgaggtaaaaatctgatttgcctgttg

SEQ ID NO: 20274 - protein, 70 aa, Homo sapiens
MAGNRSQNIKHKRSHQDIYKPWSFRCKVGNPQELTLMCASFSDFSTHSGLSDTFIVFFLYIVHPFLEVKI

SEQ ID NO: 20275 - DNA, 1127 bp, Homo sapiens
ccaggggagctttgacaaccacagaatttgagatggctggtaatcgttctcagaacataaaacacaaagctggactgtagtggaacaatcacagttcactgcagcatcggcctcctgggctcaagtgatcttactgcctcagcttcccgagtagctggaactatgggtgagcaacaccacagccagctaattttttaagtttttgtagagacggggtcttgctgtgttgcacaggctggtctcaaactctggcttcaagtgatccttccacctcagcctcccaaagtgctgagattacaggtgtgagccactgccccaatggtatctttatattatttttccttacaagttacttcaaattcttgatgttgaatttcatctcactgacttcaggcttttaaaacacatgggaatacttgagacctaagaatggttgtgagtcaaataaaaaagtagaactaaagtatactgaagttattcaaatacattcaaactataaagatcccttatagattactggcatcaaggtaggaaggaaaagatacaagaagtaaaatgcaacactcattacaggttgtcaacattattggtatacagtttatcctaacacagagcagccttcttaacctgctccataaaattaccagcaagaaagaaaagtacaagaataaggttcacagctgaattggcttggtgtcctaattccctattccagtattctcagaaggatcccatctatgatatatgcagaaatcacagccacatttgaatggttcaatcttgattcatactgaactcccttaagcccagcagtttctcattcttaaaaggtaggttattagagccccaaagcaattttcataacaaatctacctttgtatatttaagaatatgcattaaggctaggagtggtggctcacgccagtaatcctagcactttgggaggccgaggtgggcagatcacaaggtcagattgagaccatcctggccaacacggtgaaaccccatctctactaaaaatacaaaaatttgcccgggcggtggctcacgcctataatcccagcacttttgggaggccaaggcgggcggatcacgaggtcaggagatcaaaaccatcctggataaca

SEQ ID NO: 20276 - protein, 42 aa, Homo sapiens [sequence omitted]

SEQ ID NO: 20277 - DNA, 2554 bp, Homo sapiens
ggggagagctctcccaggcgcgatggaggcaacccgaacctgaagcagccacactgccttacatttgatccttctctcagttttttccccacttaatcaccgctgaaaaatttccaccccattgaagcagctaaggctccgacaagctactctcctctgcaaggcctaccgtgggggccacttaaccatccgccttgccctgggtggctgcaccaatcggccgttctaccgcattgtggctgctcacaacaagtgtcccagggatggccgtttcgtagagcagctgggctcctatgatccattgcccaacagtcatggagaaaaactcgttgccctcaacctagacaggatccgtcattggattggctgcggggcccacctctctaagcctatggaaaagcttctgggtcttgctggctttttccctctgcatcctatgatgatcacaaatgctgagagactgcgaaggaaacgggcacgtgaagtcctgttagcttctcagaaaacagatgcagaagctacagatacagaggctacagaaacataaatgagctgactttagtgagcatagcagtgggaacaaggtcaaggtccttttgaaacactgcagcgatcttaattttgttagatttggagttcaataaatggagtatcctgagttgcccttgctcttctggcctggcctgcacagggcccagggagagatttgttcttgtgtgacttagagctgggtgtgggtactaattagcttttttcgactttgtcttgggatagacagtggctatgggaggattggacttttgagttgggctctgggtctcttggacaactttacaatttactggcttccaagacttcctgcttcaaaacccccagccagactattcatggcccattcagatcttcatgttcatcccacaagtgcaagaacagttaacctttcttaattgatttttgtaattggaggtttatattgtcttgcctaatgcatattctctttttttttttttttttgagacggagtcttgttctgttgccaggctggagtgcggtggtgcaatctcagctcactgcaatctccacctcctgggttcaagaggttctcctgcctcagcctcctgagtagccggggagctacaagcatgcaccaccacacccagctaattttttttttttttttgagaggagtctcgctctgtcgcccaggcttgagtgcagtggcgcgatctcggctcactgcaagctctgtctcctgggttcatgccattctcctgcttcagcctcccgagtagtcccaggagtagctgggactacaggtgcccaccaccacacccagctaatttttttgtatttttagtagagatggggtttcaccatgttatccaggatggttttgatctcctgacctcgtgatccgcccgccttggcctcccaaaagtgctgggattataggcgtgagccaccgcccgggcaaatttttgtatttttagtagagatggggtttcaccgtgttggccaggatggtctcaatctgaccttgtgatctgcccacctcggcctcccaaagtgctaggattactggcgtgagccaccactcctagccttaatgcatattcttaaatatacaaaggtagatttgttatgaaaattgctttggggctctaataacctaccttttaagaatgagaaactgctgggcttaagggagttcagtatgaatcaagattgaaccattcaaatgtggctgtgatttctgcatatatcatagatgggatccttctgagaatactggaatagggaattaggacaccaagccaattcagctgtgaaccttattcttgtacttttctttcttgctggtaattttatggagcaggttaagaaggctgctctgtgttaggataaactgtataccaataatgttgacaacctgtaatgagtgttgcattttacttcttgtatcttttccttcctaccttgatgccagtaatctataagggatctttatagtttgaatgtatttgaataacttcagtatactttagttctacttttttatttgactcacaaccattcttaggtctcaagtattcccatgtgttttaaaagcctgaagtcagtgagatgaaattcaacatcaagaatttgaagtaacttgtaaggaaaaataatataaagataccattggggcagtggctcacacctgtaatctcagcactttgggaggctgaggtggaaggatcacttgaagccagagtttgagaccagcctgtgcaacacagcaagaccccgtctctacaaaaacttaaaaaattagctggctgtggtgttgctcacccatagttccagctactcgggaagctgaggcagtaagatcacttgagcccaggaggccgatgctgcagtgaactgtgattgttccactacagtccagcctgggtgacagagaaaagaaaaagaaaacattacataatttggctagagcataataatttgattttctggtttttgaaaatttgagttgcaataaaaggatatttcagtgtgcgatttc

SEQ ID NO: 20278 - protein, 51 aa, Homo sapiens [sequence omitted]

SEQ ID NO: 20279 - DNA, 867 bp, Homo sapiens
attgtgggaagtatagggcggcaagcggaggaggcgtggcgagcggatcatccgcttccggagtcgaggttttcgggcttgtaccgcttggcggtgcggcctggtgtcggcttgcaggttctttctgtgtttgttctctgccctgccaaggccgtagagctggtgcgtgcgggtagcggggctctccgaggagccgcacgccggcggcaccatggtccacctcactactctcctctgcaaggcctaccgtgggggccacttaaccatccgccttgccctgggtggctgcaccaatcggccgttctaccgcattgtggctgctcacaacaagtgtcccagggatggccgtttcgtagagcagctgggctcctatgatccattgcccaacagtcatggagaaaaactcgttgccctcaacctagacaggatccgtcattggattggctgcggggcccacctctctaagcctatggaaaagcttctgggtcttgctggctttttccctctgcatcctatgatgatcacaaatgctgagagactgcgaaggaaacgggcacgtgaagtcctgttagcttctcagaaaacagatgcagaagctacagatacagaggctacagaaacataaatgagctggctgtggtgttgctcacccatagttccagctactcgggaagctgaggcagtaagatcacttgagcccaggaggccgatgctgcagtgaactgtgattgttccactacagtccagcctgggtgacagagaaaagaaaaagaaaacattacataatttggctagagcataataatttgattttctggtttttgaaaatttgagttgcaataaaaggatatttcagtgtgcgatttc

SEQ ID NO: 20280 - protein, 137 aa, Homo sapiens; identical to SEQ ID NO: 2543

SEQ ID NO: 20281 - DNA, 959 bp, Homo sapiens
attgtgggaagtatagggcggcaagcggaggaggcgtggcgagcggatcatccgcttccggagtcgaggttttcgggcttgtaccgcttggcggtgcggcctggtgtcggcttgcaggttctttctgtgtttgttctctgccctgccaaggccgtagagctggtgcgtgcgggtagcggggctctccgaggagccgcacgccggcggcaccatggtccacctcactactctcctctgcaaggcctaccgtgggggccacttaaccatccgccttgccctgggtggctgcaccaatcggccgttctaccgcattgtggctgctcacaacaagtgtcccagggatggccgtttcgtagagcagctgggctcctatgatccattgcccaacagtcatggagaaaaactcgttgccctcaacctagacaggatccgtcattggattggctgcggggcccacctctctaagcctatggaaaagcttctgggtctcaagtattcccatgtgttttaaaagcctgaagtcagtgagatgaaattcaacatcaagaatttgaagtaacttgtaaggaaaaataatataaagataccattggggcagtggctcacacctgtaatctcagcactttgggaggctgaggtggaaggatcacttgaagccagagtttgagaccagcctgtgcaacacagcaagaccccgtctctacaaaaacttaaaaaattagctggctgtggtgttgctcacccatagttccagctactcgggaagctgaggcagtaagatcacttgagcccaggaggccgatgctgcagtgaactgtgattgttccactacagtccagcctgggtgacagagaaaagaaaaagaaaacattacataatttggctagagcataataatttgattttctggtttttgaaaatttgagttgcaataaaaggatatttcagtgtgcgatttc

SEQ ID NO: 20282 - protein, 99 aa, Homo sapiens; identical to SEQ ID NO: 20268

SEQ ID NO: 20283 - DNA, 2632 bp, Homo sapiens
attgtgggaagtatagggcggcaagcggaggaggcgtggcgagcggatcatccgcttccggagtcgaggttttcgggcttgtaccgcttggcggtgcggcctggtgtcggcttgcaggttctttctgtgtttgttctctgccctgccaaggccgtagagctggtgcgtgcgggtagcggggctctccgaggagccgcacgccggcggcaccatggtccacctcactactctcctctgcaaggcctaccgtgggggccacttaaccatccgccttgccctgggtggctgcaccaatcggccgttctaccgcattgtggctgctcacaacaagtgtcccagggatggccgtttcgtagagcagctgggctcctatgatccattgcccaacagtcatggagaaaaactcgttgccctcaacctagacaggatccgtcattggattggctgcggggcccacctctctaagcctatggaaaagcttctgggtcttgctggctttttccctctgcatcctatgatgatcacaaatgctgagagactgcgaaggaaacgggcacgtgaagtcctgttagcttctcagaaaacagatgcagaagctacagatacagaggctacagaaacataaatgagctgactttagtgagcatagcagtgggaacaaggtcaaggtccttttgaaacactgcagcgatcttaattttgttagatttggagttcaataaatggagtatcctgagttgcccttgctcttctggcctggcctgcacagggcccagggagagatttgttcttgtgtgacttagagctgggtgtgggtactaattagcttttttcgactttgtcttgggatagacagtggctatgggaggattggacttttgagttgggctctgggtctcttggacaactttacaatttactggcttccaagacttcctgcttcaaaacccccagccagactattcatggcccattcagatcttcatgttcatcccacaagtgcaagaacagttaacctttcttaattgatttttgtaattggaggtttatattgtcttgcctaatgcatattctctttttttttttttttttgagacggagtcttgttctgttgccaggctggagtgcggtggtgcaatctcagctcactgcaatctccacctcctgggttcaagaggttctcctgcctcagcctcctgagtagccggggagctacaagcatgcaccaccacacccagctaattttttttttttttttgagaggagtctcgctctgtcgcccaggcttgagtgcagtggcgcgatctcggctcactgcaagctctgtctcctgggttcatgccattctcctgcttcagcctcccgagtagtcccaggagtagctgggactacaggtgcccaccaccacacccagctaatttttttgtatttttagtagagatggggtttcaccatgttatccaggatggttttgatctcctgacctcgtgatccgcccgccttggcctcccaaaagtgctgggattataggcgtgagccaccgcccgggcaaatttttgtatttttagtagagatggggtttcaccgtgttggccaggatggtctcaatctgaccttgtgatctgcccacctcggcctcccaaagtgctaggattactggcgtgagccaccactcctagccttaatgcatattcttaaatatacaaaggtagatttgttatgaaaattgctttggggctctaataacctaccttttaagaatgagaaactgctgggcttaagggagttcagtatgaatcaagattgaaccattcaaatgtggctgtgatttctgcatatatcatagatgggatccttctgagaatactggaatagggaattaggacaccaagccaattcagctgtgaaccttattcttgtacttttctttcttgctggtaattttatggagcaggttaagaaggctgctctgtgttaggataaactgtataccaataatgttgacaacctgtaatgagtgttgcattttacttcttgtatcttttccttcctaccttgatgccagtaatctataagggatctttatagtttgaatgtatttgaataacttcagtatactttagttctacttttttatttgactcacaaccattcttaggtctcaagtattcccatgtgttttaaaagcctgaagtcagtgagatgaaattcaacatcaagaatttgaagtaacttgtaaggaaaaataatataaagataccattggggcagtggctcacacctgtaatctcagcactttgggaggctgaggtggaaggatcacttgaagccagagtttgagaccagcctgtgcaacacagcaagaccccgtctctacaaaaacttaaaaaattagctggctgtggtgttgctcacccatagttccagctactcgggaagctgaggcagtaagatcacttgagcccaggaggccgatgctgcagtgaactgtgattgttccactacagtccagcctgggtgacagagaaaagaaaaagaaaacattacataatttggctagagcataataatttgattttctggtttttgaaaatttgagttgcaataaaaggatatttcagtgtgcgatttc

SEQ ID NO: 20284 - protein, 137 aa, Homo sapiens; identical to SEQ ID NO: 2543

SEQ ID NO: 20285 - DNA, 751 bp, Homo sapiens
tcgcacactgaaatatccttttattgcaactcaaattttcaaaaaccagaaaatcaaattattatgctctagccaaattatgtaatgttttctttttcttttctctgtcacccaggctggactgtagtggaacaatcacagttcactgcagcatcggcctcctggcaacagaacaagactccgtctcaaaaaaaaaaaaaaaaagagaatatgcattaggcaagacaatataaacctccaattacaaaaatcaattaagaaaggttaactgttcttgcacttgtgggatgaacatgaagatctgaatgggccatgaatagtctggctgggggttttgaagcaggaagtcttggaagccagtaaattgtaaagttgtccaagagacccagagcccaactcaaaagtccaatcctcccatagccactgtctatcccaagacaaagtcgaaaaaagctaattagtacccacacccagctctaagtcacacaagaacaaatctctccctgggccctgtgcaggccaggccagaagagcaagggcaactcaggatactccatttattgaactccaaatctaacaaaattaagatcgctgcagtgtttcaaaaggaccttgaccttgttcccactgctatgctcactaaagtcagctcatttatgtttctgtagcctctgtatctgtagcttctgcatctgttttctgagaagctaacaggacttcacgtgcccgtttccttcgcagtctctcagca

SEQ ID NO: 20286 - protein, 44 aa, Homo sapiens
MFSFSFLCHPGWTVVEQSQFTAASASWQQNKTPSQKKKKKENMH

SEQ ID NO: 20287 - DNA, 1269 bp, Homo sapiens
ccttacaagttacttcaaattcttgatgttgaatttcatctcactgacttcaggcttttaaaacacatgggaatacttgagacctaagaatggttgtgagtcaaataaaaaagtagaactaaagtatactgaagttattcaaatacattcaaactataaagatcccttatagattactggcatcaaggtaggaaggaaaagatacaagaagtaaaatgcaacactcattacaggttgtcaacattattggtatacagtttatcctaacacagagcagccttcttaacctgctccataaaattaccagcaagaaagaaaagtacaagaataaggttcacagctgaattggcttggtgtcctaattccctattccagtattctcagaaggatcccatctatgatatatgcagaaatcacagccacatttgaatggttcaatcttgattcatactgaactcccttaagcccagcagtttctcattcttaaaaggtaggttattagagccccaaagcaattttcataacaaatctacctttgtatatttaagaatatgcattaaggctaggagtggtgcatgcttgtagctccccggctactcaggaggctgaggcaggagaacctcttgaacccaggaggtggagattgcagtgagctgagattgcaccaccgcactccagcctggcaacagaacaagactccgtctcaaaaaaaaaaaaaaaaagagaatatgcattaggcaagacaatataaacctccaattacaaaaatcaattaagaaaggttaactgttcttgcacttgtgggatgaacatgaagatctgaatgggccatgaatagtctggctgggggttttgaagcaggaagtcttggaagccagtaaattgtaaagttgtccaagagacccagagcccaactcaaaagtccaatcctcccatagccactgtctatcccaagacaaagtcgaaaaaagctaattagtacccacacccagctctaagtcacacaagaacaaatctctccctgggccctgtgcaggccaggccagaagagcaagggcaactcaggatactccatttattgaactccaaatctaacaaaattaagatcgctgcagtgtttcaaaaggaccttgaccttgttcccactgctatgctcactaaagtcagctcatttatgtttctgtagcctctgtatctgtagcttctgcatctgttttctgagaagctaacaggacttcacgtgcccgtttccttcgcagtctctcagca

SEQ ID NO: 20288 - protein, 53 aa, Homo sapiens
MLVAPRLLRRLRQENLLNPGGGDCSELRLHHRTPAWQQNKTPSQKKKKKENMH

SEQ ID NO: 20289 - DNA, 657 bp, Homo sapiens
ggggagagctctcccaggcgcgatggaggcaacccgaacctgaagcagccacactgccttacatttgatccttctctcagttttttccccacttaatcaccgctgaaaaatttccaccccattgaagcagctaaggctccgacaagctactctcctctgcaaggcctaccgtgggggccacttaaccatccgccttgccctgggtggctgcaccaatcggccgttctaccgcattgtggctgctcacaacaagtgtcccagggatggccgtttcgtagagcagctgggctcctatgatccattgcccaacagtcatggagaaaaactcgttgccctcaacctagacaggatccgtcattggattggctgcggggcccacctctctaagcctatggaaaagcttctgggtcttgctggctttttccctctgcatcctatgatgatcacaaatgctgagagactgcgaaggaaacgggcacgtgaagtcctgttagcttctcagaaaacagatgcagaagctacagatacagaggctacagaaacataaatgagctgactttagtgagcatagcagtgggaacaaggtcaaggtccttttgaaacactgcagcgatcttaattttgttagatttggagttcaataaatggagtatcctg

SEQ ID NO: 20290 - protein, 51 aa, Homo sapiens [sequence omitted]

SEQ ID NO: 20291 - DNA, 735 bp, Homo sapiens
attgtgggaagtatagggcggcaagcggaggaggcgtggcgagcggatcatccgcttccggagtcgaggttttcgggcttgtaccgcttggcggtgcggcctggtgtcggcttgcaggttctttctgtgtttgttctctgccctgccaaggccgtagagctggtgcgtgcgggtagcggggctctccgaggagccgcacgccggcggcaccatggtccacctcactactctcctctgcaaggcctaccgtgggggccacttaaccatccgccttgccctgggtggctgcaccaatcggccgttctaccgcattgtggctgctcacaacaagtgtcccagggatggccgtttcgtagagcagctgggctcctatgatccattgcccaacagtcatggagaaaaactcgttgccctcaacctagacaggatccgtcattggattggctgcggggcccacctctctaagcctatggaaaagcttctgggtcttgctggctttttccctctgcatcctatgatgatcacaaatgctgagagactgcgaaggaaacgggcacgtgaagtcctgttagcttctcagaaaacagatgcagaagctacagatacagaggctacagaaacataaatgagctgactttagtgagcatagcagtgggaacaaggtcaaggtccttttgaaacactgcagcgatcttaattttgttagatttggagttcaataaatggagtatcctg

SEQ ID NO: 20292 - protein, 137 aa, Homo sapiens; identical to SEQ ID NO: 2543

SEQ ID NO: 20293 - DNA, 784 bp, Homo sapiens
gtgcgatccctctcagacttgtgagtccctgctggagtcagaagttttaggcgaatcccaggcgcgccaaggaaagtgctacaaaagccatccatcttgcaagcgttggtgccgaggcgcaacgctgagaacgcaaatactaaagggcgctgttctttcctcgtggagctcacagtccgctggggagaccgtgagatgacagcagagaaactagcgcgatcagtagtactcagcgcaaggacagcgagcagagaaggcaaacctagtgcttgctaaggaagacttcacagaggaggtagtgtcagggccgagactaggagaaggattctccaggcttcatacggtaaaactctctgggaaggaaaggaactcagagtcccatgcagaaaattgttcagctggaggggtatcagaaagatggatttccaaagccaactgtttcctgtagtgtgtggatctctgcaagcagagcctcatctttcaatttcagctacatgaaagaggaagaaagggaaagatatatgtcatacgtgatatactttatgtggctttgaagacccctcttttgtggggctacggctaaagaacatagttccctgggatggaattggctcttcctatttccctacttcatgaaaactccagtagaagaccttagaaccttgtcctggttacatggatatgtttactttgtgaaaattcatcaagcactatgcacggtcatgatttgtacatttttttgtaagataacttcattaaaatttactttttttatttttaaaaa

SEQ ID NO: 20294 - protein, 57 aa, Homo sapiens [sequence omitted]

SEQ ID NO: 20295 - DNA, 553 bp, Homo sapiens
tagtgcttgctaaggaagacttcacagaggagtcacaccttaaaaaaaaaaggaggggttattcctgcttttgccgtgctgtgatccagggcagagctccaggcttcatacggtaaaactctctgggaaggaaaggaactcagagtcccatgcagaaaattgttcagctggaggggtatcagaaagatggatttccaaagccaactgtttcctgtagtgtgtggatctctgcaagcagagcctcatctttcaatttcagctacatgaaagaggaagaaagggaaagatatatgtcatacgtgatatactttatgtggctttgaagacccctcttttgtggggctacggctaaagaacatagttccctgggatggaattggctcttcctatttccctacttcatgaaaactccagtagaagaccttagaaccttgtcctggttacatggatatgtttactttgtgaaaattcatcaagcactatgcacggtcatgatttgtacatttttttgtaagataacttcattaaaatttactttttttatttttaaaaa

SEQ ID NO: 20296 - protein, 57 aa, Homo sapiens [sequence omitted]

SEQ ID NO: 20297 - DNA, 633 bp, Homo sapiens
cgtcccacccctatcgaggcagtcacaccttaaaaaaaaaaggaggggttattcctgcttttgccgtgctgtgatccagggcagagtttctcgtcaaccagtaaaacatccagtaacacagccaatggaaataaatgaatgggtctctgtttatagtgaagattctttcgttctccagctccaggcttcatacggtaaaactctctgggaaggaaaggaactcagagtcccatgcagaaaattgttcagctggaggggtatcagaaagatggatttccaaagccaactgtttcctgtagtgtgtggatctctgcaagcagagcctcatctttcaatttcagctacatgaaagaggaagaaagggaaagatatatgtcatacgtgatatactttatgtggctttgaagacccctcttttgtggggctacggctaaagaacatagttccctgggatggaattggctcttcctatttccctacttcatgaaaactccagtagaagaccttagaaccttgtcctggttacatggatatgtttactttgtgaaaattcatcaagcactatgcacggtcatgatttgtacatttttttgtaagataacttcattaaaatttactttttttatttttaaa

SEQ ID NO: 20298 - protein, 74 aa, Homo sapiens [sequence omitted]

SEQ ID NO: 20299 - DNA, 1713 bp, Homo sapiens
caggaggaacttcagacatttatcagtgagctctatgtgttcttagtagatcagatgcatgtagccctaaaccagaccatgccagatgatgtccaaggcactgttgcaaccatttatacaagcagtgaacagcttcaactctttgcatttgaagcagaagtcaatgagaactttgagatggcagcagcatattataaagagagattggtccgtgagccccagaatctggatcactggttggactatggtgccttctgcctcctaactgaagacaacatcaaagcacaagagtgttttcagaaagccctttccctcaaccagagtcatatccacagcttgttgctgtgtggtgtcctggctgtcctgttggagaactatgagcaagcagaaattttctttgaggatgctacttgcttggaaccaactaatgttgtagcctggactttacttggtttgtactatgaaattcaaaacaatgatattcgaatggaaatggcatttcatgaggcctccaaacagcttcaggcacggatgcttcaggcacaagtaacaaagcaaaagagcactggtgtagaagacactgaggaaagagggaagagagaatctagtttaggcccttggggaatcacaaatggttctgcaacagcaatcaaggtggaagccccagcaggaccaggagctgcattatctattctagacaaatttcttgaagaatcctccaaactgcagtctgattcacaagaacccattttgactacacaaacttgggatccaagtataagccaaaaaccatctaacacatttatcaaggagataccaacaaagaaagaagcatcaaaatgtcaagattcatcagctcttctgcatcccggccttcattatggtgtttctcaaactaccaccatcttcatggagaccatacatttcttgatgaaagtcaaggctgtgcagtatgtgcacagagtgcttgcacatgagctgttatgccctcaaggaggccccagctgtgaatattacttggtgctggcccaaacacacattcttaagaagaactttgccaaggcagaggaataccttcaacaagcagcccagatggactacctgaaccccaatgtctggggcctgaagggccatctctattttctgagtggaaatcattctgaggccaaggcatgctatgaacgaaccattagctttgtagtggatgcttctgagatgcacttcatcttcctgagactggggctcatctatctggaagagaaagagctggaggagctcacagaggctgaggatgctctttctgaagccaatgcattgaacaactacaatgctgaagtatgggcatatctggctctggtctgcctgaaagttggacggcaattagaagctgagcaggcctacaagtacatgatcaagctgaaattgaaagatgaggctctgcttgcagagatccacacactacaggaaacagttggctttggaaatccatctttctgatacccctccagctgaacaattttctgcatgggactctgagttcctttccttcccagagagttttaccgtatgaagcctggagctggagaacgaaagaatcttcactataaacagagacccattcatttatttccattggctgtgttactggatgttttactggttgacgagaaactgggtcacaataaaaaaatggagatatgaaactcaaaattc

SEQ ID NO: 20300 - protein, 480 aa, Homo sapiens
MHVALNQTMPDDVQGTVATIYTSSEQLQLFAFEAEVNENFEMAAAYYKERLVREPQNLDHWLDYGAFCLLTEDNIKAQECFQKALSLNQSHIHSLLLCGVLAVLLENYEQAEIFFEDATCLEPTNVVAWTLLGLYYEIQNNDIRMEMAFHEASKQLQARMLQAQVTKQKSTGVEDTEERGKRESSLGPWGITNGSATAIKVEAPAGPGAALSILDKFLEESSKLQSDSQEPILTTQTWDPSISQKPSNTFIKEIPTKKEASKCQDSSALLHPGLHYGVSQTTTIFMETIHFLMKVKAVQYVHRVLAHELLCPQGGPSCEYYLVLAQTHILKKNFAKAEEYLQQAAQMDYLNPNVWGLKGHLYFLSGNHSEAKACYERTISFVVDASEMHFIFLRLGLIYLEEKELEELTEAEDALSEANALNNYNAEVWAYLALVCLKVGRQLEAEQAYKYMIKLKLKDEALLAEIHTLQETVGFGNPSF

SEQ ID NO: 20301 - DNA, 3894 bp, Homo sapiens
gactcctgcctgagtcatcctcctcagtagttgtcaaatgagaaatattgaaatcaaagagtcgagaaagcaaaatgtaaaggtggaaacctatgcacttaaacccaactcttggcaaggtaaagcatccgcggaaacagcaggctctcgaagtgaggaggctgcagccggcgctagggcgcaggcgcagaagctcagcgtctcgctccctgctcccggccccagagggttatcgcgagtcttggaataaacttgctcgtgcgatggccaaaaagaccaaagaaaacagagggacttttcccagttggtgatatggagcaagtgccatcagcaggcagactcgtgcagatcaccgtgacagagggatatgatttgaaaggttttaaaggagatactccagttacctttattcgagcagaattcaatcaagtggttctgggagactctgcaaaaattactgtttctccagaaggaagtgcaaaatacaacttcactagcagttttgagtttaatcctgaaggaggaatcacttcagatgacctcgctcacaaacctgtgttcttaactgtgactgaagttttaccaaaggaaaagaaacagaaagaagagaagaccttaattcttggtcaggctgtggtggaccttcttcccttactggaaggacagagttcatttcaaacaacagttccattgcaccctgtgcaaggctcacccttagaaactcctagatcaagtgctaagcagtgcagtcttgaagttaaagtattagtggcagagcctttactgaccacagcccagatctcagggggcaatctactgaaggtcacgttggaggctgcttactctgtgcctgaatccttcattccaacaggtcctgggcagaactacatggtcggtctgcaagttccatcacttggagagaaggactatcccattttatttaagaatggaactctgaagcttggaggggaaagggaacctgttccccggcccaaaaagtggccaattgccaacattctggctccaggagctaataacattcctgatgcattcattgttggtggtccctatgaagaagaagaaggagaactcaaccatcctgaggacagcgaatttaggaatcaagcagagtgcataaagaaaaggattatttgggacttggaaagtcgctgctaccttgatccttctgcagtggtcagttttcagaagcgaattgccgattgccggctttggcctgtagagatcacaagagttcctctggtcactatacccaaagggaaagctggcaaaactgaaaagactgatgaagaagctcagctttcgtttcatggtgtggcttatgttaatatggtcccattgttgtatccaggtgtgaagagaattcggggagcttttcatgtttacccttacctagacagtgtagtccatgaaaagaccaaatgtttattgagcttgttccgggatattggccatcacttgattcataataataaaataggaggaattaattctctgctgtccaaacaagctgtttctaagaatctgaaagaagataaaccagtgaaagaaaaggatatagatggaaggcctaggcctggggatgtgcaggcacctagtataaaatctcagagctcagatactcctttggaaggtgaaccccctctaagtcacaatcctgaaggacagcaatatgtagaagcagggacatacattgtgttggaaattcagctggacaaagccttggttccaaagcgaatgccagaggagctagccagaagggtcaaggaaatgattcctccaaggcctcctcttacccgtcggacaggaggagctcagaaggcaatgagtgactaccacatacagatcaagaatatttctagagccattctagatgaatactacagaatgtttggaaaacaggtggccaaactggagagtgatatggatagtgaaaccttggaggagcagaagtgccagctcagctatgaacttaattgctctggaaaatactttgctttcaaagaacaactcaagcatgctgtggtaaagattgtgagagataaatacttgaagacaacatcatttgaaagccaggaggaacttcagacatttatcagtgagctctatgtgttcttagtagatcagatgcatgtagccctaaaccagaccatgccagatgatgtccaaggcactgttgcaaccatttatacaagcagtgaacagcttcaactctttgcatttgaagcagaagtcaatgagaactttgagatggcagcagcatattataaagagagattggtccgtgagccccagaatctggatcactggttggactatggtgccttctgcctcctaactgaagacaacatcaaagcacaagagtgttttcagaaagccctttccctcaaccagagtcatatccacagcttgttgctgtgtggtgtcctggctgtcctgttggagaactatgagcaagcagaaattttctttgaggatgctacttgcttggaaccaactaatgttgtagcctggactttacttggtttgtactatgaaattcaaaacaatgatattcgaatggaaatggcatttcatgaggcctccaaacagcttcaggcacggatgcttcaggcacaagtaacaaagcaaaagagcactggtgtagaagacactgaggaaagagggaagagagaatctagtttaggcccttggggaatcacaaatggttctgcaacagcaatcaaggtggaagccccagcaggaccaggagctgcattatctattctagacaaatttcttgaagaatcctccaaactgcagtctgattcacaagaacccattttgactacacaaacttgggatccaagtataagccaaaaaccatctaacacatttatcaaggagataccaacaaagaaagaagcatcaaaatgtcaagattcatcagctcttctgcatcccggccttcattatggtgtttctcaaactaccaccatcttcatggagaccatacatttcttgatgaaagtcaaggctgtgcagtatgtgcacagagtgcttgcacatgagctgttatgccctcaaggaggccccagctgtgaatattacttggtgctggcccaaacacacattcttaagaagaactttgccaaggcagaggaataccttcaacaagcagcccagatggactacctgaaccccaatgtctggggcctgaagggccatctctattttctgagtggaaatcattctgaggccaaggcatgctatgaacgaaccattagctttgtagtggatgcttctgagatgcacttcatcttcctgagactggggctcatctatctggaagagaaagagtatgaaaaggcaaagaaaacctatatgcaagcctgtaagagatcaccttcatgccttacctggctaggactgggaatcgcctgctatcggctggaggagctcacagaggctgaggatgctctttctgaagccaatgcattgaacaactacaatgctgaagtatgggcatatctggctctggtctgcctgaaagttggacggcaattagaagctgagcaggcctacaagtacatgatcaagctgaaattgaaagatgaggctctgcttgcagagatccacacactacaggaaacagttggctttggaaatccatctttctgatacccctccagctgaacaattttctgcatgggactctgagttcctttccttcccagagagttttaccgtatgaagcctggagctggagaacgaaagaatcttcactataaacagagacccattcatttatttccattggctgtgttactggatgttttactggttgacgagaaactgggtcacaataaaaaaatggagatatgaaactcaaaattc

SEQ ID NO: 20302 - protein, 1121 aa, Homo sapiens
MEQVPSAGRLVQITVTEGYDLKGFKGDTPVTFIRAEFNQVVLGDSAKITVSPEGSAKYNFTSSFEFNPEGGITSDDLAHKPVFLTVTEVLPKEKKQKEEKTLILGQAVVDLLPLLEGQSSFQTTVPLHPVQGSPLETPRSSAKQCSLEVKVLVAEPLLTTAQISGGNLLKVTLEAAYSVPESFIPTGPGQNYMVGLQVPSLGEKDYPILFKNGTLKLGGEREPVPRPKKWPIANILAPGANNIPDAFIVGGPYEEEEGELNHPEDSEFRNQAECIKKRIIWDLESRCYLDPSAVVSFQKRIADCRLWPVEITRVPLVTIPKGKAGKTEKTDEEAQLSFHGVAYVNMVPLLYPGVKRIRGAFHVYPYLDSVVHEKTKCLLSLFRDIGHHLIHNNKIGGINSLLSKQAVSKNLKEDKPVKEKDIDGRPRPGDVQAPSIKSQSSDTPLEGEPPLSHNPEGQQYVEAGTYIVLEIQLDKALVPKRMPEELARRVKEMIPPRPPLTRRTGGAQKAMSDYHIQIKNISRAILDEYYRMFGKQVAKLESDMDSETLEEQKCQLSYELNCSGKYFAFKEQLKHAVVKIVRDKYLKTTSFESQEELQTFISELYVFLVDQMHVALNQTMPDDVQGTVATIYTSSEQLQLFAFEAEVNENFEMAAAYYKERLVREPQNLDHWLDYGAFCLLTEDNIKAQECFQKALSLNQSHIHSLLLCGVLAVLLENYEQAEIFFEDATCLEPTNVVAWTLLGLYYEIQNNDIRMEMAFHEASKQLQARMLQAQVTKQKSTGVEDTEERGKRESSLGPWGITNGSATAIKVEAPAGPGAALSILDKFLEESSKLQSDSQEPILTTQTWDPSISQKPSNTFIKEIPTKKEASKCQDSSALLHPGLHYGVSQTTTIFMETIHFLMKVKAVQYVHRVLAHELLCPQGGPSCEYYLVLAQTHILKKNFAKAEEYLQQAAQMDYLNPNVWGLKGHLYFLSGNHSEAKACYERTISFVVDASEMHFIFLRLGLIYLEEKEYEKAKKTYMQACKRSPSCLTWLGLGIACYRLEELTEAEDALSEANALNNYNAEVWAYLALVCLKVGRQLEAEQAYKYMIKLKLKDEALLAEIHTLQETVGFGNPSF

SEQ ID NO: 20303 - DNA, 6688 bp, Homo sapiens
ggttgctatagttgtcaaaaacataactgaggctgctgcagagaccaaagaaaacagagggacttttcccagttggtgatatggagcaagtgccatcagcaggcagactcgtgcagatcaccgtgacagagggatatgatttgaaaggttttaaaggagatactccagttacctttattcgagcagaattcaatcaagtggttctgggagactctgcaaaaattactgtttctccagaaggaagtgcaaaatacaacttcactagcagttttgagtttaatcctgaaggaggaatcacttcagatgacctcgctcacaaacctgtgttcttaactgtgactgaagttttaccaaaggaaaagaaacagaaagaagagaagaccttaattcttggtcaggctgtggtggaccttcttcccttactggaagtgcagtcttgaagttaaagtattagtggcagagcctttactgaccacagcccagatctcagggggcaatctactgaaggtcacgttggaggctgcttactctgtgcctgaatccttcattccaacaggtcctgggcagaactacatggtcggtctgcaagttccatcacttggagagaaggactatcccattttatttaagaatggaactctgaagcttggaggggaaagggaacctgttccccggcccaaaaagtggccaattgccaacattctggctccaggagctaataacattcctgatgcattcattgttggtggtccctatgaagaagaagaaggagaactcaaccatcctgaggacagcgaatttaggaatcaagcagagtgcataaagaaaaggattatttgggacttggaaagtcgctgctaccttgatccttctgcagtggtcagttttcagaagcgaattgccgattgccggctttggcctgtagagatcacaagagttcctctggtcactatacccaaagggaaagctggcaaaactgaaaaggtgtgaagagaattcggggagcttttcatgtttacccttacctagacagtgtagtccatgaaaagaccaaatgtttattgagcttgttccgggatattggccatcacttgattcataataataaaataggaggaattaattctctgctgtccaaacaagctgtttctaagaatctgaaagaagataaaccagtgaaagaaaaggatatagatggaaggcctaggcctggggatgtgcaggcacctagtataaaatctcagagctcagatactcctttggaaggtgaaccccctctaagtcacaatcctgaaggacagcaatatgtagaagcagggacatacattgtgttggaaattcagctggacaaagccttggttccaaagcgaatgccagaggagctagccagaagggtcaaggaaatgattcctccaaggcctcctcttacccgtcggacaggaggagctcagaaggcaatgagtgactaccacatacagatcaagaatatttctagagccattctagatgaatactacagaatgtttggaaaacaggtggccaaactggagagtgatatggatagtgaaaccttggaggagcagaagtgccagctcagctatgaacttaattgctctggaaaatactttgctttcaaagaacaactcaagcatgctgtggtaaagattgtgagagataaatacttgaagacaacatcatttgaaagccaggaggaacttcagacatttatcagtgagctctatgtgttcttagtagatcagatgcatgtagccctaaaccaggtaagtgtcaagaactgagagcactttcttttctctgtagagcatcagagtcttctatgaataattccttcctttgtttattcaacgaatatttattgaagtgtctgctctgtgctaggcactgaaaacacaaagatgagtaagaaactgcctaagcctaatcagtttaagactaattttggaaaaaaacaaggagatatgctctttcaatttcctagaaaaataaatttcacaactttaaaaaatgtgatggaattgtcaaaaatagattaaatatgttgcataaattgtgaaatgaaaattatcattctatttattctgtgaacaggtacaattcttaattttttattgaatatcataaaagcagagaaaaactttgagttttcagatattatacccaaatgacagtgacacttcaaacatgccttttctgtttgactggtggtctgctgtcccacccacttttctgtttatatttgtaagtcttccatcttgccttcatttgcttatttttatttgtattcaggggtagtttatttgaaaccagtgacaaagtcacagtctttttgtcccctggtagtgtctaaccatctgtgcctcctcaaattctttattctatttgcttttcccttccttgtttttcttctctaccaccatcacctcttgtttcactttgttctgtctttctggagaaggtaggacaggagtgtccagcatcaaaggattaagagaacagtcctgccttgggcatggatgatttgatttgaaaagcaattgagagtggagcatgagaaaaagaagttttgactttttcctcactagtagctgggagcaatacattgaattattttacactgaggtataatatgatcaggtttacatttgctaaaacactctgatagcactatggaggatgagttagaggtgacaaaactgtgatgttagttgattattgcataataaggaggaaaaagtttaagttaagtttaagtttcaatgggtaattgatgccattcagtacttcttggttgatactaaaaagaaaagaaaaacattaaccaggacatggaatgcaattatgagtaaatttggtgggaggcagatggtactgaattcgcttttgaacataggctctagtggggttttgcccaagacagagatctgagctagagatgagatttggggagctatgaaatatggatgctatggtcatagatgaactgcctgagaaaaacataagagagaagagagctggcagtagaactctaggaaataccaacatttaaggaatgaatgaaaaattgaaagagacaagtgggattgttaaagaggcaaagagccagagacaatggtgtcacagaagccaaaggaaaagaattttaaggaaaagtggtcaacattgttaaatactcctaggaattcaagaaaaacaaatctaaagtcttcactggatttgacaataaggaagttattgttaacctttacatagcaatattattgggctaatggggggattcaaattatgatgaattgagtaaatgagcaatcaagaaacagatgaatataaattcaagttggatgacgaaggaaaaaactggaaaagtagtagctagaagttatagggattttcttccctccctccctccctcccttcctcccttcctcccttcctcccttccttccttccttcatttctttctttctctttctctctctctctctttctccctttctctctttctttctcgcccaggctggagtgcagcagtgcaatcatggctcactatagcttcaacttcccaggctcaagcaatcctgccacctcagcctctcaagtagctgggactacaggtgcacaccacgcctaactaatttttgtatttttttgtagagatggggtttcaccatgttgcccaggctggtctcgaactcttggactcaagcgatccaccagccatggccttccaaagtgctgggattacaggcatgagccacccgctcctggcctgggattttctttttaagatgaaaaagacttgagcacatccacaggtttgggaaaaagtcagcagagtgggagaagctgaaaattgaggaaagagaggggataattgatggcaggctcagggtatacacctgggaaaggaccaagaatttaaatggaaggattaactttggaacagtgcaggctgcaatacctctttctctgagactgaaaagaaagcgatacaatagatccagaaataaataatttagctagggagtataatagttgagggatttcttacttaatgatttctattatctctgtgaagtaaggtctttactgaaagtgaaggagatgaggattgaatgaaaaacttgaagaaagagaagaaaacttagatactgcaaagcattatggaatatgctgctaagcaaagacaaatacatagattactaagggtattaaaggtctccagctaagactgaatgccacaagagcttgtggcagcttagataccaatctctgtgtctatgcagttttccttaggaccagttagctgctcttgtcttggaatgaagaagtcagattgtgctattgttttaagttgagaattttcaggacaaatgcaggagaaggacaaggatgcctgagatgaaagtatgctggtgagaaagtagcctgagtgggttatcatgaggttcagactgatccatctgggaagtgatgggcttattggaactgaaggaaataaagtcagcagttttcagtgggctaagtaacaaaaaggtggaagacaagacatggagtgttggttctgggagtgggatattagagtattctgttttgggtgtagaagtgcatcgctgcagggatttgggggtcaagataatcaaaactaaaaagaacaggacaaaagtattaatcaatgatcagaaactctctttggcctatctcaaatttggctttactgtccacatttcttagcaattatccttattaaaatcactgatattattttgacttctaattaaagaattttgtggactctttcttgaccatagcttctgactcaggagattcctaattacaccagacctgctctcccaatctttgtgtataggatatattctttttctggttttcctcctacctttttgtttcctttgaaggatctatcagtctatatttcctactaaaactatagatttggcttctaaaggtttacccttaatctcctgttttcttcacatttaaagaccctagcgagggcttgccaacctttttcatgtcatgacacaaaaaaatgatagtatttgtcatatacactacagaaaatgaaggaagctgtttgaggtcagaggtgacctgcatagggactatgaatgccctgagggttgaggcagttatttctgccctaagcaatttttacttacttccatgagctcagactgttggtattcagatacctgagcttctccttcacccttgacatttctctcctggttcactcttattcttttacttttttggcaagactgtcattatagacatcaatcagtaacattttagacgtcataactggatctcacatcggatttatgcttatgaaacctctctacttgtaattgtttcatttttgtctacctaacatcttgacattgacaagaccatgccagatgatgtccaaggcactgttgcaaccatttatacaagcagtgaacagcttcaactctttgcatttgaagcagaagtcaatgagaactttgagatggcagcagcatattataaagagagattggtccgtgagccccagaatctggatcactggttggactatggtgccttctgcctcctaactgaagacaacatcaaagcacaagagtgttttcagaaagccctttccctcaaccagagtcatatccacagcttgttgctgtgtggtgtcctggctgtcctgttggagaactatgagcaagcagaaattttctttgaggatgctacttgcttggaaccaactaatgttgtagcctggactttacttggtttgtactatgaaattcaaaacaatgatattcgaatggaaatggcatttcatgaggcctccaaacagcttcaggcacggatgcttcaggcacaagtaacaaagcaaaagagcactggtgtagaagacactgaggaaagagggaagagagaatctagtttaggcccttggggaatcacaaatggttctgcaacagcaatcaaggtggaagccccagcagtatgtgcacagagtgcttgcacatgagctgttatgccctcaaggaggccccagctgtgaatattacttggtgctggcccaaacacacattcttaagaagaactttgccaaggcagaggaataccttcaacaagcagcccagatggactacctgaaccccaatgtctggggcctgaagggccatctctattttctgagtggaaatcattctgaggccaaggcatgctatgaacgaaccattagctttgtagtggatgcttctgagatgcacttcatcttcctgagactggggctcatctatctggaagagaaagaggttggacggcaattagaagctgagcaggcctacaagtacatgatcaagctgaaattgaaagatgaggctctgcttgcagagatccacacactacaggaaacagttggctttggaaatccatctttctgatacccctccagctgaacaattttctgcatgggactctgagttcctttccttcccagagagttttaccgtatgaagcctggagctggagaacgaaagaatcttcactataaacagagacccattcatttatttccattggctgtgttactggatgttttactggttgacgagaaactgggtcacaataaaaaaatggagatatgaaactcaaaatt

SEQ ID NO: 20304 - protein, 205 aa, Homo sapiens
MPDDVQGTVATIYTSSEQLQLFAFEAEVNENFEMAAAYYKERLVREPQNLDHWLDYGAFCLLTEDNIKAQECFQKALSLNQSHIHSLLLCGVLAVLLENYEQAEIFFEDATCLEPTNVVAWTLLGLYYEIQNNDIRMEMAFHEASKQLQARMLQAQVTKQKSTGVEDTEERGKRESSLGPWGITNGSATAIKVEAPAVCAQSACT

SEQ ID NO: 20305 - DNA, 468 bp, Homo sapiens
taagggtccaacttcattctttgcatgtggacattgtttttccttgtaccatttgtttaaaagactatattaccccctccctcccacatcccagtagatcatcttggcactcttgttaaaaatcagttgaccgtaaatgtaagagtttatttctgaactctcaattcaattgattattttgatctatatggctatctttatgtctttattactgttcagactaaggcattcaaattttattagaaagatatttttatagtttttttccctgaaattggtttgcatatgtagatgattttattatgattccagtactattatattttccataccactaaagagggctttttccatacacaagtggatgttttaaatcagtcaaaaagaatgcctttcaaacagagtggccactgctaagcactgtaggagaataaaagaactgtaacacacacacacacgggaggctga

SEQ ID NO: 20306 - protein, 38 aa, Homo sapiens
RVQLHSLHVDIVFPCTICLKDYITPSLPHPSRSSWHSC

SEQ ID NO: 20307 - DNA, 1586 bp, Homo sapiens
ctttatgcagagttcaaggcccagccctaccttttccagggcatgagtagaggagtaacttcctgagaaagtgtgtgtgaatccaaaggcaataatctgggaaattttttggaaatcgtgatgagaaccagagtataaaccaccaaatggctcaggaagatgctcagcgtctctatcaagctggtgaggggagactagggaccgatgaatcttgctttaacatgatccttgccacaagaagctttcctcagctgagagctaccatggaggcttattctaggatggctaatcgagacttgttaagcagtgtgagccgtgagttttccggatatgtagaaagtggtttgaagaccatcttgcagtgtgccctgaaccgccctgccttctttgctgagaggctctactatgctatgaaaggtgctggcacagatgactccaccctggtccggattgtggtcactcgaagtgagattgaccttgtacaaataaaacagatgttcgctcagatgtatcagaagactctgggcacaatgattgcaggtgacacgagtggagattaccgaagacttcttctggctattgtgggccagtaggagggatttttttttttttaatgaaaaaaaatttctattcatagcttatccttcagagcaatgacctgcatgcagcaatatcaaacatcagctaaccgaaagagctttctgtcaaggaccgtatcagggtaatgtgcttggtttgcacatgttgttattgccttaattctaattttattttgttctctacatacaatcaatgtaaagccatatcacaatgatacagtaatattgcaatgtttgtaaaccttcattcttactagtttcattctaatcaagatgtcaaattgaataaaaatcacagcaatctctgattctgtgtaataatattgaataattttttagaaggttactgaaagctctgccttccggaatccctctaagtctgcttgatagagtggatagtgtgttaaaactgtgtactttaaaaaaaaattcaacctttacatctagaataatttgcatctcattttgcctaaattggttctgtattcataaacactttccacatagaaaatagattagtattacctgtggcaccttttaagaaagggtcaaatgtttatatgcttaagatacatagcctacttttttttcgcagttgttttctttttttaaattgagttatgacaaataaaaaattgcatatatttaaggtgtacaatatggtgttttgatatcagcattccttgtgtaatgattccacaattaaggtcaggctaattacgtatctgtcaccttgacatagttaccattttttcatgtgtggtgaaaacacttaagatctactaccttagcaaattttaagtgttcagtacattattaactatagatactgtgctctacattaaacctctagcatttattcgttttataactgaaagtttataccctttgaccaacatctccccattttccccacctctcacctggacaaccaccactgtgtttaagttcagctattttagattccacgtataaatggtatacaat

SEQ ID NO: 20308 - protein, 148 aa, Homo sapiens [sequence omitted]

SEQ ID NO: 20309 - DNA, 2525 bp, Homo sapiens
ggcccgcccccggctccatcttgcgggagaccgggttgggctgtgacgctgctgctggggtcagaatgtcatacccaggctatcccccaacaggctacccacctttccctggatatcctcctgcaggtcaggagtcatcttttcccccttctggtcagtatccttatcctagtggctttcctccaatgggaggaggtgcctacccacaagtgccaagtagtggctacccaggagctggaggctaccctgcgcctggaggttatccagcccctggaggctatcctggtgccccacagccagggggagctccatcctatcccggagttcctccaggccaaggatttggagtcccaccaggtggagcaggcttttctgggtatccacagccaccttcacagtcttatggaggtggtccagcacaggttccactacctggtggctttcctggaggacagatgccttctcagtatcctggaggacaacctacttaccctagtcagatcaatacagattctttttcttcctatcctgttttctctcctgtttctttggattatagcagtgaacctgccacagtgactcaggtcactcaaggaactatccgaccagctgccaacttcgatgctataagagatgcagaaattcttcgtaaggcaatgaagggttttgggacagatgagcaggcaattgtggatgtggtggccaaccgttccaatgatcagaggcaaaaaattaaagcagcatttaagacctcctatggcaaggatttaatcaaagatctcaaatcagagttaagtggaaatatggaagaactgatcctggccctcttcatgcctcctacgtattacgatgcctggagcttacggaaagcaatgcagggagcaggaactcaggaacgtgtattgattgagattttgtgcacaagaacaaatcaggaaatccgagaaattgtcagatgttatcagtcagaatttggacgagaccttgaaaaggacattaggtcagatacatcaggacattttgaacgtttacttgtgtccatgtgccagggaaatcgtgatgagaaccagagtataaaccaccaaatggctcaggaagatgctcagcgtctctatcaagctggtgaggggagactagggaccgatgaatcttgctttaacatgatccttgccacaagaagctttcctcagctgagagctaccatggaggcttattctaggatggctaatcgagacttgttaagcagtgtgagccgtgagttttccggatatgtagaaagtggtttgaagaccatcttgcagtgtgccctgaaccgccctgccttctttgctgagaggctctactatgctatgaaaggtgctggcacagatgactccaccctggtccggattgtggtcactcgaagtgagattgaccttgtacaaataaaacagatgttcgctcagatgtatcagaagactctgggcacaatgattgcaggtgacacgagtggagattaccgaagacttcttctggctattgtgggccagtaggagggatttttttttttttaatgaaaaaaaatttctattcatagcttatccttcagagcaatgacctgcatgcagcaatatcaaacatcagctaaccgaaagagctttctgtcaaggaccgtatcagggtaatgtgcttggtttgcacatgttgttattgccttaattctaattttattttgttctctacatacaatcaatgtaaagccatatcacaatgatacagtaatattgcaatgtttgtaaaccttcattcttactagtttcattctaatcaagatgtcaaattgaataaaaatcacagcaatctctgattctgtgtaataatattgaataattttttagaaggttactgaaagctctgccttccggaatccctctaagtctgcttgatagagtggatagtgtgttaaaactgtgtactttaaaaaaaaattcaacctttacatctagaataatttgcatctcattttgcctaaattggttctgtattcataaacactttccacatagaaaatagattagtattacctgtggcaccttttaagaaagggtcaaatgtttatatgcttaagatacatagcctacttttttttcgcagttgttttctttttttaaattgagttatgacaaataaaaaattgcatatatttaaggtgtacaatatggtgttttgatatcagcattccttgtgtaatgattccacaattaaggtcaggctaattacgtatctgtcaccttgacatagttaccattttttcatgtgtggtgaaaacacttaagatctactaccttagcaaattttaagtgttcagtacattattaactatagatactgtgctctacattaaacctctagcatttattcgttttataactgaaagtttataccctttgaccaacatctccccattttccccacctctcacctggacaaccaccactgtgtttaagttcagctattttagattccacgtataaatggtatacaat

SEQ ID NO: 20310 - protein, 488 aa, Homo sapiens; identical to SEQ ID NO: 2549

SEQ ID NO: 20311 - DNA, 2460 bp, Homo sapiens
gggcccgcccccggctccatcttgcgggagaccgggttgggctgtgacgctgctgctggggtcagaatgtcatacccaggctatcccccaacaggctacccacctttccctggatatcctcctgcaggtcaggagtcatcttttcccccttctggtcagtatccttatcctagtggctttcctccaatgggaggaggtgcctacccacaagtgccaagtagtggctacccaggagctggaggctaccctgcgcctggaggttatccagcccctggaggctatcctggtgccccacagccagggggagctccatcctatcccggagttcctccaggccaaggatttggagtcccaccaggtggagcaggcttttctgggtatccacagccaccttcacagtcttatggaggtggtccagcacaggttccactacctggtggctttcctggaggacagatgccttctcagtatcctggaggacaacctacttaccctagtcagcctgccacagtgactcaggtcactcaaggaactatccgaccagctgccaacttcgatgctataagagatgcagaaattcttcgtaaggcaatgaagggttttgggacagatgagcaggcaattgtggatgtggtggccaaccgttccaatgatcagaggcaaaaaattaaagcagcatttaagacctcctatggcaaggatttaatcaaagatctcaaatcagagttaagtggaaatatggaagaactgatcctggccctcttcatgcctcctacgtattacgatgcctggagcttacggaaagcaatgcagggagcaggaactcaggaacgtgtattgattgagattttgtgcacaagaacaaatcaggaaatccgagaaattgtcagatgttatcagtcagaatttggacgagaccttgaaaaggacattaggtcagatacatcaggacattttgaacgtttacttgtgtccatgtgccagggaaatcgtgatgagaaccagagtataaaccaccaaatggctcaggaagatgctcagcgtctctatcaagctggtgaggggagactagggaccgatgaatcttgctttaacatgatccttgccacaagaagctttcctcagctgagagctaccatggaggcttattctaggatggctaatcgagacttgttaagcagtgtgagccgtgagttttccggatatgtagaaagtggtttgaagaccatcttgcagtgtgccctgaaccgccctgccttctttgctgagaggctctactatgctatgaaaggtgctggcacagatgactccaccctggtccggattgtggtcactcgaagtgagattgaccttgtacaaataaaacagatgttcgctcagatgtatcagaagactctgggcacaatgattgcaggtgacacgagtggagattaccgaagacttcttctggctattgtgggccagtaggagggatttttttttttttaatgaaaaaaaatttctattcatagcttatccttcagagcaatgacctgcatgcagcaatatcaaacatcagctaaccgaaagagctttctgtcaaggaccgtatcagggtaatgtgcttggtttgcacatgttgttattgccttaattctaattttattttgttctctacatacaatcaatgtaaagccatatcacaatgatacagtaatattgcaatgtttgtaaaccttcattcttactagtttcattctaatcaagatgtcaaattgaataaaaatcacagcaatctctgattctgtgtaataatattgaataattttttagaaggttactgaaagctctgccttccggaatccctctaagtctgcttgatagagtggatagtgtgttaaaactgtgtactttaaaaaaaaattcaacctttacatctagaataatttgcatctcattttgcctaaattggttctgtattcataaacactttccacatagaaaatagattagtattacctgtggcaccttttaagaaagggtcaaatgtttatatgcttaagatacatagcctacttttttttcgcagttgttttctttttttaaattgagttatgacaaataaaaaattgcatatatttaaggtgtacaatatggtgttttgatatcagcattccttgtgtaatgattccacaattaaggtcaggctaattacgtatctgtcaccttgacatagttaccattttttcatgtgtggtgaaaacacttaagatctactaccttagcaaattttaagtgttcagtacattattaactatagatactgtgctctacattaaacctctagcatttattcgttttataactgaaagtttataccctttgaccaacatctccccattttccccacctctcacctggacaaccaccactgtgtttaagttcagctattttagattccacgtataaatggtatacaat

SEQ ID NO: 20312 - protein, 466 aa, Homo sapiens; identical to SEQ ID NO: 2547

SEQ ID NO: 20313 - DNA, 1255 bp, Homo sapiens
ctttatgcagagttcaaggcccagccctaccttttccagggcatgagtagaggagtaacttcctgagaaagtgtgtgtgaatccaaaggcaataatctgggaaattttttggaaatcgtgatgagaaccagagtataaaccaccaaatggctcaggaagatgctcagcgtctctatcaagctggtgaggggagactagggaccgatgaatcttgctttaacatgatccttgccacaagaagctttcctcagctgagagctaccatggaggcttattctaggatggctaatcgagacttgttaagcagtgtgagccgtgagttttccggatatgtagaaagtggtttgaagaccatcttgcagtgtgccctgaaccgccctgccttctttgctgagaggctctactatgctatgaaaggtgctggcacagatgactccaccctggtccggattgtggtcactcgaagtgagattgaccttgtacaaataaaacagatgttcgctcagatgtatcagaagactctgggcacaatgattgcaggtgacacgagtggagattaccgaagacttcttctggctattgtgggccagtaggagggatttttttttttttaatgaaaaaaaatttctattcatagcttatccttcagagcaatgacctgcatgcagcaatatcaaacatcagctaaccgaaagagctttctgtcaaggaccgtatcagggtaatgtgcttggtttgcacatgttgttattgccttaattctaattttattttgttctctacatacaatcaatgtaaagccatatcacaatgatacagtaatattgcaatgtttgtaaaccttcattcttactagtttcattctaatcaagatgtcaaattgaataaaaatcacagcaatctctgattctgtgtaataatattgaataattttttagaaggttactgaaagctctgccttccggaatccctctaagtctgcttgatagagtggatagtgtgttaaaactgtgtactttaaaaaaaaattcaacctttacatctagaataatttgcatctcattttgcctaaattggttctgtattcataaacactttccacatagaaaatagattagtattacctgtggcaccttttaagaaagggtcaaatgtttatatgcttaagatacatagcctacttttttttcgcagttgttttctttttttaaattgagttatgacaaataaaaaattgcatatatttaaggtgtac

SEQ ID NO: 20314 - protein, 148 aa, Homo sapiens [sequence omitted]

SEQ ID NO: 20315 - DNA, 2194 bp, Homo sapiens
ggcccgcccccggctccatcttgcgggagaccgggttgggctgtgacgctgctgctggggtcagaatgtcatacccaggctatcccccaacaggctacccacctttccctggatatcctcctgcaggtcaggagtcatcttttcccccttctggtcagtatccttatcctagtggctttcctccaatgggaggaggtgcctacccacaagtgccaagtagtggctacccaggagctggaggctaccctgcgcctggaggttatccagcccctggaggctatcctggtgccccacagccagggggagctccatcctatcccggagttcctccaggccaaggatttggagtcccaccaggtggagcaggcttttctgggtatccacagccaccttcacagtcttatggaggtggtccagcacaggttccactacctggtggctttcctggaggacagatgccttctcagtatcctggaggacaacctacttaccctagtcagatcaatacagattctttttcttcctatcctgttttctctcctgtttctttggattatagcagtgaacctgccacagtgactcaggtcactcaaggaactatccgaccagctgccaacttcgatgctataagagatgcagaaattcttcgtaaggcaatgaagggttttgggacagatgagcaggcaattgtggatgtggtggccaaccgttccaatgatcagaggcaaaaaattaaagcagcatttaagacctcctatggcaaggatttaatcaaagatctcaaatcagagttaagtggaaatatggaagaactgatcctggccctcttcatgcctcctacgtattacgatgcctggagcttacggaaagcaatgcagggagcaggaactcaggaacgtgtattgattgagattttgtgcacaagaacaaatcaggaaatccgagaaattgtcagatgttatcagtcagaatttggacgagaccttgaaaaggacattaggtcagatacatcaggacattttgaacgtttacttgtgtccatgtgccagggaaatcgtgatgagaaccagagtataaaccaccaaatggctcaggaagatgctcagcgtctctatcaagctggtgaggggagactagggaccgatgaatcttgctttaacatgatccttgccacaagaagctttcctcagctgagagctaccatggaggcttattctaggatggctaatcgagacttgttaagcagtgtgagccgtgagttttccggatatgtagaaagtggtttgaagaccatcttgcagtgtgccctgaaccgccctgccttctttgctgagaggctctactatgctatgaaaggtgctggcacagatgactccaccctggtccggattgtggtcactcgaagtgagattgaccttgtacaaataaaacagatgttcgctcagatgtatcagaagactctgggcacaatgattgcaggtgacacgagtggagattaccgaagacttcttctggctattgtgggccagtaggagggatttttttttttttaatgaaaaaaaatttctattcatagcttatccttcagagcaatgacctgcatgcagcaatatcaaacatcagctaaccgaaagagctttctgtcaaggaccgtatcagggtaatgtgcttggtttgcacatgttgttattgccttaattctaattttattttgttctctacatacaatcaatgtaaagccatatcacaatgatacagtaatattgcaatgtttgtaaaccttcattcttactagtttcattctaatcaagatgtcaaattgaataaaaatcacagcaatctctgattctgtgtaataatattgaataattttttagaaggttactgaaagctctgccttccggaatccctctaagtctgcttgatagagtggatagtgtgttaaaactgtgtactttaaaaaaaaattcaacctttacatctagaataatttgcatctcattttgcctaaattggttctgtattcataaacactttccacatagaaaatagattagtattacctgtggcaccttttaagaaagggtcaaatgtttatatgcttaagatacatagcctacttttttttcgcagttgttttctttttttaaattgagttatgacaaataaaaaattgcatatatttaaggtgtac

SEQ ID NO: 20316 - protein, 488 aa, Homo sapiens; identical to SEQ ID NO: 2549

SEQ ID NO: 20317 - DNA, 2129 bp, Homo sapiens
gggcccgcccccggctccatcttgcgggagaccgggttgggctgtgacgctgctgctggggtcagaatgtcatacccaggctatcccccaacaggctacccacctttccctggatatcctcctgcaggtcaggagtcatcttttcccccttctggtcagtatccttatcctagtggctttcctccaatgggaggaggtgcctacccacaagtgccaagtagtggctacccaggagctggaggctaccctgcgcctggaggttatccagcccctggaggctatcctggtgccccacagccagggggagctccatcctatcccggagttcctccaggccaaggatttggagtcccaccaggtggagcaggcttttctgggtatccacagccaccttcacagtcttatggaggtggtccagcacaggttccactacctggtggctttcctggaggacagatgccttctcagtatcctggaggacaacctacttaccctagtcagcctgccacagtgactcaggtcactcaaggaactatccgaccagctgccaacttcgatgctataagagatgcagaaattcttcgtaaggcaatgaagggttttgggacagatgagcaggcaattgtggatgtggtggccaaccgttccaatgatcagaggcaaaaaattaaagcagcatttaagacctcctatggcaaggatttaatcaaagatctcaaatcagagttaagtggaaatatggaagaactgatcctggccctcttcatgcctcctacgtattacgatgcctggagcttacggaaagcaatgcagggagcaggaactcaggaacgtgtattgattgagattttgtgcacaagaacaaatcaggaaatccgagaaattgtcagatgttatcagtcagaatttggacgagaccttgaaaaggacattaggtcagatacatcaggacattttgaacgtttacttgtgtccatgtgccagggaaatcgtgatgagaaccagagtataaaccaccaaatggctcaggaagatgctcagcgtctctatcaagctggtgaggggagactagggaccgatgaatcttgctttaacatgatccttgccacaagaagctttcctcagctgagagctaccatggaggcttattctaggatggctaatcgagacttgttaagcagtgtgagccgtgagttttccggatatgtagaaagtggtttgaagaccatcttgcagtgtgccctgaaccgccctgccttctttgctgagaggctctactatgctatgaaaggtgctggcacagatgactccaccctggtccggattgtggtcactcgaagtgagattgaccttgtacaaataaaacagatgttcgctcagatgtatcagaagactctgggcacaatgattgcaggtgacacgagtggagattaccgaagacttcttctggctattgtgggccagtaggagggatttttttttttttaatgaaaaaaaatttctattcatagcttatccttcagagcaatgacctgcatgcagcaatatcaaacatcagctaaccgaaagagctttctgtcaaggaccgtatcagggtaatgtgcttggtttgcacatgttgttattgccttaattctaattttattttgttctctacatacaatcaatgtaaagccatatcacaatgatacagtaatattgcaatgtttgtaaaccttcattcttactagtttcattctaatcaagatgtcaaattgaataaaaatcacagcaatctctgattctgtgtaataatattgaataattttttagaaggttactgaaagctctgccttccggaatccctctaagtctgcttgatagagtggatagtgtgttaaaactgtgtactttaaaaaaaaattcaacctttacatctagaataatttgcatctcattttgcctaaattggttctgtattcataaacactttccacatagaaaatagattagtattacctgtggcaccttttaagaaagggtcaaatgtttatatgcttaagatacatagcctacttttttttcgcagttgttttctttttttaaattgagttatgacaaataaaaaattgcatatatttaaggtgtac

SEQ ID NO: 20318 - protein, 466 aa, Homo sapiens; identical to SEQ ID NO: 2547

SEQ ID NO: 20319 - DNA, 1046 bp, Homo sapiens
ctttatgcagagttcaaggcccagccctaccttttccagggcatgagtagaggagtaacttcctgagaaagtgtgtgtgaatccaaaggcaataatctgggaaattttttggaaatcgtgatgagaaccagagtataaaccaccaaatggctcaggaagatgctcagcgtctctatcaagctggtgaggggagactagggaccgatgaatcttgctttaacatgatccttgccacaagaagctttcctcagctgagagctaccatggaggcttattctaggatggctaatcgagacttgttaagcagtgtgagccgtgagttttccggatatgtagaaagtggtttgaagaccatcttgcagtgtgccctgaaccgccctgccttctttgctgagaggctctactatgctatgaaaggtgctggcacagatgactccaccctggtccggattgtggtcactcgaagtgagattgaccttgtacaaataaaacagatgttcgctcagatgtatcagaagactctgggcacaatgattgcaggtgacacgagtggagattaccgaagacttcttctggctattgtgggccagtaggagggatttttttttttttaatgaaaaaaaatttctattcatagcttatccttcagagcaatgacctgcatgcagcaatatcaaacatcagctaaccgaaagagctttctgtcaaggaccgtatcagggtaatgtgcttggtttgcacatgttgttattgccttaattctaattttattttgttctctacatacaatcaatgtaaagccatatcacaatgatacagtaatattgcaatgtttgtaaaccttcattcttactagtttcattctaatcaagatgtcaaattgaataaaaatcacagcaatctctgattctgtgtaataatattgaataattttttagaaggttactgaaagctctgccttccggaatccctctaagtctgcttgatagagtggatagtgtgttaaaactgtgtactttaaaaaaaaattcaacctttacatctag

SEQ ID NO: 20320 - protein, 148 aa, Homo sapiens [sequence omitted]

SEQ ID NO: 20321 - DNA, 1920 bp, Homo sapiens
gggcccgcccccggctccatcttgcgggagaccgggttgggctgtgacgctgctgctggggtcagaatgtcatacccaggctatcccccaacaggctacccacctttccctggatatcctcctgcaggtcaggagtcatcttttcccccttctggtcagtatccttatcctagtggctttcctccaatgggaggaggtgcctacccacaagtgccaagtagtggctacccaggagctggaggctaccctgcgcctggaggttatccagcccctggaggctatcctggtgccccacagccagggggagctccatcctatcccggagttcctccaggccaaggatttggagtcccaccaggtggagcaggcttttctgggtatccacagccaccttcacagtcttatggaggtggtccagcacaggttccactacctggtggctttcctggaggacagatgccttctcagtatcctggaggacaacctacttaccctagtcagcctgccacagtgactcaggtcactcaaggaactatccgaccagctgccaacttcgatgctataagagatgcagaaattcttcgtaaggcaatgaagggttttgggacagatgagcaggcaattgtggatgtggtggccaaccgttccaatgatcagaggcaaaaaattaaagcagcatttaagacctcctatggcaaggatttaatcaaagatctcaaatcagagttaagtggaaatatggaagaactgatcctggccctcttcatgcctcctacgtattacgatgcctggagcttacggaaagcaatgcagggagcaggaactcaggaacgtgtattgattgagattttgtgcacaagaacaaatcaggaaatccgagaaattgtcagatgttatcagtcagaatttggacgagaccttgaaaaggacattaggtcagatacatcaggacattttgaacgtttacttgtgtccatgtgccagggaaatcgtgatgagaaccagagtataaaccaccaaatggctcaggaagatgctcagcgtctctatcaagctggtgaggggagactagggaccgatgaatcttgctttaacatgatccttgccacaagaagctttcctcagctgagagctaccatggaggcttattctaggatggctaatcgagacttgttaagcagtgtgagccgtgagttttccggatatgtagaaagtggtttgaagaccatcttgcagtgtgccctgaaccgccctgccttctttgctgagaggctctactatgctatgaaaggtgctggcacagatgactccaccctggtccggattgtggtcactcgaagtgagattgaccttgtacaaataaaacagatgttcgctcagatgtatcagaagactctgggcacaatgattgcaggtgacacgagtggagattaccgaagacttcttctggctattgtgggccagtaggagggatttttttttttttaatgaaaaaaaatttctattcatagcttatccttcagagcaatgacctgcatgcagcaatatcaaacatcagctaaccgaaagagctttctgtcaaggaccgtatcagggtaatgtgcttggtttgcacatgttgttattgccttaattctaattttattttgttctctacatacaatcaatgtaaagccatatcacaatgatacagtaatattgcaatgtttgtaaaccttcattcttactagtttcattctaatcaagatgtcaaattgaataaaaatcacagcaatctctgattctgtgtaataatattgaataattttttagaaggttactgaaagctctgccttccggaatccctctaagtctgcttgatagagtggatagtgtgttaaaactgtgtactttaaaaaaaaattcaacctttacatctag

SEQ ID NO: 20322 - protein, 466 aa, Homo sapiens; identical to SEQ ID NO: 2547

SEQ ID NO: 20323 - DNA, 915 bp, Homo sapiens
ctttatgcagagttcaaggcccagccctaccttttccagggcatgagtagaggagtaacttcctgagaaagtgtgtgtgaatccaaaggcaataatctgggaaattttttggaaatcgtgatgagaaccagagtataaaccaccaaatggctcaggaagatgctcagcgtctctatcaagctggtgaggggagactagggaccgatgaatcttgctttaacatgatccttgccacaagaagctttcctcagctgagagctaccatggaggcttattctaggatggctaatcgagacttgttaagcagtgtgagccgtgagttttccggatatgtagaaagtggtttgaagaccatcttgcagtgtgccctgaaccgccctgccttctttgctgagaggctctactatgctatgaaaggtgctggcacagatgactccaccctggtccggattgtggtcactcgaagtgagattgaccttgtacaaataaaacagatgttcgctcagatgtatcagaagactctgggcacaatgattgcaggtgacacgagtggagattaccgaagacttcttctggctattgtgggccagtaggagggatttttttttttttaatgaaaaaaaatttctattcatagcttatccttcagagcaatgacctgcatgcagcaatatcaaacatcagctaaccgaaagagctttctgtcaaggaccgtatcagggtaatgtgcttggtttgcacatgttgttattgccttaattctaattttattttgttctctacatacaatcaatgtaaagccatatcacaatgatacagtaatattgcaatgtttgtaaaccttcattcttactagtttcattctaatcaagatgtcaaattgaataaaaatcacagcaatctctgattctgtgt

SEQ ID NO: 20324 - protein, 148 aa, Homo sapiens [sequence omitted]

SEQ ID NO: 20325 - DNA, 1789 bp, Homo sapiens
gggcccgcccccggctccatcttgcgggagaccgggttgggctgtgacgctgctgctggggtcagaatgtcatacccaggctatcccccaacaggctacccacctttccctggatatcctcctgcaggtcaggagtcatcttttcccccttctggtcagtatccttatcctagtggctttcctccaatgggaggaggtgcctacccacaagtgccaagtagtggctacccaggagctggaggctaccctgcgcctggaggttatccagcccctggaggctatcctggtgccccacagccagggggagctccatcctatcccggagttcctccaggccaaggatttggagtcccaccaggtggagcaggcttttctgggtatccacagccaccttcacagtcttatggaggtggtccagcacaggttccactacctggtggctttcctggaggacagatgccttctcagtatcctggaggacaacctacttaccctagtcagcctgccacagtgactcaggtcactcaaggaactatccgaccagctgccaacttcgatgctataagagatgcagaaattcttcgtaaggcaatgaagggttttgggacagatgagcaggcaattgtggatgtggtggccaaccgttccaatgatcagaggcaaaaaattaaagcagcatttaagacctcctatggcaaggatttaatcaaagatctcaaatcagagttaagtggaaatatggaagaactgatcctggccctcttcatgcctcctacgtattacgatgcctggagcttacggaaagcaatgcagggagcaggaactcaggaacgtgtattgattgagattttgtgcacaagaacaaatcaggaaatccgagaaattgtcagatgttatcagtcagaatttggacgagaccttgaaaaggacattaggtcagatacatcaggacattttgaacgtttacttgtgtccatgtgccagggaaatcgtgatgagaaccagagtataaaccaccaaatggctcaggaagatgctcagcgtctctatcaagctggtgaggggagactagggaccgatgaatcttgctttaacatgatccttgccacaagaagctttcctcagctgagagctaccatggaggcttattctaggatggctaatcgagacttgttaagcagtgtgagccgtgagttttccggatatgtagaaagtggtttgaagaccatcttgcagtgtgccctgaaccgccctgccttctttgctgagaggctctactatgctatgaaaggtgctggcacagatgactccaccctggtccggattgtggtcactcgaagtgagattgaccttgtacaaataaaacagatgttcgctcagatgtatcagaagactctgggcacaatgattgcaggtgacacgagtggagattaccgaagacttcttctggctattgtgggccagtaggagggatttttttttttttaatgaaaaaaaatttctattcatagcttatccttcagagcaatgacctgcatgcagcaatatcaaacatcagctaaccgaaagagctttctgtcaaggaccgtatcagggtaatgtgcttggtttgcacatgttgttattgccttaattctaattttattttgttctctacatacaatcaatgtaaagccatatcacaatgatacagtaatattgcaatgtttgtaaaccttcattcttactagtttcattctaatcaagatgtcaaattgaataaaaatcacagcaatctctgattctgtgt

SEQ ID NO: 20326 - protein, 466 aa, Homo sapiens; identical to SEQ ID NO: 2547

SEQ ID NO: 20327 - DNA, 401 bp, Homo sapiens
tacagtggtaattaaagcaattctttatttcacatcatccatctgaatatatagtttttagttctacagaacaaagaaatatttgacgaagatttaattacttgcagaaatttcatttttctttgtataatcttcccttcatttcatgtagggagcaggaactcaggaacgtgtattgattgagattttgtgcacaagaacaaatcaggaaatccgagaaattgtcagatgttatcagtcagaatttggacgagaccttttcctgtgttatattcagtcgcccatgtagaatgtgcctctacgtattccttgtgccagttgctcagaagacagttcttcagcttcaaggaggatttttccatcttattccaaagatggtccctgagactctaaaaggcagc

SEQ ID NO: 20328 - protein, 54 aa, Homo sapiens
MLSVRIWTRPFPVLYSVAHVECASTYSLCQLLRRQFFSFKEDFSILFQRWSLRL

SEQ ID NO: 20329 - DNA, 405 bp, Homo sapiens
tcagatttttttttcctttattttgaccctgacccttttgcccttggtctatctacttttctttttctttctttttttttttctttttccttgtcttgtcttgtcttttctttcaactggagtgcaatgatgcaaacacgactcactgccgccttgacctcctggcctcaagcaattctcccacctcagcttcctgaatagtttggactacagaatgtcatacccaggctatcccccaacaggctacccacctttccctggatatcctcctgcaggtcaggagtcatcttttcccccttctggtcagtatccttatcctagtggctttcctccaatgggaggaggtgcctacccacaagtgccaagtagtggctacccaggagctggaggctaccctgcgcctgg

SEQ ID NO: 20330 - protein, 62 aa, Homo sapiens
MSYPGYPPTGYPPFPGYPPAGQESSFPPSGQYPYPSGFPPMGGGAYPQVPSSGYPGAGGYPA

SEQ ID NO: 20331 - DNA, 1992 bp, Homo sapiens
atttcacttggaggaaagagagaaggaaggaagctgaggacttagcagggtatcactggacaggccatggctccacggtcccggcgacgaaggcacaagaaacctccctcatcagtggctcccatcatcatggccccaaccacaattgtgacccctgtgcctctgaccccctcaaaacctggccctagcattgacacacttggcttcttctccttggatgataatgttcctggcctatcgcagctgatccttcaaaagctgaacatgaaaagctatgaagaatataagttggtggtagatgggggtacccccgtatcaggctttggatttcgatgtcctcaagaaatgttccagaggatggaagacacatttcgattctgtgctcactgtagagcactccctagtgggctttcagactccaaggttctccggcactgtaagaggtgcagaaatgtctattactgtggtccagagtgccagaagtcagactggcccgcacacaggagggtttgtcaagagcttcgtcttgtggctgtggaccgtctcatggaatggcttctggtcacagagcacctcaacttcacccctggaacctggcacaattcagcttagtgcccacaggggcctctaccatgacttctgggaggagcaagtagagaccgggcagacacaccatccagatttggtggcggcattccatccaggttttcattcctccccagacttgatggaggcttggctgcccaccctgctgctacttcgtgactataagattcctacattgattactgtttacagccatcaggagttggtatcctctttgcagattctggtggaactggatacacacatcactgcctttgggtctaatcctttcatgtccctcaaacctgaacaggtctattccagtcccaacaagcagccagtatactgcagtgcatactatatcatgtttcttggaagctcctgtcagctggataataggcaattagaagagaaagtggacggcgggatttaaatagatcataactggacatctggaaaacggggagtttgtgatgaaattaccctgctaatgccaggttcttgcaaactttgaaaaacattatattctaaacctcatttactgtttgggtaaaaattctaagctgaatgagagtttctgtataacataactggtttctttctttttttgagatggagtcttgctctgttgcccaggctggagtgcagcggcatgatctcgactcactgcagcctccgcctcctgggttcaagtggttctcctgcctcagcctccctagtagctgggattacaggtgcacaccaccacacctggctaatttttgtatttttagcagacagggtttcaccatgttggccaggctcgtatcaaacccttgaccccaggtgatctgcctgcctcagcctcccaaagttctgggattacaggcatgagccaccatgcccagccaatgtaactggtttctaagagtttagccacagtagcttctagagataggaaattagatttagtgggtgggaagaggccctgatgctggtctttccagagcttatagttgctaacacttttctttgtaaagaagtttaccttttgactggaaccagatggcactgagaaaaagaatgagaaccaccttattcttctgaaaaagactttcttctcatccagtaatttgggctaaaaaatggaaagatgttgatgacttgaagtgatgcaagaatggacaagtcagggaagtcattgggaacatggatgaggttgtaagcattggtacagtgtcctgtttcctgacttttttgagagaaatgtctacttttcctgttttctcttggggacttttgaccctagagtagccctggtgttatattttagatatcccaagctatatcagactttacctgaatatactggagttacttattatcccccattctataccccaataaactcagtttggggcttcttaa

SEQ ID NO: 20332 - protein, 239 aa, Homo sapiens
MGVPPYQALDFDVLKKCSRGWKTHFDSVLTVEHSLVGFQTPRFSGTVRGAEMSITVVQSARSQTGPHTGGFVKSFVLWLWTVSWNGFWSQSTSTSPLEPGTIQLSAHRGLYHDFWEEQVETGQTHHPDLVAAFHPGFHSSPDLMEAWLPTLLLLRDYKIPTLITVYSHQELVSSLQILVELDTHITAFGSNPFMSLKPEQVYSSPNKQPVYCSAYYIMFLGSSCQLDNRQLEEKVDGGI

SEQ ID NO: 20333 - DNA, 3547 bp, Homo sapiens
agggacagctgcaagtaagccacaacctagatctgaagagatcaagcactcatttcacttggaggaaagagagaaggaaggaagctgaggacttagcagggtatcactggacaggccatggctccacggtcccggcgacgaaggcacaagaaacctccctcatcagtggctcccatcatcatggccccaaccacaattgtgacccctgtgcctctgaccccctcaaaacctggccctagcattgacacacttggcttcttctccttggatgataatgttcctggcctatcgcagctgatccttcaaaagctgaacatgaaaagctatgaagaatataagttggtggtagatgggggtacccccgtatcaggctttggatttcgatgtcctcaagaaatgttccagaggatggaagacacatttcgattctgtgctcactgtagagcactccctagtgggctttcagactccaaggttctccggcactgtaagaggtgcagaaatgtctattactgtggtccagagtgccagaagtcagactggcccgcacacaggagggtttgtcaagagcttcgtcttgtggctgtggaccgtctcatggaatggcttctggtcacaggtggagtggtggtgttgaggatctctgccataatggtcatagttgattgcatttaaaggaagatacaaaatcatattgttatgaaaaaatgaggaagtggggcaaaggatggggcacgcctgctcacaggtgattttgttctaccctcaggaccttggccatggccacctgaagctgtacaggactgggactcctggttttctatgaaggggttacacctagatgctacattggatgctgtgctagttagtcatgctgtgaccaccttatgggccagtgtaggacggccaaggccagacccggatgtcctgcagggatctttgaagcggctgctgacagatgtcctgtcacggcccttgactctaggcctaggacttagggccttggggatagatgttaggaggactgggggaagcacagtgcatgtggttggtgcttcccatgtggagacatttcttactcgcccaggggactatgatgagcttggttacatgtttcctgggcaccttggactccgtgtggtcatggtgggtgtagatgtagctactggcttttcacagagcacctcaacttcacccctggaacctggcacaattcagcttagtgcccacaggggcctctaccatgacttctgggaggagcaagtagagaccgggcagacacaccatccagatttggtggcggcattccatccaggtaagagtcattggttcaggggaatagagggtggctcccctgagaattttccatcctgaatcttctgtctttggaaccccattcatttggtctcattaaacacaatatgatgacaacttttctttttttttttttctttttttttttttgagacggagtctcgctctgtcgcccaggctggagtgcagtggcgcgatctcggctcactgcaagctccacctcccgggttcacgccattctcctgcctcagcctcccgagtagctgggactacaggcgcctggctaattttttgtatttttagtagaggcggggtttcactgtgttagccacgatgatctcgatctcctgaccttatgatccgcccgcctctgcctcccaaagtgctgggattacaggcgtgagccaccgcgcccagcctgatgacaacttttcttgataatttgccatatgtactacacttgggttcagaatttttcattgaagagtggatgatgatgatgatgataatgactggggataagcaaggtgaggggtggggtgctcacagtcaaagaaatatcttgctcttagggtctgctttagtctttccctattcccattttcatttttgttccacaggttttcattcctccccagacttgatggaggcttggctgcccaccctgctgctacttcgtgactataagattcctacattgattactgtttacaggttttgacctcatcctatttgtgatacttccctgactttacatctctctttatatagatgagctcatttttgcccccctcttgctcatctaccttctggtgaggatgttcttttccgcatatggcttttttatccccttggaacagtcctttgctagttaatggaatatttaatgagacatttgggagggaaagatagcccttgcctagtccagccttaggcaatttgggggatgggtgattacagaaatgtcaggctcttgggcagtttttcctttatctctgtcacaatcagtagagtaatttttcttctctctcttctacagccatcaggagttggtatcctctttgcagattctggtggaactggatacacacatcactgcctttgggtctaatcctttcatgtccctcaaacctgaacaggtctattccagtcccaacaagcagccagtatactgcagtgcatactatatcatgtttcttggaagctcctgtcagctggataataggcaattagaagagaaagtggacggcgggatttaaatagatcataactggacatctggaaaacggggagtttgtgatgaaattaccctgctaatgccaggttcttgcaaactttgaaaaacattatattctaaacctcatttactgtttgggtaaaaattctaagctgaatgagagtttctgtataacataactggtttctttctttttttgagatggagtcttgctctgttgcccaggctggagtgcagcggcatgatctcgactcactgcagcctccgcctcctgggttcaagtggttctcctgcctcagcctccctagtagctgggattacaggtgcacaccaccacacctggctaatttttgtatttttagcagacagggtttcaccatgttggccaggctcgtatcaaacccttgaccccaggtgatctgcctgcctcagcctcccaaagttctgggattacaggcatgagccaccatgcccagccaatgtaactggtttctaagagtttagccacagtagcttctagagataggaaattagatttagtgggtgggaagaggccctgatgctggtctttccagagcttatagttgctaacacttttctttgtaaagaagtttaccttttgactggaaccagatggcactgagaaaaagaatgagaaccaccttattcttctgaaaaagactttcttctcatccagtaatttgggctaaaaaatggaaagatgttgatgacttgaagtgatgcaagaatggacaagtcagggaagtcattgggaacatggatgaggttgtaagcattggtacagtgtcctgtttcctgacttttttgagagaaatgtctacttttcctgttttctcttggggacttttgaccctagagtagccctggtgttatattttagatatcccaagctatatcagactttacctgaatatactggagttacttattatcccccattctataccccaataaactcagtttggggcttcttaa

SEQ ID NO: 20334 - protein, 185 aa, Homo sapiens [sequence omitted]

SEQ ID NO: 20335 - DNA, 409 bp, Homo sapiens
gaatataagttggtggtagatgggggtacccccgtatcaggctttggatttcgatgtcctcaagaaatgttccagaggatggaagacacatttcgattctgtgctcactgtagagcactccctagtgggctttcagactccaaggttctccggcactgtaagaggtgcagaaatgtctattactgtggtccagagtgccagaagtcagactggcccgcacacaggagggtttgtcaagagcttcgtcttgtggctgtggaccgtctcatggaatggcttctggtcacaggtgattttgttctaccctcaggaccttggccatggccacctgaagctgtacaggactgggactcctggttttctatgaaggggttacacctagatgctacattggatgctgtgctagtta

SEQ ID NO: 20336 - protein, 115 aa, Homo sapiens
MGVPPYQALDFDVLKKCSRGWKTHFDSVLTVEHSLVGFQTPRFSGTVRGAEMSITVVQSARSQTGPHTGGFVKSFVLWLWTVSWNGFWSQVILFYPQDLGHGHLKLYRTGTPGFL

SEQ ID NO: 20337 - DNA, 3504 bp, Homo sapiens
gtagggaaagagggtccgccatgttccccggcggcgccgccgcttggctctggtagccgccgcccccgcccccaaccccgcccggcccagagcctagccgagccccgggcccagcatggccgccccggagccggcccgggctgcaccgcccccacccccgcccccgccgccccctcccggggctgaccgcgtcgtcaaagctgtccctttccccccaacacatcgcttgacatctgaagaagtatttgatttggatgggatacccagggttgatgttctgaagaaccacttggtgaaagaaggtcgagtagatgaagaaattgcgcttagaattatcaatgagggtgctgccatccttcggagagagaaaaccatgatagaagtagaagctccaatcacagtgtgtggtgacatccatggccaattttttgatctgatgaaactttttgaagtaggaggatcacctgctaatacacgatacctttttcttggcgattatgtggacagaggttattttagtatagagtgtgtcttatatttatgggttctgaagattctatacccaagcacattatttcttctgagaggcaaccatgaatgcagacaccttactgaatattttacctttaagcaggaatgtaaaattaagtattcggaaagagtctatgaagcttgtatggaagcttttgatagtttgcctcttgctgcacttttaaaccaacagtttctttgtgttcatggtggactttcaccagaaatacacacactggatgatattaggagattagatagattcaaagagccacctgcatttggaccaatgtgtgacttgttatggtccgatccttctgaagattttggaaatgaaaaatcacaggaacattttagtcacaatacagttcgaggatgttcttatttttataactatccagcagtgtgtgaatttttgcaaaacaataatttgttatcgattattagagctcatgaagctcaagatgcaggctatagaatgtacagaaaaagtcaaactacagggttcccttcattaataacaattttttcggcacctaattacttagatgtctacaataataaagctgctgtattaaagtatgaaaataatgtgatgaatattcgacagtttaactgttctccacatccttactggttgcctaattttatggatgtcttcacgtggtctttaccgtttgttggagaaaaagtgacagaaatgttggtaaatgttctgagtatttgctctgatgatgaactaatgactgaaggtgaagaccagtttgatggttcagctgcagcccggaaagaaatcataagaaacaaaattcgagcaattggcaagatggcaagagtcttctctgttctcagggaggagagtgaaagtgtgctgacactcaagggcctgactcccacagggatgttgcctagtggagtgttagctggaggacggcagaccctgcaaagtgccacagttgaggctattgaggctgaaaaagcaatacgaggattctctccaccacatagaatctgcagttttgaagaggcaaagggtttggataggatcaatgagagaatgccacctcggaaagatgctgtacagcaagatggtttcaattctctgaacaccgcacatgccactgagaaccacgggacgggcaaccatactgcccagtgacccactacttcccagggactctcacatctcgggccccaaatggacagatcacccgaggagctggaggggtcggccaagctgactgtaaatttcacagtctctctgaagaaaccattgtgcttctgagaccctagcccccttcctggatggaggcttgagggccctgggacatgtgctatctgataagattgggtcatcgctgccaaggtggagagcagtgagcaaggggcttggggcaatttccagtggagggcatccacacctccattttatgcttgtggttcacacatttaagtttacaaatcagatttcttttccccttcagtagaattagattttgtttttcaatcatgatttcaaatgcaatcctaagagctaatgtggacttttctttttccatgaaatgtctttaaaggatgaattagcatggtcttaaaatacatttctgaggttactagctgtattttgaattgtgagcaaaatgccgagaaacccagttggcatttatacaaaatgttgacctcaggtctatagttcttaaatgtggctaattctgtaacatagtcttggtattttttaattatgaatgcatatcctatttccaggcaggctctcttacttgaacacaaatccaaaaactaatttagagtcttttttgcccagatcttttaagacttacaccccagagatttaagaagaaaacctctaaatttcaaaattatgaagaattacagaattactcatttaaggtactttaaaagaagtttgtacattgtcaaagtaaattttaattcaaatcatgtctgtaaaacttgacgtattttgtgtatgcatgttttcattttgcaaatatttaatatatagacctatgatgtacaggtacgacatgtataggttacctagatgttatgagaaattttagtttattgtgagtactcaagttgcttagagagccaccagggtgatttgctgctggctttctatcatttttatgttttaatgcaaaggaaattttaaaatgttctggaagtgtttttgattaagcaatgcagcctagaagcaatggttctgttcaatcattcagatgttagtggaagcataaaagtcaagactgcatgttgaaacctttcttttgatagttactgaactgcttggttaaactaaatggaaccatgtgctaatttttcacaattattgacctgtattgattgccactgtagtttggtatttccctttactttggtggcctgcttccctcatgccctggaatacaactcagagctccaggcagcggaaccatctattgttttgtttgccagaaagtgcaccctgtatggtctcctgtctaagttggaaatattatgcatgtgcaggactattcgagtattttataaacagtagcacacaataaattccatgcatgggccgctgctcctatctctgtgttgggttttatttggaagatgcaatctgatttgtccttttgatgcaaatcagaaaatcctgttactagagctgggatgtcctccggagattatctcgtggatagttcatggtaatttgattaattaaattctttataaattttgccttaaaaaaaacttttgttatatacttgttttacatgagcattagtaactgagcactagaggactttgaatgcctactgtaggcctcctaagtctaatatttaagatcactgtttattgtcttttaattgaaagaaaatatgttattgtctagaattttgttatagtggtattgggaatttactgggtgttctaacaataagaaaaatattagtgataattgca

SEQ ID NO: 20338 - protein, 524 aa, Homo sapiens; identical to SEQ ID NO: 2553

SEQ ID NO: 20339 - DNA, 3474 bp, Homo sapiens
gtagggaaagagggtccgccatgttccccggcggcgccgccgcttggctctggtagccgccgcccccgcccccaaccccgcccggcccagagcctagccgagccccgggcccagcatggccgccccggagccggcccgggctgcaccgcccccacccccgcccccgccgccccctcccggggctgaccgcgtcgtcaaagctgtccctttccccccaacacatcgcttgacatctgaagaagtatttgatttggatgggatacccagggttgatgttctgaagaaccacttggtgaaagaaggtcgagtagatgaagaaattgcgcttagaattatcaatgagggtgctgccatccttcggagagagaaaaccatgatagaagtagaagctccaatcacagtgtgtggtgacatccatggccaattttttgatctgatgaaactttttgaagtaggaggatcacctgctaatacacgatacctttttcttggcgattatgtggacagaggttattttagtatagagtgtgtcttatatttatgggttctgaagattctatacccaagcacattatttcttctgagaggcaaccatgaatgcagacaccttactgaatattttacctttaagcaggaatgtaaaattaagtattcggaaagagtctatgaagcttgtatggaagcttttgatagtttgcctcttgctgcacttttaaaccaacagtttctttgtgttcatggtggactttcaccagaaatacacacactggatgatattaggagattagatagattcaaagagccacctgcatttggaccaatgtgtgacttgttatggtccgatccttctgaagattttggaaatgaaaaatcacaggaacattttagtcacaatacagttcgaggatgttcttatttttataactatccagcagtgtgtgaatttttgcaaaacaataatttgttatcgattattagagctcatgaagctcaagatgcaggctatagaatgtacagaaaaagtcaaactacagggttcccttcattaataacaattttttcggcacctaattacttagatgtctacaataataaagctgctgtattaaagtatgaaaataatgtgatgaatattcgacagtttaactgttctccacatccttactggttgcctaattttatggatgtcttcacgtggtctttaccgtttgttggagaaaaagtgacagaaatgttggtaaatgttctgagtatttgctctgatgatgaactaatgactgaaggtgaagaccagtttgatggttcagctgcagcccggaaagaaatcataagaaacaaaattcgagcaattggcaagatggcaagagtcttctctgttctcagggaggagagtgaaagtgtgctgacactcaagggcctgactcccacagggatgttgcctagtggagtgttagctggaggacggcagaccctgcaaagtgcaatacgaggattctctccaccacatagaatctgcagttttgaagaggcaaagggtttggataggatcaatgagagaatgccacctcggaaagatgctgtacagcaagatggtttcaattctctgaacaccgcacatgccactgagaaccacgggacgggcaaccatactgcccagtgacccactacttcccagggactctcacatctcgggccccaaatggacagatcacccgaggagctggaggggtcggccaagctgactgtaaatttcacagtctctctgaagaaaccattgtgcttctgagaccctagcccccttcctggatggaggcttgagggccctgggacatgtgctatctgataagattgggtcatcgctgccaaggtggagagcagtgagcaaggggcttggggcaatttccagtggagggcatccacacctccattttatgcttgtggttcacacatttaagtttacaaatcagatttcttttccccttcagtagaattagattttgtttttcaatcatgatttcaaatgcaatcctaagagctaatgtggacttttctttttccatgaaatgtctttaaaggatgaattagcatggtcttaaaatacatttctgaggttactagctgtattttgaattgtgagcaaaatgccgagaaacccagttggcatttatacaaaatgttgacctcaggtctatagttcttaaatgtggctaattctgtaacatagtcttggtattttttaattatgaatgcatatcctatttccaggcaggctctcttacttgaacacaaatccaaaaactaatttagagtcttttttgcccagatcttttaagacttacaccccagagatttaagaagaaaacctctaaatttcaaaattatgaagaattacagaattactcatttaaggtactttaaaagaagtttgtacattgtcaaagtaaattttaattcaaatcatgtctgtaaaacttgacgtattttgtgtatgcatgttttcattttgcaaatatttaatatatagacctatgatgtacaggtacgacatgtataggttacctagatgttatgagaaattttagtttattgtgagtactcaagttgcttagagagccaccagggtgatttgctgctggctttctatcatttttatgttttaatgcaaaggaaattttaaaatgttctggaagtgtttttgattaagcaatgcagcctagaagcaatggttctgttcaatcattcagatgttagtggaagcataaaagtcaagactgcatgttgaaacctttcttttgatagttactgaactgcttggttaaactaaatggaaccatgtgctaatttttcacaattattgacctgtattgattgccactgtagtttggtatttccctttactttggtggcctgcttccctcatgccctggaatacaactcagagctccaggcagcggaaccatctattgttttgtttgccagaaagtgcaccctgtatggtctcctgtctaagttggaaatattatgcatgtgcaggactattcgagtattttataaacagtagcacacaataaattccatgcatgggccgctgctcctatctctgtgttgggttttatttggaagatgcaatctgatttgtccttttgatgcaaatcagaaaatcctgttactagagctgggatgtcctccggagattatctcgtggatagttcatggtaatttgattaattaaattctttataaattttgccttaaaaaaaacttttgttatatacttgttttacatgagcattagtaactgagcactagaggactttgaatgcctactgtaggcctcctaagtctaatatttaagatcactgtttattgtcttttaattgaaagaaaatatgttattgtctagaattttgttatagtggtattgggaatttactgggtgttctaacaataagaaaaatattagtgataattgca

SEQ ID NO: 20340 - protein, 514 aa, Homo sapiens
MAAPEPARAAPPPPPPPPPPPGADRVVKAVPFPPTHRLTSEEVFDLDGIPRVDVLKNHLVKEGRVDEEIALRIINEGAAILRREKTMIEVEAPITVCGDIHGQFFDLMKLFEVGGSPANTRYLFLGDYVDRGYFSIECVLYLWVLKILYPSTLFLLRGNHECRHLTEYFTFKQECKIKYSERVYEACMEAFDSLPLAALLNQQFLCVHGGLSPEIHTLDDIRRLDRFKEPPAFGPMCDLLWSDPSEDFGNEKSQEHFSHNTVRGCSYFYNYPAVCEFLQNNNLLSIIRAHEAQDAGYRMYRKSQTTGFPSLITIFSAPNYLDVYNNKAAVLKYENNVMNIRQFNCSPHPYWLPNFMDVFTWSLPFVGEKVTEMLVNVLSICSDDELMTEGEDQFDGSAAARKEIIRNKIRAIGKMARVFSVLREESESVLTLKGLTPTGMLPSGVLAGGRQTLQSAIRGFSPPHRICSFEEAKGLDRINERMPPRKDAVQQDGFNSLNTAHATENHGTGNHTAQ

SEQ ID NO: 20341 - DNA, 3126 bp, Homo sapiens
gtagggaaagagggtccgccatgttccccggcggcgccgccgcttggctctggtagccgccgcccccgcccccaaccccgcccggcccagagcctagccgagccccgggcccagcatggccgccccggagccggcccgggctgcaccgcccccacccccgcccccgccgccccctcccggggctgaccgcgtcgtcaaagctgtccctttccccccaacacatcgcttgacatctgaagaagtatttgatttggatgggatacccagggttgatgttctgaagaaccacttggtgaaagaaggtcgagtagatgaagaaattgcgcttagaattatcaatgagggtgctgccatccttcggagagagaaaaccatgatagaagtagaagctccaatcacagtgtgtggtgacatccatggccaattttttgatctgatgaaactttttgaagtaggaggatcacctgctaatacacgatacctttttcttggcgattatgtggacagaggttattttagtatagagtgtgtcttatatttatgggttctgaagattctatacccaagcacattatttcttctgagaggcaaccatgaatgcagacaccttactgaatattttacctttaagcaggaatgtaaaattaagtattcggaaagagtctatgaagcttgtatggaagcttttgatagtttgcctcttgctgcacttttaaaccaacagtttctttgtgttcatggtggactttcaccagaaatacacacactggatgatattaggagattagatagattcaaagagccacctgcatttggaccaatgtgtgacttgttatggtccgatccttctgaagattttggaaatgaaaaatcacaggaacattttagtcacaatacagttcgaggatgttcttatttttataactatccagcagtgtgtgaatttttgcaaaacaataatttgttatcgattattagagctcatgaagctcaagatgcaggctatagaatgtacagaaaaagtcaaactacagggttcccttcattaataacaattttttcggcacctaattacttagatgtctacaataataaagctgctgtattaaagtatgaaaataatgtgatgaatattcgacagtttaactgttctccacatccttactggttgcctaattttatggatgtcttcacgtggtctttaccgtttgttggagaaaaagtgacagaaatgttggtaaatgttctgagtatttgctctgatgatgaactaatgactgaaggtgaagaccagtttgatggttcagctgcagcccggaaagaaatcataagaaacaaaattcgagcaattggcaagatggcaagagtcttctctgttctcagggaggagagtgaaagtgtgctgacactcaagggcctgactcccacagggatgttgcctagtggagtgttagctggaggacggcagaccctgcaaagtgccacagttgaggctattgaggctgaaaaagcaatacgaggattctctccaccacatagaatctgcagttttgaagaggcaaagggtttggataggatcaatgagagaatgccacctcggaaagatgctgtacagcaagatggtttcaattctctgaacaccgcacatgccactgagaaccacgggacgggcaaccatactgcccagtgacccactacttcccagggactctcacatctcgggccccaaatggacagatcacccgaggagctggaggggtcggccaagctgactgtaaatttcacagtctctctgaagaaaccattgtgcttctgagaccctagcccccttcctggatggaggcttgagggccctgggacatgtgctatctgataagattgggtcatcgctgccaaggtggagagcagtgagcaaggggcttggggcaatttccagtggagggcatccacacctccattttatgcttgtggttcacacatttaagtttacaaatcagatttcttttccccttcagtagaattagattttgtttttcaatcatgatttcaaatgcaatcctaagagctaatgtggacttttctttttccatgaaatgtctttaaaggatgaattagcatggtcttaaaatacatttctgaggttactagctgtattttgaattgtgagcaaaatgccgagaaacccagttggcatttatacaaaatgttgacctcaggtctatagttcttaaatgtggctaattctgtaacatagtcttggtattttttaattatgaatgcatatcctatttccaggcaggctctcttacttgaacacaaatccaaaaactaatttagagtcttttttgcccagatcttttaagacttacaccccagagatttaagaagaaaacctctaaatttcaaaattatgaagaattacagaattactcatttaaggtactttaaaagaagtttgtacattgtcaaagtaaattttaattcaaatcatgtctgtaaaacttgacgtattttgtgtatgcatgttttcattttgcaaatatttaatatatagacctatgatgtacaggtacgacatgtataggttacctagatgttatgagaaattttagtttattgtgagtactcaagttgcttagagagccaccagggtgatttgctgctggctttctatcatttttatgttttaatgcaaaggaaattttaaaatgttctggaagtgtttttgattaagcaatgcagcctagaagcaatggttctgttcaatcattcagatgttagtggaagcataaaagtcaagactgcatgttgaaacctttcttttgatagttactgaactgcttggttaaactaaatggaaccatgtgctaatttttcacaattattgacctgtattgattgccactgtagtttggtatttccctttactttggtggcctgcttccctcatgccctggaatacaactcagagctccaggcagcggaaccatctattgttttgtttgccagaaagtgcaccctgtatggtctcctgtctaagttggaaatattatgcatgtgcaggactattcgagtattttataaacagtagcacacaataaattccatgcatgggccgctgctcct

SEQ ID NO: 20342 - protein, 524 aa, Homo sapiens; identical to SEQ ID NO: 2553

SEQ ID NO: 20343 - DNA, 3096 bp, Homo sapiens
gtagggaaagagggtccgccatgttccccggcggcgccgccgcttggctctggtagccgccgcccccgcccccaaccccgcccggcccagagcctagccgagccccgggcccagcatggccgccccggagccggcccgggctgcaccgcccccacccccgcccccgccgccccctcccggggctgaccgcgtcgtcaaagctgtccctttccccccaacacatcgcttgacatctgaagaagtatttgatttggatgggatacccagggttgatgttctgaagaaccacttggtgaaagaaggtcgagtagatgaagaaattgcgcttagaattatcaatgagggtgctgccatccttcggagagagaaaaccatgatagaagtagaagctccaatcacagtgtgtggtgacatccatggccaattttttgatctgatgaaactttttgaagtaggaggatcacctgctaatacacgatacctttttcttggcgattatgtggacagaggttattttagtatagagtgtgtcttatatttatgggttctgaagattctatacccaagcacattatttcttctgagaggcaaccatgaatgcagacaccttactgaatattttacctttaagcaggaatgtaaaattaagtattcggaaagagtctatgaagcttgtatggaagcttttgatagtttgcctcttgctgcacttttaaaccaacagtttctttgtgttcatggtggactttcaccagaaatacacacactggatgatattaggagattagatagattcaaagagccacctgcatttggaccaatgtgtgacttgttatggtccgatccttctgaagattttggaaatgaaaaatcacaggaacattttagtcacaatacagttcgaggatgttcttatttttataactatccagcagtgtgtgaatttttgcaaaacaataatttgttatcgattattagagctcatgaagctcaagatgcaggctatagaatgtacagaaaaagtcaaactacagggttcccttcattaataacaattttttcggcacctaattacttagatgtctacaataataaagctgctgtattaaagtatgaaaataatgtgatgaatattcgacagtttaactgttctccacatccttactggttgcctaattttatggatgtcttcacgtggtctttaccgtttgttggagaaaaagtgacagaaatgttggtaaatgttctgagtatttgctctgatgatgaactaatgactgaaggtgaagaccagtttgatggttcagctgcagcccggaaagaaatcataagaaacaaaattcgagcaattggcaagatggcaagagtcttctctgttctcagggaggagagtgaaagtgtgctgacactcaagggcctgactcccacagggatgttgcctagtggagtgttagctggaggacggcagaccctgcaaagtgcaatacgaggattctctccaccacatagaatctgcagttttgaagaggcaaagggtttggataggatcaatgagagaatgccacctcggaaagatgctgtacagcaagatggtttcaattctctgaacaccgcacatgccactgagaaccacgggacgggcaaccatactgcccagtgacccactacttcccagggactctcacatctcgggccccaaatggacagatcacccgaggagctggaggggtcggccaagctgactgtaaatttcacagtctctctgaagaaaccattgtgcttctgagaccctagcccccttcctggatggaggcttgagggccctgggacatgtgctatctgataagattgggtcatcgctgccaaggtggagagcagtgagcaaggggcttggggcaatttccagtggagggcatccacacctccattttatgcttgtggttcacacatttaagtttacaaatcagatttcttttccccttcagtagaattagattttgtttttcaatcatgatttcaaatgcaatcctaagagctaatgtggacttttctttttccatgaaatgtctttaaaggatgaattagcatggtcttaaaatacatttctgaggttactagctgtattttgaattgtgagcaaaatgccgagaaacccagttggcatttatacaaaatgttgacctcaggtctatagttcttaaatgtggctaattctgtaacatagtcttggtattttttaattatgaatgcatatcctatttccaggcaggctctcttacttgaacacaaatccaaaaactaatttagagtcttttttgcccagatcttttaagacttacaccccagagatttaagaagaaaacctctaaatttcaaaattatgaagaattacagaattactcatttaaggtactttaaaagaagtttgtacattgtcaaagtaaattttaattcaaatcatgtctgtaaaacttgacgtattttgtgtatgcatgttttcattttgcaaatatttaatatatagacctatgatgtacaggtacgacatgtataggttacctagatgttatgagaaattttagtttattgtgagtactcaagttgcttagagagccaccagggtgatttgctgctggctttctatcatttttatgttttaatgcaaaggaaattttaaaatgttctggaagtgtttttgattaagcaatgcagcctagaagcaatggttctgttcaatcattcagatgttagtggaagcataaaagtcaagactgcatgttgaaacctttcttttgatagttactgaactgcttggttaaactaaatggaaccatgtgctaatttttcacaattattgacctgtattgattgccactgtagtttggtatttccctttactttggtggcctgcttccctcatgccctggaatacaactcagagctccaggcagcggaaccatctattgttttgtttgccagaaagtgcaccctgtatggtctcctgtctaagttggaaatattatgcatgtgcaggactattcgagtattttataaacagtagcacacaataaattccatgcatgggccgctgctcct

SEQ ID NO: 20344 - protein, 514 aa, Homo sapiens; identical to SEQ ID NO: 20340

SEQ ID NO: 20345 - DNA, 2567 bp, Homo sapiens
agagggtccgccatgttccccggcggcgccgccgcttggctctggtagccgccgcccccgcccccaaccccgcccggcccagagcctagccgagccccgggcccagcatggccgccccggagccggcccgggctgcaccgcccccacccccgcccccgccgccccctcccggggctgaccgcgtcgtcaaagctgtccctttccccccaacacatcgcttgacatctgaagaagtatttgatttggatgggatacccagggttgatgttctgaagaaccacttggtgaaagaaggtcgagtagatgaagaaattgcgcttagaattatcaatgagggtgctgccatccttcggagagagaaaaccatgatagaagtagaagctccaatcacagtgtgtggtgacatccatggccaattttttgatctgatgaaactttttgaagtaggaggatcacctgctaatacacgatacctttttcttggcgattatgtggacagaggttattttagtatagagcatgttctaggcactgaagacatatcgattaatcctcacaataatattaatgagtgtgtcttatatttatgggttctgaagattctatacccaagcacattatttcttctgagaggcaaccatgaatgcagacaccttactgaatattttacctttaagcaggaatgtaaaattaagtattcggaaagagtctatgaagcttgtatggaagcttttgatagtttgcctcttgctgcacttttaaaccaacagtttctttgtgttcatggtggactttcaccagaaatacacacactggatgatattaggagattagatagattcaaagagccacctgcatttggaccaatgtgtgacttgttatggtccgatccttctgaagattttggaaatgaaaaatcacaggaacattttagtcacaatacagttcgaggatgttcttatttttataactatccagcagtgtgtgaatttttgcaaaacaataatttgttatcgattattagagctcatgaagctcaagatgcaggctatagaatgtacagaaaaagtcaaactacagggttcccttcattaataacaattttttcggcacctaattacttagatgtctacaataataaagctgctgtattaaagtatgaaaataatgtgatgaatattcgacagtttaactgttctccacatccttactggttgcctaattttatggatgtcttcacgtggtctttaccgtttgttggagaaaaagtgacagaaatgttggtaaatgttctgagtatttgctctgatgatgaactaatgactgaaggtgaagaccagtttgatggttcagctgcagcccggaaagaaatcataagaaacaaaattcgagcaattggcaagatggcaagagtcttctctgttctcagggaggagagtgaaagtgtgctgacactcaagggcctgactcccacagggatgttgcctagtggagtgttagctggaggacggcagaccctgcaaagtggtaatgatgttatgcaacttgctgtgcctcagatggactggggcacacctcactcttttgctaacaattcacataatgcatgcagggaattccttctgttttttagttcctgtctcagcagctgacctagacagggtactgtattagctagtgtctcattaatacctgatcagggcagaaaactgatagaatgggtattcctttcaattgaaaataatggtcagttcctcagcttttcatgaaatgatatgggagcagctcatatcataatgtctgaaatatttatttattcatctgtctaattcacccttttcttttaaaagccccagtttcagaatgtgaatcagggatattcctgttactaaaatggaaatgtaattccaagtttcttttttaattttttaaatttatgtcattgtattggactatgcttatatttaaaactacttaatttagagttaactacctgcttaggccccagaacattacttatgcccttcagttaccaaaagatttgtgcaaggttttgtaccctggtaaatgatgccaaagtttgttttctgtggtgtttgtcaaatgttctatgtataattaactgtctgtaacatgctgtttccttcctctgcagatgtagctgctttcctaaatctgtctgtctttctttaggttagctgtatgtctgtaaaagtatgttcaattaaattactccatcagacacttgtctgtcttgcaatgtagaagcagctttgtagcaccttgttttgaggtttgctgcatttgttgctgcactttgtgcattctgaacatgaatgtaacattagatattaagtcattgttataaggggttgaatttaaatcctgtaagtcaaaattgaaagggtgttattaagtgtgcctttattttgcatgaaaataaaaagaattatacgtaaagcattcctgtaatctggctcattgaatattttatacttaaaaaactttttttggcgtaaatatttgtgtaaatactgggttaactttttaaaagcccattacagatt

SEQ ID NO: 20346 - protein, 514 aa, Homo sapiens
MAAPEPARAAPPPPPPPPPPPGADRVVKAVPFPPTHRLTSEEVFDLDGIPRVDVLKNHLVKEGRVDEEIALRIINEGAAILRREKTMIEVEAPITVCGDIHGQFFDLMKLFEVGGSPANTRYLFLGDYVDRGYFSIEHVLGTEDISINPHNNINECVLYLWVLKILYPSTLFLLRGNHECRHLTEYFTFKQECKIKYSERVYEACMEAFDSLPLAALLNQQFLCVHGGLSPEIHTLDDIRRLDRFKEPPAFGPMCDLLWSDPSEDFGNEKSQEHFSHNTVRGCSYFYNYPAVCEFLQNNNLLSIIRAHEAQDAGYRMYRKSQTTGFPSLITIFSAPNYLDVYNNKAAVLKYENNVMNIRQFNCSPHPYWLPNFMDVFTWSLPFVGEKVTEMLVNVLSICSDDELMTEGEDQFDGSAAARKEIIRNKIRAIGKMARVFSVLREESESVLTLKGLTPTGMLPSGVLAGGRQTLQSGNDVMQLAVPQMDWGTPHSFANNSHNACREFLLFFSSCLSS

SEQ ID NO: 20347 - DNA, 2470 bp, Homo sapiens
agagggtccgccatgttccccggcggcgccgccgcttggctctggtagccgccgcccccgcccccaaccccgcccggcccagagcctagccgagccccgggcccagcatggccgccccggagccggcccgggctgcaccgcccccacccccgcccccgccgccccctcccggggctgaccgcgtcgtcaaagctgtccctttccccccaacacatcgcttgacatctgaagaagtatttgatttggatgggatacccagggttgatgttctgaagaaccacttggtgaaagaaggtcgagtagatgaagaaattgcgcttagaattatcaatgagggtgctgccatccttcggagagagaaaaccatgatagaagtagaagctccaatcacagtgtgtggtgacatccatggccaattttttgatctgatgaaactttttgaagtaggaggatcacctgctaatacacgatacctttttcttggcgattatgtggacagaggttattttagtatagagcatgttctaggcactgaagacatatcgattaatcctcacaataatattaatgagtgtgtcttatatttatgggttctgaagattctatacccaagcacattatttcttctgagaggcaaccatgaatgcagacaccttactgaatattttacctttaagcaggaatgtaaaattaagtattcggaaagagtctatgaagcttgtatggaagcttttgatagtttgcctcttgctgcacttttaaaccaacagtttctttgtgttcatggtggactttcaccagaaatacacacactggatgatattaggagattagatagattcaaagagccacctgcatttggaccaatgtgtgacttgttatggtccgatccttctgaagattttggaaatgaaaaatcacaggaacattttagtcacaatacagttcgaggatgttcttatttttataactatccagcagtgtgtgaatttttgcaaaacaataatttgttatcgattattagagctcatgaagctcaagatgcaggctatagaatgtacagaaaaagtcaaactacagggttcccttcattaataacaattttttcggcacctaattacttagatgtctacaataataaagctgctgtattaaagtatgaaaataatgtgatgaatattcgacagtttaactgttctccacatccttactggttgcctaattttatggatgtcttcacgtggtctttaccgtttgttggagaaaaagtgacagaaatgttggtaaatgttctgagtatttgctctgatgatgaactaatgactgaaggtgaagaccagtttgatggttcagctgcagcccggaaagaaatcataagaaacaaaattcgagcaattggcaagatggcaagagtcttctctgttctcagggaggagagtgaaagtgtgctgacactcaagggcctgactcccacagggatgttgcctagtggagtgttagctggaggacggcagaccctgcaaagtggtaatgatgttatgcaacttgctgtgcctcagatggactggggcacacctcactcttttgctaacaattcacataatgcatgcagggaattccttctgttttttagttcctgtctcagcagctgacctagacagggtactgtattagctagtgtctcattaatacctgatcagggcagaaaactgatagaatgggtattcctttcaattgaaaataatggtcagttcctcagcttttcatgaaatgatatgggagcagctcatatcataatgtctgaaatatttatttattcatctgtctaattcacccttttcttttaaaagccccagtttcagaatgtgaatcagggatattcctgttactaaaatggaaatgtaattccaagtttcttttttaattttttaaatttatgtcattgtattggactatgcttatatttaaaactacttaatttagagttaactacctgcttaggccccagaacattacttatgcccttcagttaccaaaagatttgtgcaaggttttgtaccctggtaaatgatgccaaagtttgttttctgtggtgtttgtcaaatgttctatgtataattaactgtctgtaacatgctgtttccttcctctgcagatgtagctgctttcctaaatctgtctgtctttctttaggttagctgtatgtctgtaaaagtatgttcaattaaattactccatcagacacttgtctgtcttgcaatgtagaagcagctttgtagcaccttgttttgaggtttgctgcatttgttgctgcactttgtgcattctgaacatgaatgtaacattagatattaagtcattgttataaggggttgaatttaaatcctgtaagtcaaaattgaaagggtgttattaagtgtgcctttattttgcatgaaaataaaaagaattatacgtaaagcattcctgt

SEQ ID NO: 20348 - protein, 514 aa, Homo sapiens; identical to SEQ ID NO: 20346

SEQ ID NO: 20349 - DNA, 1504 bp, Homo sapiens
aatctgctgacctgttgtgggtaaacatccataaattctgccctggctgagaaacatttaactttttcgtctaggatgaatgtgtgggtgtgtgtttgtaagggaggggtaactccttttgaccaaagtgttgatggttttctaagtaaatacttgctatccacaagaattttttttttcgtttatgctgctttttctccctttctgcactataaaggctggccttccaattcctgccccgacccttcaccgtgatccaatcccacaaggttcccctaatttctgctccgggtggcacctgacggccaaaagtgaacccctgcggttgtcgccagctagacgcggatagggcggacgactgtcaccggggagcaggcgtgggccaaagccgaggtgatttctgactgctcactggcgggcctcgcgtggctgaaggtctccgagcccctcggttcgccccggcaagccagaagtgcagctgtcgcggggcaggaagctaatcgcggcccctgcgccgctttgacaggccgagtgaagagaaaacgggctcactgcagctaacagcctcaccccttgggctaggaagccacggaagcaaaacctccgccccggcctgaaagcaaccgggagaccgcggaaccactgccaccgactcagccctgcccagcaggggcccgcccaggggccactccccaagggaggcagccagtcactcgcccgcccttccgggcccactcccgaggggacggtctcccgcccgccctcacacacagctagctcttcaggccaggcccccagggtttcgtccacctctcacctttgacgacgcgaatgaagaatgaggaggtgctgcgatcgaacgactgcgaggaaacacacccgctctcatggcattcccagtaaactgagaagacgtgattaaacctcaggatctcctactaatagagaaatgtataacgatttagctaccagatctgaatactgaagggttggtaggggaccagagaatagaggaagcattgtaggttctagagtggagaagggaccatccaaaatggagtttgaaagagaattctggcctttgtgtttagagtctggaattgtcaagagtctgaaagcacagaataagactgcagctagagcaatttaggcgccatagtttgtcaaaacaggtaaggggaataaaggggatgacaccaagagatgtgcaaagaatctgaagaattcacctgaaaaggatacaacctcctcctggaaggcagaggagtaaatagggaattggaaattaattccttatttctgcacatgcacagaatctgggcccaggtgacttatggaacctttatagagaccacggtgactgacactcatgggaaagggggtagaggggcaagaactgactgttcatcaaaaattattagatgagtgtgtccacgacaccaggagatatgttgaatcatggacagggaccagcatatccactaagctctatatatcttgatgg

SEQ ID NO: 20350 - protein, 59 aa, Homo sapiens
MNVWVCVCKGGVTPFDQSVDGFLSKYLLSTRIFFFVYAAFSPFLHYKGWPSNSCPDPSP

SEQ ID NO: 20351 - DNA, 1135 bp, Homo sapiens
agatctgaatactgaagggttggtaggggaccagagaatagaggaagcattgtaggttctagagtggagaagggaccatccaaaatggagtttgaaagagaattctggcctttgtgtttagagtctggaattgtcaagagtctgaaagcacagaataagactgcagctagagcaatttaggcgccatagtttgtcaaaacagagacgggatctcactgtgttgcccaggctggtctcgaactgctggactcaagtcatcctcccatcttggcctcccaaagtgctggaattacagtggacaaccttcaatgcactggtactttgtaccctgacctctactgtgatgaacactcaacttgggcaaggaagtgaaattctccaaagcaaggaggagggtgctctgaatagatggaccctgattctacttacaaaactgtgggaagaaaccggagcttcctccctctctgagacaacggtgccactgagactgcgtgagatgcgacgtaaattctctgcactgtactgctcatcctccccacactccctgctgaggcctcggcaaggtgtagccttcaaacacacagacacatacaggcagacacataataccagacttatggttttcccacagacagtatcctcagggtatgggaaagagtaggggaagactcagtagtaatagacacctgaattagatgtattggtaagatagtggccatgtaacaatctcctctaattcaaaagaagcccaatcatagaccttattttcttctgatagccccatatcaccatgcctctgccttatcatcatccctgtcacatctctccataattccttccccaacacaccaccccaggcccagcaccttagcacctgaggctgctacctgagaagtacgcactgttctggcttcatggagaccatgctccatttctgctgttgaagtctttgagagaccaggatcatgggctgagtgcaacctcctccccatgccatctgcagagcctgaagaggaaaacacaaatacaagttgaggccatctcttcccctagggcctaacctctaagcctagcagcacaaactcaggagctgttgtttcatttaataataaatatgcatccttgaattcaacgg

SEQ ID NO: 20352 - protein, 105 aa, Homo sapiens
MNTQLGQGSEILQSKEEGALNRWTLILLTKLWEETGASSLSETTVPLRLREMRRKFSALYCSSSPHSLLRPRQGVAFKHTDTYRQTHNTRLMVFPQTVSSGYGKE

SEQ ID NO: 20353 - DNA, 5655 bp, Homo sapiens
tagtgtgctgctctaacagaggggctttgtgctacagcttcttccagagctccacagatgcatgctgggcgggctcagtcagctttacccctaatacacttgcttcttcctaacaatagcagagcaagactgacaacaataattaaaataagagaataaagaagatgtagtcagaggccattctgaatgcattcagattctcagtgtgtatgaggaaggctgcctgtaattaagagggaatctttaaccagtttcagtgtagtagtgaaaaagtgcttccatctgacactctccgcagtgctctggcaaagactttccaggatgaacaacgtttccagctgggaattatggatgatgctgcagagtgctttgaaaacctcctgatgagaattcacttccacattgctgatgaaaccaaagaggatatatgtactgcccaacactgcatttcccatcagaaatttgcaatgacattgtttgagcagtgtgtatgtactagctgtggtgccacttctgatccgctgcctttcatccagatggtacattatatctccaccacttccctttgcaatcaggctatttgtatgctggaaagacgagagaaaccttcaccaagcatgtttggtgagctgctgcagaatgccagcaccatgggggatctgcggaactgtccaagcaactgtggagagaggatcaggattcgccgtgtgttgatgaatgctccacagattatcacgattgggctggtatgggactcagaccactcagacttagcagaagatgttatccacagcctgggaacctgccttaagctgggtgatctgtttttcagagtgacggatgaccgggccaagcaatctgaactgtacttagttggaatgatctgttactatggcaaacattattctacattcttttttcaaacaaagattcgcaaatggatgtattttgatgatgctcatgtcaaggagattgggcccaaatggaaggatgtggtgaccaaatgcatcaaggggcattatcagcccctgctgctgctttatgcagatccccagggtaccccagtttccacccaggacctgcctccccaagctgagttccagtcatacagcaggacatgctacgacagtgaagattcaggacacctgactgatagtgaatgtaatcagaaacacacatccaagaaagggtcactgatagagcgcaagaggagctctggtcgggttaggaggaaaggcgatgagccccaggcctcgggataccacagtgaaggagaaacactgaaagagaagcaggctcctagaaatgcctccaaaccatccagcagcaccaacaggctgagagattttaaagagacagtcagcaatatgatccataacagaccatccctggcttctcagaccaatgtaggctctcactgcaggggcagaggaggagaccagcctgacaaaaaacctcctaggaccctgcctttacactctcgtgactgggaaatagagagtaccagcagtgagtcaaaatccagttcttccagcaagtatcgtcccacatggagacccaaacgagaatctctgaatattgacagtatctttagtaaggacaaaaggaagcactgtggctatacccagcttagccccttttctgaggattcagctaaagaatttataccagatgaaccaagcaagccaccttcttacgacattaaatttggtggaccaagcccccagtacaagcgctggggcccagcacggccaggctctcaccttttagagcagcacccccgactaatccagcgaatggaatctggctatgaaagcagtgagaggaacagcagcagccctgtcagcctggatgcagccctgcctgagagctcaaatgtctacagggatccaagtgctaagagatcagctgggttggttccttcctggcgtcatatcccaaagtcgcacagcagtagcatcctggaggtagactccacagcatccatgggtggctggacaaagagtcagcctttctctggtgaggagatatcttctaaaagtgaactggatgaattgcaggaagaggtggccaggagggcgcaggaacaggaacttcgaagaaaacgggagaaggagttagaggcagcgaaagggtttaaccctcatcctagccgcttcatggacttggatgaactgcagaatcaggtgaacagcctatcccgctccaagtattgttaagccaagaggcccaactggaatccggcatggatacagagtttggggccagttctttcttccattcacctgcttcctgccatgagtcacactcatcactatctccagagtcatctgccccacagcacagctcccccagtagatctgccttgaagcttctgacttcggttgaagtagacaacattgaaccctctgcattccacaggcaaggtttacctaaagcaccagggtggactgagaagaattctcatcatagttgggagccattggatgccccagagggtaagctgcaaggctctaggtgtgacaacagcagttgcagcaagctccctccacaagaaggaagaggcattgctcaagaacagctgttccaagaaaagaaggatcctgctaacccctccccggtgatgcctggaatagccacctctgagaggggtgatgaacacagcctaggctgtagtccttcaaattcatcagctcagcccagccttcccctgtatagaacctgccaccccataatgcctgttgcttcttcatttgtgcttcactgtcctgatcctgtgcagaaaactaaccaatgcctccaaggccaaagcctcaaaacttcattgactttaaaagtggacagaggcagtgaggagacctataggccagagtttcccagcacaaaggggcttgtccgttctctggctgagcagttccagaggatgcagggtgtctccatgagggatagtacaggtttcaaggatagaagtttgtcaggtagtctaaggaagaactcttccccttctgattctaagcctcctttctcacagggtcaagagaaaggccactggccatgggcaaagcaacaatcctctctggagggtggggatagaccactttcctgggaagagtccactgaacattcttctcttgccttaaactctgggctgcctaatggtgaaacttctagcggaggacagcccaggttggcagagccagacatataccaagagaagctgtcccaagtgagagatgttaggtctaaggatctgggcagcagtactgacttggggacttccttgcctttggattcctgggtgaatatcacaaggttctgtgattctcagcttaagcatggggcacctaggccaggaatgaagtcctcccctcatgattcccatacgtgtgtaacctatccagagagaaatcacatccttttgcatccacattggaaccaagacacagagcaggagacctcagaattggagtctctgtatcaggccagtcttcaggcttctcaagctggctgttctggatgggggcagcaggataccgcctggcacccacttagccaaacaggctctgcagatggcatggggaggaggttgcactcagcccatgatcctggtctctcaaagacttcaacagcagaaatggagcatggtctccatgaagccagaacagtgcgtacttctcaggctacaccttgccgaggcctcagcagggagtgtggggaggatgagcagtacagtgcagagaatttacgtcgcatctcacgcagtctcagtggcaccgttgtctcagagagggaggaagctccggtttcttcccacagttttgattcatcaaacgtgaggaagcctttggaaaccgggcaccgttgttccagctcctcttccctccctgtcatccatgacccttctgtgtttctcctcggtccccaactctaccttccccaaccacagttcctgtccccagatgtcctgatgcccaccatggcaggggagcccaatagactcccaggaacttcaaggagtgtccagcagtttctggctatgtgtgacaggggtgaaacttcccaaggggccaagtacacaggaaggactttgaactaccagagcctcccccatcgctccagaacagacaactcctgggcaccctggtcagagaccaaccagcatattgggaccagattcctgactactccagggtgcaatcctcaactaacctacactgccacactaccagaaagaagcaagggccttcaggttcctcacactcagtcctggagtgatcttttccattcaccctcccaccctcccattgttcatcctgtgtacccaccatctagcagtcttcatgtacccctgaggtcagcttggaattcagatcctgttccagggtcccgaacccctggtcctcgaagagtagatatgcccccagatgatgactggaggcaaagcagttatgcctcccactctggacacaggagaacagtgggagaggggtttctgtttgttctatcagatgctcccagaagagagcagatcagggctagagtcctgcagcacagtcaatggtaaaggttattcctttcctttcctggagctacacctttctttgtaaaactgtactgtgggccgggcgcggtggctcacacctgtaatcccagcactttgggaggctgaggcgggtggatcacgaggtcaggagattgagaccatcctggccaacatggtgaaaccccgtctctaccaaaatacaaaaaattagccaggcgtgacggtgcgtgcctgtagtcccaactactcggaaggctgaggcaggagaattgcttgaacccgggaggcagaggttgcagtgagccgagatcgcaccactgcactccagcttggcaatagagtgagactccatctcaaaaaacaaaacaaaacaacaacaaaataaactactgtggcagcgttggtaccctgcatcactgccatggttgtgctattctcatctcaacatagaattggtgggttctcctaagggtgtcaggaacctctaaaaagatgtgattctttgggaggggatatttgaaattccaacttccattccccctagcaaaaggaagcagctgctgtttaagggttttatctgagccactttaaagatgaatccatggtattactctggatactagccattccttaggattttaaggtcacattttattcctggatgctttatgtccccacctccacctgagccctcatcctctgttccctactatactcccaacttctactctttgttttatccacctatccctattacctgaccctttgtcttccctgtctcccatccttggggggacatgtagccctgtggtcatggttctgatgacatcatcagggcagcccccctgcccaggtattatggcctgtcagcattccctgtgccctccaaaccttaggcctagaatgcggagctgccaacataacattcacccttttgaacagatggagtcaggcacactaacacagccttctgtcctcaataacacagccattattgccacttgctcagtcgtcaatgtaaaccctcagagtcagctgaactattttaggccaaacatactgtttttgtaaagtatttttcattaataaatctataagacagttctatttaa

SEQ ID NO: 20354 - protein, 772 aa, Homo sapiens
MDTEFGASSFFHSPASCHESHSSLSPESSAPQHSSPSRSALKLLTSVEVDNIEPSAFHRQGLPKAPGWTEKNSHHSWEPLDAPEGKLQGSRCDNSSCSKLPPQEGRGIAQEQLFQEKKDPANPSPVMPGIATSERGDEHSLGCSPSNSSAQPSLPLYRTCHPIMPVASSFVLHCPDPVQKTNQCLQGQSLKTSLTLKVDRGSEETYRPEFPSTKGLVRSLAEQFQRMQGVSMRDSTGFKDRSLSGSLRKNSSPSDSKPPFSQGQEKGHWPWAKQQSSLEGGDRPLSWEESTEHSSLALNSGLPNGETSSGGQPRLAEPDIYQEKLSQVRDVRSKDLGSSTDLGTSLPLDSWVNITRFCDSQLKHGAPRPGMKSSPHDSHTCVTYPERNHILLHPHWNQDTEQETSELESLYQASLQASQAGCSGWGQQDTAWHPLSQTGSADGMGRRLHSAHDPGLSKTSTAEMEHGLHEARTVRTSQATPCRGLSRECGEDEQYSAENLRRISRSLSGTVVSEREEAPVSSHSFDSSNVRKPLETGHRCSSSSSLPVIHDPSVFLLGPQLYLPQPQFLSPDVLMPTMAGEPNRLPGTSRSVQQFLAMCDRGETSQGAKYTGRTLNYQSLPHRSRTDNSWAPWSETNQHIGTRFLTTPGCNPQLTYTATLPERSKGLQVPHTQSWSDLFHSPSHPPIVHPVYPPSSSLHVPLRSAWNSDPVPGSRTPGPRRVDMPPDDDWRQSSYASHSGHRRTVGEGFLFVLSDAPRREQIRARVLQHSQW

SEQ ID NO: 20355 - DNA, 539 bp, Homo sapiens
ccgcgcccggcccacagtacagttttacaaagaaaggtgtagctccaggaaaggaaaggaataacctttaccattgactgtgctgcaggactctagccctgatctgctctcttctgggagcatctgatagaacaaacagaaacccctctcccactgttctcctgtgtccagagtgggaggcataactgctttgcctccagtcatcatctgggggcatatctactcttcgaggaccaggggttcgggaccctggaacaggatctgaattccaagctgacctcaggggtacatgaagactgctagatgagacgggatctcactgtgttgcccaggctggtctcgaactgctggactcaagtcatcctcccatcttggcctcccaaagtgctggaattacaggtgtgagacgctgtgccttgctttttttttgtttctccaacttttcttaaaatgttaccttcacttcagttaagctgcctttgtttgatctctgagatctaatgtggaatgccttttcttatacatttattcaactttgg

SEQ ID NO: 20356 - protein, 33 aa, Homo sapiens
MRRDLTVLPRLVSNCWTQVILPSWPPKVLELQV

SEQ ID NO: 20357 - DNA, 589 bp, Homo sapiens
gatgaacactcaacttgggcaaggaagtgaaattctccaaaggtatgattacctacaaacctagccactgatattatttaagtttgttgatctctaatggcttgggctttcctgcctcttctacttacacattactgcactagtaccatatgaaaattctcaagaaggcttttttcctcttcttgctgatacacatgcatcactttagattgaaaacacactgaattctattcaatcacatactgggggtgagaggaaaaagcaaaccaatactccatcccatttctttccttctttctttgattagtgcagtgggttctgacccaatcagcagcctttgcttctcagattcctctcaaggctttatgactcttctcaccccaggaaaccctacaacacgcacggcctttcagaactgctacatggaatggacattcctctgggctccagctgaatgtttgtaaataaaataatgactgcgtgtccttatttttgctgagtacacagggcctttcctcacattacaaccttcactttctccctgcttcttcacctgcatccagactgggcgatagagtgagaatccaga

SEQ ID NO: 20358 - protein, 32 aa, Homo sapiens
MTLLTPGNPTTRTAFQNCYMEWTFLWAPAECL

SEQ ID NO: 20359 - DNA, 4294 bp, Homo sapiens
agtcccagaagaaagaggagagacttgctgaagatctggatgggacaatagaagtttggggcacattaaaaagaagcagcaagaacatcaacaaaaacctcagatgattcaaacaggcttcttcttggctttgtggaaccttttgcagttgctcagaatttgagtttttgcttcagaggatgatgagacaaggcaatagagggtgaggaggatcatgttggattcttgcttctctgtctgcctctccttccagttggaaaaatcttcagtccataagaagcattatcaacaagcctgaagaacacatcttaccctgatcctggatgctgttggagttgagaattacatccacttcaccaggactttatggaggctgttcaagaaaaatagaaggaagcaatacttaaggatttctctgtttgcattagtcctgtgccatgttacattttggagattgtttggaacaagtgagggagggctctgtcatcttgatctaggaggatacctgagtcccttgactacacagatgatatttggaaggtggctaaatgtgaacaataatgtcttggaagagaaattatttttcagggggtcgtggtagtgtacaagggatgtttgcacctcgaagctcaacctccatagcccccagcaaaggcctcagcaatgagccagggcaaaacagctgcttcctcaacagtgccctgcaggttttgtggcacttggatatcttccgacgtagctttaggcagcttacaactcacaagtgcatgggagattcctgcatcttttgcgctctcaagggaatctttaaccagtttcagtgtagtagtgaaaaagtgcttccatctgacactctccgcagtgctctggcaaagactttccaggatgaacaacgtttccagctgggaattatggatgatgctgcagagtgctttgaaaacctcctgatgagaattcacttccacattgctgatgaaaccaaagaggatatatgtactgcccaacactgcatttcccatcagaaatttgcaatgacattgtttgagcagtgtgtatgtactagctgtggtgccacttctgatccgctgcctttcatccagatggtacattatatctccaccacttccctttgcaatcaggctatttgtatgctggaaagacgagagaaaccttcaccaagcatgtttggtgagctgctgcagaatgccagcaccatgggggatctgcggaactgtccaagcaactgtggagagaggatcaggattcgccgtgtgttgatgaatgctccacagattatcacgattgggctggtatgggactcagaccactcagacttagcagaagatgttatccacagcctgggaacctgccttaagctgggtgatctgtttttcagagtgacggatgaccgggccaagcaatctgaactgtacttagttggaatgatctgttactatggcaaacattattctacattcttttttcaaacaaagattcgcaaatggatgtattttgatgatgctcatgtcaaggagattgggcccaaatggaaggatgtggtgaccaaatgcatcaaggggcattatcagcccctgctgctgctttatgcagatccccagggtaccccagtttccacccaggacctgcctccccaagctgagttccagtcatacagcaggacatgctacgacagtgaagattcagggagggagccctccatctcaagtgacactcgaacagattcctcaacggagagctatccctacaaacattcccaccatgagtctgtggtcagtcacttctcttctgattctcaggggacagtcatctataatgtggaaaatgattccatgtctcagagcagtcgggacacaggacacctgactgatagtgaatgtaatcagaaacacacatccaagaaagggtcactgatagagcgcaagaggagctctggtcgggttaggaggaaaggcgatgagccccaggcctcgggataccacagtgaaggagaaacactgaaagagaagcaggctcctagaaatgcctccaaaccatccagcagcaccaacaggctgagagattttaaagagacagtcagcaatatgatccataacagaccatccctggcttctcagaccaatgtaggctctcactgcaggggcagaggaggagaccagcctgacaaaaaacctcctaggaccctgcctttacactctcgtgactgggaaatagagagtaccagcagtgagtcaaaatccagttcttccagcaagtatcgtcccacatggagacccaaacgagaatctctgaatattgacagtatctttagtaaggacaaaaggaagcactgtggctatacccagcttagccccttttctgaggattcagctaaagaatttataccagatgaaccaagcaagccaccttcttacgacattaaatttggtggaccaagcccccagtacaagcgctggggcccagcacggccaggctctcaccttttagagcagcacccccgactaatccagcgaatggaatctggctatgaaagcagtgagaggaacagcagcagccctgtcagcctggatgcagccctgcctgagagctcaaatgtctacagggatccaagtgctaagagatcagctgggttggttccttcctggcgtcatatcccaaagtcgcacagcagtagcatcctggaggtagactccacagcatccatgggtggctggacaaagagtcagcctttctctggtgaggagatatcttctaaaagtgaactggatgaattgcaggaagaggtggccaggagggcgcaggaacaggaacttcgaagaaaacgggagaaggagttagaggcagcgaaagggtttaaccctcatcctagccgcttcatggacttggatgaactgcagaatcaggggaggagtgacggctttgagaggtccctgcaagaggcagagtcagtgtttgaagagtcactacatctggaacagaaaggagactgtgctgcagctttggctctctgtaatgaagctatctctaaactaagacttgccctgcatggtgccagctgtagcacgcacagcagagccctagtcgataagaagttgcaaatcagtattcgaaaagcacggagcctgcaggatcgcatgcagcagcagcaatcaccacagcagccgtcgcagccctcagcctgcctcccaacacaggcggggactctctctcagccaacaaggtagtgcttgggaaccatgttagtttatgaatgccaggggaagaaatgaccatgagtattctgtagcaagagctctcattgtcttggcgactgaaggggagagaggagtcctctgaaaagattttcttctttcaggtcagacatacagtgaaaagctcattgtactgctggtccttatcttaataattcctaggatgcaaaaagtacagcataataagaccatttgtccacatttcccatgggtaactttagccctggacttgtgtaataacgcgattattatatttgtatatattatgttcttagacatggcaatccaggctacatttcatgttgtagtagctaccatgtgatttattttgggatttcagtgcttcctatccttatggaagcagagaaagcagtctttcttgctctgattgcaccatagagaagagacacaaagattccctttgctttgcttctttatggtcaggactaggaaagaagttccagtagtcattgttgtagttctcacatcttagccctggaatttggcttttacttagaatagatgaatttaaataaacattaatttggaccgttaataattctgagtagttttcaaaatataaattagtaaaagcagttaacattttttttttttttttttttttggagacaggatcttgctttttcacccaggctggagtgcagtggcacgatcacagcttactgcagcctcaacctcctgggttcaatgttcaaaaggcaaatgttcaaaaatagttaactgctaggcatggtagctcacgcctgtaatcccagaattttgggaggccgaggagggcagattatttgagtcaaggagtttgagaccagcctgggcaacacggtaaaaccctgtctctacaaaaaacacaaaaaatttagctgggcatggtggtgcatacctgtggtcccagctacttaggaggcttgggtggaagaatcggttagcccggcaggtcaaggctgcagtgagccgtgatggcactgccacactccagcctgggtgacagagcaagaccttgtctc

SEQ ID NO: 20360 - protein, 893 aa, Homo sapiens
MSWKRNYFSGGRGSVQGMFAPRSSTSIAPSKGLSNEPGQNSCFLNSALQVLWHLDIFRRSFRQLTTHKCMGDSCIFCALKGIFNQFQCSSEKVLPSDTLRSALAKTFQDEQRFQLGIMDDAAECFENLLMRIHFHIADETKEDICTAQHCISHQKFAMTLFEQCVCTSCGATSDPLPFIQMVHYISTTSLCNQAICMLERREKPSPSMFGELLQNASTMGDLRNCPSNCGERIRIRRVLMNAPQIITIGLVWDSDHSDLAEDVIHSLGTCLKLGDLFFRVTDDRAKQSELYLVGMICYYGKHYSTFFFQTKIRKWMYFDDAHVKEIGPKWKDVVTKCIKGHYQPLLLLYADPQGTPVSTQDLPPQAEFQSYSRTCYDSEDSGREPSISSDTRTDSSTESYPYKHSHHESVVSHFSSDSQGTVIYNVENDSMSQSSRDTGHLTDSECNQKHTSKKGSLIERKRSSGRVRRKGDEPQASGYHSEGETLKEKQAPRNASKPSSSTNRLRDFKETVSNMIHNRPSLASQTNVGSHCRGRGGDQPDKKPPRTLPLHSRDWEIESTSSESKSSSSSKYRPTWRPKRESLNIDSIFSKDKRKHCGYTQLSPFSEDSAKEFIPDEPSKPPSYDIKFGGPSPQYKRWGPARPGSHLLEQHPRLIQRMESGYESSERNSSSPVSLDAALPESSNVYRDPSAKRSAGLVPSWRHIPKSHSSSILEVDSTASMGGWTKSQPFSGEEISSKSELDELQEEVARRAQEQELRRKREKELEAAKGFNPHPSRFMDLDELQNQGRSDGFERSLQEAESVFEESLHLEQKGDCAAALALCNEAISKLRLALHGASCSTHSRALVDKKLQISIRKARSLQDRMQQQQSPQQPSQPSACLPTQAGTLSQPTR

SEQ ID NO: 20361 - DNA, 1212 bp, Homo sapiens
atgtcttggaagagaaattatttttcagggggtcgtggtagtgtacaagggatgtttgcacctcgaagctcaacctccatagcccccagcaaaggcctcagcaatgagccagggcaaaacagctgcttcctcaacagtgccctgcaggttttgtggcacttggatatcttccgacgtagctttaggcagcttacaactcacaagtgcatgggagattcctgcatcttttgcgctctcaagggaatctttaaccagtttcagtgtagtagtgaaaaagtgcttccatctgacactctccgcagtgctctggcaaagactttccaggatgaacaacgtttccagctgggaattatggatgatgctgcagagtgctttgaaaacctcctgatgagaattcacttccacattgctgatgaaaccaaagaggatatatgtactgcccaacactgcatttcccatcagaaatttgcaatgacattgtttgagcagtgtgtatgtactagctgtggtgccacttctgatccgctgcctttcatccagatggtacattatatctccaccacttccctttgcaatcaggctatttgtatgctggaaagacgagagaaaccttcaccaagcatgtttggtgagctgctgcagaatgccagcaccatgggggatctgcggaactgtccaagcaactgtggagagaggatcaggattcgccgtgtgttgatgaatgctccacagattatcacgattgggctggtatgggactcagaccactcagacttagcagaagatgttatccacagcctgggaacctgccttaagctgggtgatctgtttttcagagtgacggatgaccgggccaagcaatctgaactgtacttagttggaatgatctgttactatggcaaacattattctacattcttttttcaaacaaagattcgcaaatggatgtattttgatgatgctcatgtcaaggagattgggcccaaatggaaggatgtggtgaccaaatgcatcaaggggcattatcagcccctgctgctgctttatgcagatccccagggtaccccagtttccacccaggacctgcctccccaagctgagttccagtcatacagcaggacatgctacgacagtgaagattcaggtgagcagccaggctctttacctctcctctctcctcaccccatgcgatcaaacagttgggactcatag

SEQ ID NO: 20362 - protein, 403 aa, Homo sapiens
MSWKRNYFSGGRGSVQGMFAPRSSTSIAPSKGLSNEPGQNSCFLNSALQVLWHLDIFRRSFRQLTTHKCMGDSCIFCALKGIFNQFQCSSEKVLPSDTLRSALAKTFQDEQRFQLGIMDDAAECFENLLMRIHFHIADETKEDICTAQHCISHQKFAMTLFEQCVCTSCGATSDPLPFIQMVHYISTTSLCNQAICMLERREKPSPSMFGELLQNASTMGDLRNCPSNCGERIRIRRVLMNAPQIITIGLVWDSDHSDLAEDVIHSLGTCLKLGDLFFRVTDDRAKQSELYLVGMICYYGKHYSTFFFQTKIRKWMYFDDAHVKEIGPKWKDVVTKCIKGHYQPLLLLYADPQGTPVSTQDLPPQAEFQSYSRTCYDSEDSGEQPGSLPLLSPHPMRSNSWDS

SEQ ID NO: 20363 - DNA, 1558 bp, Homo sapiens
tctcagtcttcagtttctccctaagtgcttctttggatctcaggctctaggtgcaatgtgaaggggagtccctgggcagactgatccctggctcagacagttcagtgggagaatcccaaaggccttttccctccttcctgagcctccgggcaaggagggagggatcttggttccagggtctcagtaccccctgtgccatttgagctgcttgcgctcatcatctctattaataaccaacttccctcccccactgccagtgctgcccccacgcctgcccagctcgtgttctccggtcacagcagctcagtcctccaaagctgctggaccccagggagagctgaccactgcccgagcagccggctgaatccacctccacaatgccgctctcaggaaccccggcccctaataagaagaggaaatccagcaagctgatcatggaactcactggaggtggacaggagagctcaggcttgaacctgggcaaaaagatcagtgtcccaagggatgtgatgttggaggaactgtcgctgcttaccaaccggggctccaagatgttcaaactgcggcagatgagggtggagaagtttatttatgagaaccaccctgatgttttctctgacagctcaatggatcacttccagaagttccttccaacagtggggggacagctgggcacagctggtcagggattctcatacagcaagagcaacggcagaggcggcagccaggcagggggcagtggctctgccggacagtatggctctgatcagcagcaccatctgggctctgggtctggagctgggggtacaggtggtcccgcgggccaggctggcagaggaggagctgctggcacagcaggggttggtgagacaggatcaggcaaaccaggcaggcggagaaggaaaacatatcactgtgttcaagacctatatttccccatgggagcgagccatgggggttgacccccagcaaaaaatggaacttggcattgacctgctggcctatggggccaaagctgaacttcccaaatataagtccttcaacaggacggcaatgccctatggtggatatgagaaggcctccaaacgcatgaccttccagatgcccaagtttgacctggggcccttgctgagtgaacccctggtcctctacaaccaaaacctctccaacaggccttctttcaatcgaacccctattccctggctgagctctggggagcctgtagactacaacgtggatattggcatccccttggatggagaaacagaggagctgtgaggtgtttcctcctctgatttgcatcatttcccctctctggctccaatttggagagggaatgctgagcagatagcccccattgttaatccagtatccttatgggaatggagggaaaaaggagagatctacctttccatcctttactccaagtccccactccacgcatccttcctcaccaactcagagctccccttctacttgctccatatggaacctgctcgtttatggaatttgctctgccaccagtaacagtcaataaacttcaaggaaaatgaactca

SEQ ID NO: 20364 - protein, 228 aa, Homo sapiens
MRTTLMFSLTAQWITSRSSFQQWGDSWAQLVRDSHTARATAEAAARQGAVALPDSMALISSTIWALGLELGVQVVPRARLAEEELLAQQGLVRQDQANQAGGEGKHITVFKTYISPWERAMGVDPQQKMELGIDLLAYGAKAELPKYKSFNRTAMPYGGYEKASKRMTFQMPKFDLGPLLSEPLVLYNQNLSNRPSFNRTPIPWLSSGEPVDYNVDIGIPLDGETEEL

SEQ ID NO: 20365 - DNA, 1094 bp, Homo sapiens
aaaggaggagacgaagaactcgcccaaccccgagctgctatcgctggtacagaacctggaaggcggagcttgcagtgagctgagattgcgccactgcactccagcctgggcgacggagcgagactctgtctcaaaacaaacaaacaaacaaaagacccaatctgagtcttatcgttgtactgatagaagggtcagatatccccacatggagttgagtgggagaaagagattcactagagaataactccttagagaccaatgtctgtagcaggtgtacagcatcttgtgaaagttatggagcatgaaaagactgaagggccaggacagtttgcatgggctgagttataccagctagaccaggaatagaacaaagaattctatacctcaggatttcaaaaagttagcaacttgagaggccagtgctgagcaacccagtacccaggaaatgaaaaaaagaaagaaaattccctccgagaatgaacaaatcattggcttcattgcctcatgagcttgagagaaaggagaagagagccagagtgtggcaagtgaggccaaaatcagaagcatggcagaaatgagtgtaagtgattgagccacagacagaagtgtggcgagggacaatgccatattgggagaaggtaaagttgagtaacaagaaaccaaccgtgtgtgagagggggattggaaaaaaatttgagggagaagaatgttagaatggaagggaatgatggtggaagggaggtgtgagggtgtgtgctgagtgttgaaagaacggttggtgtctgtgtgattttccttgagtctgttcttcagtgtgtcttctgcagcttgccatgactgcctgggaaagagtagggaaatacccagagccaaaacctcctttcagtcccaccccatccctcaaaaccccagctattgcttcttttcagcttcaggtcctgatctccaatcttagtatggactcccttctcaccaagaccaccaccagctacgtttgctgtgtaatctggaaagtgataatttcctttgcttgttgggtgtgagtcacaatactttggtttgtgcacaagaataaatttatgccccataccttc

SEQ ID NO: 20366 - protein, 69 aa, Homo sapiens
MTAWERVGKYPEPKPPFSPTPSLKTPAIASFQLQVLISNLSMDSLLTKTTTSYVCCVIWKVIISFACWV

SEQ ID NO: 20367 - DNA, 4121 bp, Homo sapiens
agccaacaccgcctttctcagcatggagacctttgagcccatcagccaagagcccctcagccaagccagctatgacaaagccccagacccagttcctgagctccaagactcgttctatgcagaactgcaacgtgcagagagcctccaagagaagagcataaaagaggccaagaccaaatgcaggacaattgcatccctgctcactgcagcccccaacccccactccaaaggggtacttatgtttaagaaacggcggcagagagccaagaagtacaccctggtgagcttcggggctgctgctgggacaggcgctgaggaggaggacggcgttccccccacgagtgagtccgagctggacgaagaagccttctctgacgcccgcagcctcaccaatcaatctgactgggacagtccctatctggacatggagcttgccagggcgggctcaagagcatcagagggccagggctctgggctgggagggcagctgagtgaggtctctgggcgaggggtgcagctctttgaacagcagcgccagcgcgcagactccagcacccaggaactggcacgggtcgaaccagcagccatgctcaacggggaaggcctgcagtcaccacctcgggcccagagtgctcccccagaggcagctgtgctcccacccagccccttgccggcgcctgtagccagccccagacccttccaaccaggtggtggagccccgaccccagctccaagcatctttaaccggtcagccaggccctttaccccgggcctacaagggcagcggccaactaccacctcggttattttccggcctttagcccccaaaagggcgaacgacagcctggggggcctcagccccgccccaccccccttcttgtcttcgcaggggcccacccctctgcccagcttcacttcaggggttcccagccacgcgccagtctctggttcccccagcaccccacgctcctcgggccctgtgacagccaccagctccctgtacatcccagcccctagtcggcctgtcaccccaggtggagctccagagccccccgctcctcctagcgcagctgccatgacctccaccgcttctatcttcctatctgcgcctttgcgaccctctgcgcgcccagaggcgcctgccccaggcccaggggctcctgagccccccagcgctcgcgagcagcgcatctctgtgccagctgcccgcacgggtatcctgcaggaggcccggcgccgggggacccggaagcagatgttccggccgggaaaggaggagacgaagaactcgcccaaccccgagctgctatcgctggtacagaacctggatgaaaagcctcgggccgggggtgcagaatctggtcctgaagaagatgctctgagcctcggggctgaagcctgcaacttcatgcagccagtaggggccaggagttacaagaccctgcctcacgtgacacctaagaccccccctccaatggctcccaagaccccgccccctatgactcctaagactccacccccagtggctcctaagcccccatctcgagggctccttgatgggctcgtgaatggggcagcctcttcggctggaatccctgagccaccaaggctgcagggcaggggtggggagctgtttgctaagcggcagagccgtgcggacaggtatgtggtggaaggtacacctggtcctggtcttggccctcggcctagaagtccttctcctaccccgtctctgcccccttcctggaaatattcacccaacatccgtgccccgcctcctattgcttacaacccactgctctctccctttttcccccaggcggcccgaactctccctaaggcccaatcccaggggcctcgggcaacacccaagcagggcatcaaggctctagattttatgcggcatcagccctatcaacttaaaactgccatgttctgttttgatgaggttcccccgactcctggccctatcgcctcagggtcccccaaaactgcccgagtccaggagattcgccggttttccactccggcaccccagcccactgcagaacccctggctcccactgtgcttgccccccgagcagccactacactggatgagcccatctggagaacagaactggcctcagcccctgttcctagcccagcccctcctccagaggctcccaggggccttggggcttctcccagctcctgcggtttccaggtagccaggccccgattttcagccaccagaacaggattgcaagctcatgtgtggaggcctggggcagggcaccagtgaacaggcacaggtcccaggaccaaggagaggtggaacatccagttcctaaagttgcttctcctaccctatcccatcccctgtcacgcatctggaagctaaattgcctcctgccagagatggtttccaagttgatgtccccttcccccaccttcctcctcactctctacctccctgccgctttccaaccaagtatgtctgctttggtatctttgcctctctttgtctctgcatttcctttcctggatctctgtctttatttccaggcttctccacccatattcctccacagatctctcttccttgacatttgtgcttttctccctgggcctcattttaatgttcagtgagaagtaaacagagcagaagtgaccactgggacttcaggcaagaagctcaccaccaggcacacagcaaagggactgaactgacccctgtttgcactaagccacccccaccccccactctgctttcccaagcttgactggcatatacctaggcctgtgtgtgtgtgtgtgtgtgtgtgtgtgtgtgtgtgtgtgctcttccgtctaaggcatgaataagaggggaggtcaaaataaagacccaatctgaggccgggcacggtggctcacgccggtaatcccagcactttgggaggccgaggcgggcggatcacgaggtcaggagatcgagaccatcctggctaacacggtgaaaccccatttccactaaaaatacaaaaaattagctgggcgtggtggcgagcgcctgtagtcccagctactcgggaggctgaggcaggagaatggcatgaacctggaaggcggagcttgcagtgagctgagattgcgccactgcactccagcctgggcgacggagcgagactctgtctcaaaacaaacaaacaaacaaaagacccaatctgagtcttatcgttgtactgatagaagggtcagatatccccacatggagttgagtgggagaaagagattcactagagaataactccttagagaccaatgtctgtagcaggtgtacagcatcttgtgaaagttatggagcatgaaaagactgaagggccaggacagtttgcatgggctgagttataccagctagaccaggaatagaacaaagaattctatacctcaggatttcaaaaagttagcaacttgagaggccagtgctgagcaacccagtacccaggaaatgaaaaaaagaaagaaaattccctccgagaatgaacaaatcattggcttcattgcctcatgagcttgagagaaaggagaagagagccagagtgtggcaagtgaggccaaaatcagaagcatggcagaaatgagtgtaagtgattgagccacagacagaagtgtggcgagggacaatgccatattgggagaaggtaaagttgagtaacaagaaaccaaccgtgtgtgagagggggattggaaaaaaatttgagggagaagaatgttagaatggaagggaatgatggtggaagggaggtgtgagggtgtgtgctgagtgttgaaagaacggttggtgtctgtgtgattttccttgagtctgttcttcagtgtgtcttctgcagcttgccatgactgcctgggaaagagtagggaaatacccagagccaaaacctcctttcagtcccaccccatccctcaaaaccccagctattgcttcttttcagcttcaggtcctgatctccaatcttagtatggactcccttctcaccaagaccaccaccagctacgtttgctgtgtaatctggaaagtgataatttcctttgcttgttgggtgtgagtcacaatactttggtttgtgcacaagaataaatttatgccccataccttc

SEQ ID NO: 20368 - protein, 753 aa, Homo sapiens; identical to SEQ ID NO: 2559

SEQ ID NO: 20369 - DNA, 2463 bp, Homo sapiens
tgcattctttcctgggatcttggagcaagcccagccattctttgccagctatggaattgaagcccctgctgctgccactttgaaagggtctttggaggaaagcagttgagattagcccatggtcctattagagaaggcacagttcctgaaagggtgtacattggttatagagcccagagagtttgtattctgagtcctgaataaaaggcccatgcaggagaattgggaacatggagggcagaagtttgtactataattagctctaggagtaacacagaagggggagggaggggagtacaagcggcatctattttgagcacatctgcgattgacgggacatgtgtgctggactgtaatgatcccagggccaagttgcctgcctgtggtgtgtggtgtgggggggaggcctggggcagcaggagcaggacagccggacaggaagcccagacggggttcgagcacctcaacttctctcctggggacactgttcaaactccgggggccataggccaagctgagcgatgggtgctgaggaggaggtgctggtcacactatcagggggagccccctggggcttccgacttcatgggggggccgagcagaggaaaccgttacaggtgtctaagattcgaagacggagccaggctggcagagcaggactccgagagagggaccagctcttggcaatcaatggggtctcttgcaccaacctctcccatgccagtgccatgagcctcatcgatgcctcaggaaatcagcttgtcctcactgtgcagcggttagcagacgagggtcctgtgcaatctccatctccccatgagcttcaggtgctgtcacccttatctccactaagtcctgagccccctggtgctccagttcctcagcctcttcagcctgggagccttcgttcacctcctgatagtgaggcttactacggagagactgacagtgatgctgatggccctgccacccaggagaagccccgtcgacctcgccgccgaggccccacaaggcccacccctccgggtgccccacctgatgaggtctacctgtctgacagccctgcagagccagcacctactatccctggccctcccagccagggtgacagccgtgtgagctccccgtcttgggaggatggggcagcccttcagccacccccagctgaggctctgctgttaccccatggccccctccgacctggtcctcatctcatccctatggtggggcctgttccccacccagtggcagaagatcttactaccacctacacccagaaggccaagcaagccaaactgcaacgtgcagagagcctccaagagaagagcataaaagaggccaagaccaaatgcaggacaattgcatccctgctcactgcagcccccaacccccactccaaaggggtacttatgtttaagaaacggcggcagagagccaagaagtacaccctggtgagcttcggggctgctgctgggacaggcgctgaggaggaggacggcgttccccccacgagtgagtccgagctggacgaagaagccttctctgacgcccgcagcctcaccaatcaatctgactgggacagtccctatctggacatggagcttgccagggcgggctcaagagcatcagagggccagggctctgggctgggagggcagctgagtgaggtctctgggcgaggggtgcagctctttgaacagcagcgccagcgcgcagactccagcacccaggaactggcacgggtcgaaccagcagccatgctcaacggggaaggcctgcagtcaccacctcgggcccagagtgctcccccagaggcagctgtgctcccacccagccccttgccggcgcctgtagccagccccagacccttccaaccaggtggtggagccccgaccccagctccaagcatctttaaccggtcagccaggccctttaccccgggcctacaagggcagcggccaactaccacctcggttattttccggcctttagcccccaaaagggcgaacgacagcctggggggcctcagccccgccccaccccccttcttgtcttcgcaggggcccacccctctgcccagcttcacttcaggggttcccagccacgcgccagtctctggttcccccagcaccccacgctcctcgggccctgtgacagccaccagctccctgtacatcccagcccctagtcggcctgtcaccccaggtggagctccagagccccccgctcctcctagcgcagctgccatgacctcctttcagtcccaccccatccctcaaaaccccagctattgcttcttttcagcttcaggtcctgatctccaatcttagtatggactcccttctcaccaagaccaccaccagctacgtttgctgtgtaatctggaaagtgataatttcctttgcttgttgggtgtgagtcacaatactttggtttgtgcacaagaataaatttatgccccat

SEQ ID NO: 20370 - protein, 602 aa, Homo sapiens
MGAEEEVLVTLSGGAPWGFRLHGGAEQRKPLQVSKIRRRSQAGRAGLRERDQLLAINGVSCTNLSHASAMSLIDASGNQLVLTVQRLADEGPVQSPSPHELQVLSPLSPLSPEPPGAPVPQPLQPGSLRSPPDSEAYYGETDSDADGPATQEKPRRPRRRGPTRPTPPGAPPDEVYLSDSPAEPAPTIPGPPSQGDSRVSSPSWEDGAALQPPPAEALLLPHGPLRPGPHLIPMVGPVPHPVAEDLTTTYTQKAKQAKLQRAESLQEKSIKEAKTKCRTIASLLTAAPNPHSKGVLMFKKRRQRAKKYTLVSFGAAAGTGAEEEDGVPPTSESELDEEAFSDARSLTNQSDWDSPYLDMELARAGSRASEGQGSGLGGQLSEVSGRGVQLFEQQRQRADSSTQELARVEPAAMLNGEGLQSPPRAQSAPPEAAVLPPSPLPAPVASPRPFQPGGGAPTPAPSIFNRSARPFTPGLQGQRPTTTSVIFRPLAPKRANDSLGGLSPAPPPFLSSQGPTPLPSFTSGVPSHAPVSGSPSTPRSSGPVTATSSLYIPAPSRPVTPGGAPEPPAPPSAAAMTSFQSHPIPQNPSYCFFSASGPDLQS

SEQ ID NO: 20371 - DNA, 1887 bp, Homo sapiens
gtgaccttggagatacctcatcatatcacacaaagagatgcagatagatctttgagcatacctgatgaacagttacactcatttgcggtttccaccgtgcacattacgaagaacagaaatggaggtgggagtttaaataactattcctcctccattccatcgactcccagcaccagccaggaggaccctcagttcagtgttcctcccactgccaacacacccacccccgtttgcaagcggtccatgcgctggtccaacctgtttacatctgagaaagggagtcacccagacaaagagaggaaagccccggagaatcatgctgacaccatcgggagcggcagagccatccccattaaacagggcatgctcttaaagcgaagtgggaaatggctgaagacatggaaaaagaaatacgtcaccctgtgttccaatggcgtgctcacctattattcaagcttaggtgattatatgaagaatattcataaaaaagagattgaccttcggacatctaccatcaaagtcccaggaaagtggccatccctagccacatcggcctgtgcacccatctccagctctaaaagcaatggcctatccaaggacatggacaccgggctgggtgactccatatgcttcagccccagtatctccagcaccaccagccccaagctcaacccgcccccctctcctcatgccaataaaaagaaacacctaaagaagaaaagcaccaacaactttatgattgtgtctgccactggccaaacatggcactttgaagccacgacgtatgaggagcgggatgcctgggtccaagccatccagagccagatcctggccagcctgcagtcatgcgagagcagtaaaagcaagtcccagctgaccagccagagcgaggccatggccctgcagtcgatccaaaacatgcgtgggaacgcccactgtgtggactatgagacccagaatcctaagtgggccagtttgaacttgggagtcctcatgtgtattgaatgctcaggaatccaccgcagtcttggcacccgcctttcccgtgtgcgatctctggagctggatgactggccagttgagctcaggaaggttatgtcatctattggcaatgacctagccaacagcatctgggaagggagcagccaggggcagacaaaaccctcagtaaagtccacgagggaagagaaggaacggtggatccgttccaaatatgaggagaagctctttctggccccactaccctgcactgagctgtccctgggccagcacctgctgcgggccaccgctgatgaggacctgcagacagccatcctgctgctggcacatggctcccgtgaggaggtgaacgagacctgtggggagggagacggctgcacggcgctccatctggcctgccgcaaggggaatgtggtcctggcacagctcctgatctggtacggggtggacgtcatggcccgagatgcccacgggaacacagcgctgacctacgcccggcaggcctccagccaggagtgcatcaacgtgcttctgcagtacggctgccccgacgagtgcgtgtagtatctgttttatttgactgcagtctccttggtgcaaaaacaaaatgggaaaaataaggataactcagaatttcaaaaggaaatcacaaattcagctagtaatagcattttcagtacttttcataaactaagtaaatacacaaaatgttgatttttctgaccataagacatattttatgtccttttgccaaggtggatgtgttagtctcaggccctcctggccacattgcccaagtcacacaggcttctgtattatgtatttagataaaatgtgtgaaaatatatttgaaaaaaaagttcataaatatgcattgatttttgtaca

SEQ ID NO: 20372 - protein, 439 aa, Homo sapiens [sequence omitted]

SEQ ID NO: 20373 - DNA, 2280 bp, Homo sapiens
atggggaacatactgacctgttgtgtgcaccctagcgtcagcctcgagtttgaccagcaacaggggtcggtgtgtccctctgaatctgagatctatgaggcaggagctggggacaggatggcaggagcgcccatggctgctgctgtgcagcctgctgaggtgaccgttgaagttggtgaggacctccacatgcaccacattcgtgaccaggagatgcctgaagctttggagtttaacccttctgccaatccagaggcaagcacaatattccagaggaactctcaaacagatgttgtagaaataagaagaagcaactgtacaaaccatgtatctactgagcgtttcagtcaacaatacagctcgtgttcgacaatattccttgatgacagcacagccagccagcattatcttacaatgacaataatatcagatgcagatagatctttgagcatacctgatgaacagttacactcatttgcggtttccaccgtgcacattacgaagaacagaaatggaggtgggagtttaaataactattcctcctccattccatcgactcccagcaccagccaggaggaccctcagttcagtgttcctcccactgccaacacacccacccccgtttgcaagcggtccatgcgctggtccaacctgtttacatctgagaaagggagtcacccagacaaagagaggaaagccccggagaatcatgctgacaccatcgggagcggcagagccatccccattaaacagggcatgctcttaaagcgaagtgggaaatggctgaagacatggaaaaagaaatacgtcaccctgtgttccaatggcgtgctcacctattattcaagcttaggtgattatatgaagaatattcataaaaaagagattgaccttcggacatctaccatcaaagtcccaggaaagtggccatccctagccacatcggcctgtgcacccatctccagctctaaaagcaatggcctatccaaggacatggacaccgggctgggtgactccatatgcttcagccccagtatctccagcaccaccagccccaagctcaacccgcccccctctcctcatgccaataaaaagaaacacctaaagaagaaaagcaccaacaactttatgattgtgtctgccactggccaaacatggcactttgaagccacgacgtatgaggagcgggatgcctgggtccaagccatccagagccagatcctggccagcctgcagtcatgcgagagcagtaaaagcaagtcccagctgaccagccagagcgaggccatggccctgcagtcgatccaaaacatgcgtgggaacgcccactgtgtggactatgagacccagaatcctaagtgggccagtttgaacttgggagtcctcatgtgtattgaatgctcaggaatccaccgcagtcttggcacccgcctttcccgtgtgcgatctctggagctggatgactggccagttgagctcaggaaggttatgtcatctattggcaatgacctagccaacagcatctgggaagggagcagccaggggcagacaaaaccctcagtaaagtccacgagggaagagaaggaacggtggatccgttccaaatatgaggagaagctctttctggccccactaccctgcactgagctgtccctgggccagcacctgctgcgggccaccgctgatgaggacctgcagacagccatcctgctgctggcacatggctcccgtgaggaggtgaacgagacctgtggggagggagacggctgcacggcgctccatctggcctgccgcaaggggaatgtggtcctggcacagctcctgatctggtacggggtggacgtcatggcccgagatgcccacgggaacacagcgctgacctacgcccggcaggcctccagccaggagtgcatcaacgtgcttctgcagtacggctgccccgacgagtgcgtgtagtatctgttttatttgactgcagtctccttggtgcaaaaacaaaatgggaaaaataaggataactcagaatttcaaaaggaaatcacaaattcagctagtaatagcattttcagtacttttcataaactaagtaaatacacaaaatgttgatttttctgaccataagacatattttatgtccttttgccaaggtggatgtgttagtctcaggccctcctggccacattgcccaagtcacacaggcttctgtattatgtatttagataaaatgtgtgaaaatatatttgaaaaaaaagttcataaatatgcattgatttttgtaca

SEQ ID NO: 20374 - protein, 651 aa, Homo sapiens
MGNILTCCVHPSVSLEFDQQQGSVCPSESEIYEAGAGDRMAGAPMAAAVQPAEVTVEVGEDLHMHHIRDQEMPEALEFNPSANPEASTIFQRNSQTDVVEIRRSNCTNHVSTERFSQQYSSCSTIFLDDSTASQHYLTMTIISDADRSLSIPDEQLHSFAVSTVHITKNRNGGGSLNNYSSSIPSTPSTSQEDPQFSVPPTANTPTPVCKRSMRWSNLFTSEKGSHPDKERKAPENHADTIGSGRAIPIKQGMLLKRSGKWLKTWKKKYVTLCSNGVLTYYSSLGDYMKNIHKKEIDLRTSTIKVPGKWPSLATSACAPISSSKSNGLSKDMDTGLGDSICFSPSISSTTSPKLNPPPSPHANKKKHLKKKSTNNFMIVSATGQTWHFEATTYEERDAWVQAIQSQILASLQSCESSKSKSQLTSQSEAMALQSIQNMRGNAHCVDYETQNPKWASLNLGVLMCIECSGIHRSLGTRLSRVRSLELDDWPVELRKVMSSIGNDLANSIWEGSSQGQTKPSVKSTREEKERWIRSKYEEKLFLAPLPCTELSLGQHLLRATADEDLQTAILLLAHGSREEVNETCGEGDGCTALHLACRKGNVVLAQLLIWYGVDVMARDAHGNTALTYARQASSQECINVLLQYGCPDECV

SEQ ID NO: 20375 - DNA, 1199 bp, Homo sapiens
ccaaggaagtatatttaaatcaaagcaagaaatcccatttccaaatggcaataaagcatgtgttacatagaatcagtgcatgaaagtgttttagtagcccagattagattgtaccctggcaaataagcaagagttctttttcattttcatcttgcaattcaactgggtatttgggttctttttctattcactcatgtcagatagagacatacatgttgtaaattattttgtcagaatgaaagcctggcagattaaatgctttcttctcttcttgctttacttgatatcaatctcttgttcatttcttgataatatgtttggttatttttgttttcattgcttttagtgtcagagatggctttggattccccgttctgtgtgctgctgtctggctcctgaacccagctgtagaggtgtgtcaatcccaactggtgaagtactgagaggaagctacacaaaaggcagcaaagtattagtgagtggtgtcattgagcaaacacgaagtcgggctcatccaaggatgagattttgccagagaaaggacgagcagcaagtcagggagcttaaggtggtggaaaggaaatccctcacagcaactggcaccataatcaagacagaatgtttgcagaataaatggagttacctgctttcagccccaggttgtagctattgtctgccctgatgatatgtgataataatttgtgatcctattgtcttaaaatggggtcactcatctccagtagaattaagtccacagtgaagttgtccccccatccccaaagagataaacatatatgaatgaactcacatgataacaactactgctgcctgggatcatgagagacctgaactgaactgataggaagtgaaaggtggctgagataatgagaatagacccatctgcagaggatcataaaaccagcaaagacaagatcttgtctaagatgccttcacaaactttgtccatgagaactctaaggacttctccagacctgttggctgctgctgtgatctctgcccaagaggagcctctgaccaacatccaaagggcttctggacccactggactcctctggaggtaccttggtctcccgatccatggctgtggttttttactccgtttatcactcctgtgtgtagaatgataattgcacaattgatagtgtgaacacctcttgataaatggtaaatctgagcat

SEQ ID NO: 20376 - protein, 53 aa, Homo sapiens
MRFCQRKDEQQVRELKVVERKSLTATGTIIKTECLQNKWSYLLSAPGCSYCLP

SEQ ID NO: 20377 - DNA, 691 bp, Homo sapiens
tatccaaacaaacatcagatgtgaccagcagatgttactttacggttatttaagaggagcgcacttgaaaaataaaagccaaattcacatgccaggacgaggtggggcccacccatgagctggtccagagtctcatctccacccactccaccattgatgccaagatggcttcaagtcgagtgatgttgttttctgattccaagccacttgggtcagaggctatagataatcaaggggacgagttctcactatgttgcccaggctggcctcgaactcctgggctcaagcaatcctcctgcgttggcctcccaaagtcctgggattacaggtgtaagccactacggctggcctattattgctgtattctaacttattcatctcctatgtgtcagagatggctttggattccccgttctgtgtgctgctgtctggctcctgaacccagctgtagaggtgtgtcaatcccaactggtgaagtactgagaggaagctacacaaaaggcagcaaagtattagtgagtggtgtcattgagcaaacacgaagtcgggctcatccaaggatgagattttgccagagaaaggacgagcagcaagtcagggagcttaagagacgaggtttcactatgtaggcaaagctggtctcgaactcctgacctcagatgatccacccgcctcagcctcccaaagtgct

SEQ ID NO: 20378 - protein, 154 aa, Homo sapiens
MASSRVMLFSDSKPLGSEAIDNQGDEFSLCCPGWPRTPGLKQSSCVGLPKSWDYRCKPLRLAYYCCILTYSSPMCQRWLWIPRSVCCCLAPEPSCRGVSIPTGEVLRGSYTKGSKVLVSGVIEQTRSRAHPRMRFCQRKDEQQVRELKRRGFTM

SEQ ID NO: 20379 - DNA, 560 bp, Homo sapiens
cccagattagattgtaccctggcaaataagcaagagttctttttcattttcatcttgcaattcaactgggtatttgggttctttttctattcactcatgtcagatagagacatacatgttgtaaattattttgtcagaatgaaagcctggcagattaaatgctttcttctcttcttgctttacttgatatcaatctcttgttcatttcttgataatatgtttggttatttttgttttcattgcttttagtgtcagagatggctttggattccccgttctgtgtgctgctgtctggctcctgaacccagctgtagaggtgtgtcaatcccaactggtgaagtactgagaggaagctacacaaaaggcagcaaagtattagtgagtggtgtcattgagcaaacacgaagtcgggctcatccaaggatgagattttgccagagaaaggacgagcagcaagtcagggagcttaaggtaattatgggaaagtgactatctacaattgcttaggtagaaggagacagattggatttttgtgtgtttggtatttgggataagaggga

SEQ ID NO: 20380 - protein, 50 aa, Homo sapiens
MSDRDIHVVNYFVRMKAWQIKCFLLFLLYLISISCSFLDNMFGYFCFHCF

SEQ ID NO: 20381 - DNA, 624 bp, Homo sapiens
gcagtggcgtgatcttggctcactgcagccttgaactcccaggctcaagtggatcctccctcttcagccccgcaagtagctgggactacaggagtgcaccaccacccccatctaatatttttttgttgttattctagggacgagttctcactatgttgcccaggctggcctcgaactcctgggctcaagcaatcctcctgcgttggcctcccaaagtcctgggattacaggtgtaagccactacggctggcctattattgctgtattctaacttattcatctcctatggctagcctccaagctggaagctgaattgacagttgaaaaataatgacatgtatacaaggtatgtttgaaggattgcagatgcaggggcaccatatgctaaaggagtgttggaagctcactgcagaagatgacaaaagcagactgatatgtattatttgctgaaatataagctggaggcacaggtgaagattgccaaacctaatgaacagtttggcaaataagacaggctgtcaggccatggcagttcagcagtgggcgtgctgcctgtgaaccaagtcatttgttccagaggactacacttaaataccacaaataaaatcttccttgtcactgata

SEQ ID NO: 20382 - protein, 39 aa, Homo sapiens
MTCIQGMFEGLQMQGHHMLKECWKLTAEDDKSRLICIIC

SEQ ID NO: 20383 - DNA, 1725 bp, Homo sapiens
gacctgaggagtcacagttgtgagcaagttcggtgccgcgggctggggtaggcggcagtggggtccctggctttggggcactgggaagatcgcgagtgggaaggtcctcccgcggtcctccgggtcatctttcctcctgaggagcagcatatttcgcatctgccggagattagaattacttgttattggtaaatagccactatggagactaaggaccagaagaaacaaagaaagaaaaatagtggacccaaagctgcaaagaaaaagaagcggcatctgcaggatctccagctaggagacgaagaagatgcctggaagagaaatcccaaagcttttgcatttcagtctgctgtgtggatggctcgatcctttcacaggactcaggatttgaagacaaaaaagcatcatattccagtggttgatcgaactccactagagcccccaccaatagtggtagtggtgatggggcctccaaagttggaaagagcactttgatacaatgcctcattcggaacttcacccggcagaagttgaccgagatcagaggccctgtgatgatcgtgtcaggtaaaaagctccgactcaccattattgaatgtgggtgtgacattaacatgatgattgatctggctgaagtagcagatctggtactgatgcttatagatgccagctttgggtttgaaatggaaacgtttgagtttctaaacatctgtcaagtacatggctttcctaaaattatgggagttctcacccacctcgacttcttcaaacacaataagcaactgaagaagacaaagaagcgattaaaacacaggttctggacagaagtttacctggttgccaagctgttctgcctttctggaatggtgcatggagaatatcaaaaccaagaaatgcacaatctgggccattttattacagttatgaagtttaggcctctcacatggcagacttctcatccttatatcctggcagacagggtggaagatttgacaaacccagaggatatccaaacaaacatcagatgtgaccagcagatgttactttacggttatttaagaggagcgcacttgaaaaataaaagccaaattcacatgccaggacgaggtggggcccacccatgagctggtccagagtctcatctccacccactccaccattgatgccaagatggcttcaagtcgagtgatgttgttttctgattccaagccacttgggtcagaggctatagataatcaaggggacgagttctcactatgttgcccaggctggcctcgaactcctgggctcaagcaatcctcctgcgttggcctcccaaagtcctgggattacaggtgtaagccactacggctggcctattattgctgtattctaacttattcatctcctatggctagcctccaagctggaagctgaattgacagttgaaaaataatgacatgtatacaaggtatgtttgaaggattgcagatgcaggggcaccatatgctaaaggagtgttggaagctcactgcagaagatgacaaaagcagactgatatgtattatttgctgaaatataagctggaggcacaggtgaagattgccaaacctaatgaacagtttggcaaataagacaggctgtcaggccatggcagttcagcagtgggcgtgctgcctgtgaaccaagtcatttgttccagaggactacacttaaataccacaaataaaatcttccttgtcactg

SEQ ID NO: 20384 - protein, 189 aa, Homo sapiens; identical to SEQ ID NO: 5008

SEQ ID NO: 20385 - DNA, 1269 bp, Homo sapiens
atggagactaaggaccagaagaaacaaagaaagaaaaatagtggacccaaagctgcaaagaaaaagaagcggcatctgcaggatctccagctaggagacgaagaagatgcctggaagagaaatcccaaagcttttgcatttcagtctgctgtgtggatggctcgatcctttcacaggactcaggatttgaagacaaaaaagcatcatattccagtggttgatcgaactccactagagcccccaccaatagtgaagttgaccgagatcagaggccctgtgatgatcgtgtcaggtaaaaagctccgactcaccattattgaatgtgggtgtgacattaacatgatgattgatctggctgaagtagcagatctggtactgatgcttatagatgccagctttgggtttgaaatggaaacgtttgagtttctaaacatctgtcaagtacatggctttcctaaaattatgggagttctcacccacctcgacttcttcaaacacaataagcaactgaagaagacaaagaagcgattaaaacacaggttctggacagaagtttacctggttgccaagctgttctgcctttctggaatggtgcatggagaatatcaaaaccaagaaatgcacaatctgggccattttattacagttatgaagtttaggcctctcacatggcagacttctcatccttatatcctggcagacagggtggaagatttgacaaacccagaggatatccaaacaaacatcagatgtgaccagcagatgttactttacggttatttaagaggagcgcacttgaaaaataaaagccaaattcacatgccaggggtagaagattttgccatgagtgacatcagtttcttcccagacccttgtgctcttactgaacaacaaaagaagtgctgtttaaataagaaggagcagctggtttatgcgcctgtttttggagttgggggtgtgctgtatgacaaagacgctgtctatgttgaccttggtggcagccacggttttcaggcatcagacgaggtggggcccacccatgagctggtccagagtctcatctccacccactccaccattgatgccaagatggcttcaagtcgagtgatgttgttttctgattccaagccacttgggtcagaggctatagataatcaagggctgttgatgctaaaggaggaaaaacaaatggacttgaaaactggtcgaatgcatcggaaagccatttttggagatgattctatgctaacatcctctctcctttcttga

SEQ ID NO: 20386 - protein, 422 aa, Homo sapiens
METKDQKKQRKKNSGPKAAKKKKRHLQDLQLGDEEDAWKRNPKAFAFQSAVWMARSFHRTQDLKTKKHHIPVVDRTPLEPPPIVKLTEIRGPVMIVSGKKLRLTIIECGCDINMMIDLAEVADLVLMLIDASFGFEMETFEFLNICQVHGFPKIMGVLTHLDFFKHNKQLKKTKKRLKHRFWTEVYLVAKLFCLSGMVHGEYQNQEMHNLGHFITVMKFRPLTWQTSHPYILADRVEDLTNPEDIQTNIRCDQQMLLYGYLRGAHLKNKSQIHMPGVEDFAMSDISFFPDPCALTEQQKKCCLNKKEQLVYAPVFGVGGVLYDKDAVYVDLGGSHGFQASDEVGPTHELVQSLISTHSTIDAKMASSRVMLFSDSKPLGSEAIDNQGLLMLKEEKQMDLKTGRMHRKAIFGDDSMLTSSLLS

SEQ ID NO: 20387 - DNA, 979 bp, Homo sapiens
gggatacttaacctataatatacaaaggattttatatccccttataaatatgacatgttcaactattctgcaagagggactatggaaacccctagaaatgtcacttaaggagaatctgggggcattcgggaataattatttgaaaaattgcaactagagagaaggaggagtaaaatggttgacgagaagctttcactaattatccttcctgctggaacaccaaactgaacaactatccacagggtgaaaacccagggtattatatccttagaatttatttctaccagaaagttgccactttatatattctgccaacaagcttgcttgcaagaggagaagccactattattcccgagtcagtggcatgaacacgtggactgcagagataactgaggtaagaaagctatgaacctggaacaagaatcatggggagaagcaatatgcaattttgtgaattatgaatttaagttcataaagggaactgggattgggaccctgtgggaagccctgaagaagaaagaccaggaaaattggtaagagaatcatttcagtttgaatgaaccaggacaaggcaccagagggctttaaccagccatgctgaccacagaatggtgcttaactcagtgccctcttgaatacagaaggaaaaagggcaggcttaaattaaggctgtgcccaggcatcaatgaggtgacgagaagactaaggcttagaagacttaagtaacttgcaaaggtcatggagtgatcaggtggctatgcatataatcccaagagtagtctgtgtgaaagcttatgtgctctatgctgcttttctacatcagaaaggtggaaattctccctctctgttgtatccctcacagaatgaccacatgattattctgatagcttaatgaaaagtgtgttcctggctaggcaaacttctcatttgcttagttcagtgctggatataaagaagatgaatgtggcctcagacatct

SEQ ID NO: 20388 - protein, 43 aa, Homo sapiens
MLTTEWCLTQCPLEYRRKKGRLKLRLCPGINEVTRRLRLRRLK

SEQ ID NO: 20389 - DNA, 2364 bp, Homo sapiens
ggactaatccaatatggctgagatccttatcaaaaggagaaattcagtcacagggacagacaggtacagagagaagatgatgtcaagagacaacgggagaatgccacatgaaggtggaggattggagtaatgcatctacaagccaagaaaaccttgttgggagtttgattagacggctgagaaagacagcaaatctacagggtttgtcaaagataagatcgttgtcatggcatgaaaaggatgacctttccagtctgcaatacctgcttgaccactaagaccaaacagctcaaattaaaggtaacaaattccgcagaggcaattgttcaacacaggaaaaagaaaccactttaaggattttaaactggaagagattttacataagctgttttaaacaaaaccattggatgacctggagtaacagtgtcggaaactcagctgagctggatagagaactgagctgcccgttgttggagaagttgattaaagcagcagccgaagatcgaagtaacagtcaagactgtaatcacttactgcaatagtataagcaagaggccaaaaccaaagaaactgccaactcacccaggtcttctaaattccccagaaaggtgcactagtggagggtcagtgaatcaggacagacatgggggtcagctcacgattgaggaagccccaaacaaaaatctccagtagtattatgaaccctggagcaggaggttggagtgagacaaggagagctaggagtagaagagtatggagtcggaggagggaacggtttcttaaggtctcctcccactctactcttaagaaagcttcagtagaagcacctgaagaaaactccagcaggaagccctcagataaagaaacttctgaatgaagacacctaggctaggaatgcaaatatgtttaagagcatgggccattaggggaatctgagttccagaatgcaattctctttaaagattgcaatgcactgggtatgccccaagtctggggagggcaactttcctcggaggggtttgccagataaagcctttgtcattgcctgtggttgggcctgaaatatcaaacatagatttttggccaggactcctcagcaggatctagtcagggccttcacaaagtacattcagaatgacaattgacccaccagaaagccatcatgccaccacttgatattttaaatgaaaagacccaccaacatatctgatatccatatctgatacccagtagaattggaatgctgctatcaccactgtcactattgtcactaccacacctgcctctagaaacccagcaatctggaggatggaccctggataatgttgcaggcaaacctcatttctctacaactgtgctttccaccaacagtcgattaaaggaagacgaagatcgagtgtgtgtggatgatacagcaaataaaccttcttctagttcttaaagattatggttttcagtgtttagtgagcatccgtgttcatctttaaaggatagaaaaatgcaggaggcatcttgtatccatgaagatactaaaacacggatttcctcaggaaattgatcactcaagcatccataatcttagtagactgcccttatagtcgtattgcagaatgtgtgatctgccatctactgagggctcatttttccctctcctctctcatccaagattggtgatagtttcaaatttttctcccactattatgtagaataatttccaaacttgacactcaattgaatcatggtgtccaggaaaatagataaaataaatatgacttcatataccagaagtcatattcctttgaatacaatcagggccataaatggcacttgcttctataacacaaagtgctattataattatatacatgattttttaaataattaagtaacttggaaccagtttctattgcaataattataagaaacaaagacctccaactgaatgaacccctctgaaatattttaataaactctgaggagtactatttgtcaagcaaagaaatactgaattaaggtaaatgccagcttaggatgaaaagaacagcaacagtgcctaccttcattacctcagcctctccctggctaagataatcacttaatcttttatgcctttgctaaaacctcattagtaaaaaggagacctgcctactaagcataaggttaaggctttaatggactttagaaatcatttacttttatgactcaaagcactgaagtgcaaattctttttatttgaatatttgagggcattaaatgagcatttttaatggatttcaattgtcaggataaaataaaatttctcaaggggaatctgaattttaacaaacattaaaatcaaagaagtaaaaagatgaataaatggag

SEQ ID NO: 20390 - protein, 56 aa, Homo sapiens; identical to SEQ ID NO: 5028

SEQ ID NO: 20391 - DNA, 896 bp, Homo sapiens
attcaatgtttagctgccacttataggtgagaacatgtagtatttggttttctctttcgtttagctcatttaggatagtggcctccagctctatccacgttctgacaaagaaaaccttgttgggagtttgattagacggctgagaaagacagcaaatctacagggtttgtcaaagataagatcgttgtcatggcatgaaaaggatgacctttccagtctgcaatacctgcttgaccactaagaccaaacagctcaaattaaaggtaacaaattccgcagaggcaattgttcaacacaggaaaaagaaaccactttaaggattttaaactggaagagattttacataagctgttttaaacaaaaccattggatgacctggagtaacagtgtcggaaactcagctgagctggatagagaactgagctgcccgttgttggagaagttgattaaagcagcagccgaagatcgaagtaacagtcaagactgtaatcacttactgcaatagtataagcaagaggccaaaaccaaagaaactgccaactcacccaggtcttctaaattccccagaaaggtgcactagtggagggtcagtgaatcaggacagacatgggggtcagctcacgattgaggaagccccaaacaaaaatctccagtagtattatgaaccctggagcaggaggttggagtgagacaaggagagctaggagtagaagagtatggagtcggaggagggaacggtttcttaaggtctcctcccactctactcttaagaaagcttcagtagaagcacctgaagaaaactccagcaggaagccctcagataaagaaacttctgaatgaagacacctaggctaggaatgcaaatatgtttaagagcatgggccattaggggaatc

SEQ ID NO: 20392 - protein, 77 aa, Homo sapiens
MGVSSRLRKPQTKISSSIMNPGAGGWSETRRARSRRVWSRRRERFLKVSSHSTLKKASVEAPEENSSRKPSDKETSE

SEQ ID NO: 20393 - DNA, 3344 bp, Homo sapiens
gtcgggggccgaagcgcctcccgcagggagtccccgtgaggccgcgctgccgcgttacccgcagcggccgggggtccggggagtgcggggctccgagacagagccaggcgccccccagcggtcggcgcgggccccatggctgggccgggcggagcggaaccggtgaggtgaagccccggggccggcagccggaggcgcgtggccggggcgccggctccatgggcagcggcacacggcggcgcgatgatggacgttaacagcagcggccgcccggacctctacgggcacctccgctctttccttctgccagaagtggggcgcgggctgcccgacttgagccccgacggtggcgccgacccggtcgcgggctcctgggcgccgcacctgctgagcgaggtgacagccagcccggcgcccacctgggacgcgcccccggacaatgcctccggctgtggggaacagatcaactacggcagagtcgagaaagttgtgatcggctccatcctgacgctcatcacgctgctgacgatcgcgggcaactgcctggtggtgatctccgtgtgcttcgtcaagaagctccgccagccctccaactacctgatcgtgtccctggcgctggccgacctctcggtggctgtggcggtcatgcccttcgtcagcgtcaccgacctcatcgggggcaagtggatctttggacactttttctgtaatgtcttcatcgccatggacgtcatgtgctgcacggcctcgatcatgaccctgtgcgtgatcagcattgacaggtaccttgggatcacaaggcccctcacataccctgtgaggcagaatgggaaatgcatggcgaagatgattctctccgtctggcttctctccgcctccatcaccttacctccactctttggatgggctcagaatgtaaatgatgataaggtgtgcttgatcagccaggactttggctatacgatttactctaccgcagtggcattttatatccccatgtccgtcatgcttttcatgtactaccagatttacaaggctgccaggaagagtgctgccaaacacaagtttcctggcttccctcgagtggagccagacagcgtcatcgccctgaatggcatagtgaagctccagaaggaggtggaagagtgtgcaaacctttcgagactcctcaagcatgaaaggaaaaacatctccatctttaagcgagaacagaaagcagccaccaccctggggatcatcgtcggggcctttaccgtgtgctggctgccatttttcctcctctcgacagccagacccttcatctgtggcacttcctgcagctgcatcccactgtgggtggagaggacatttctgtggctaggctatgcaaactctctcattaacccttttatatatgccttcttcaaccgggacctgaggaccacctatcgcagcctgctccagtgccagtaccggaatatcaaccggaagctctcagctgcaggcatgcatgaagccctgaagcttgctgagaggccagagagacctgagtttgtgctgagggcctgcacaaggagggtgctgttgagaccagaaaagaggccaccggtatctgtgtgggtgctacaatctccagaccatcacaattggttagcagacaaaatgctgactactgtagaaaaaaaggtcatgattcatgattgaaagcagaacaatggagatgaaataaacaaggcaaaatagaggtggaaacagaaggaagtcatttgctgagtctgcagaatggaatgcagcttctgtcctttcttgggatgtctaaaacatgacaaacagggtgatctgttgtacacactatcttatgagggagatggtgacttctccttttttctgtggatcagtgctattgtgtgttctcagtttaagatagcagatcatctcagcagtaagcacaccaacagaactgagttccagaaaggaagcagtttctggtgctttgcatatgtccaaatccatgcaagtgggagaaagttccagtgcacacttcccatgcttctgagtctaggcgttgtggtgaatatgcaggaatcattcatgagacagaatgtattttgttgtatgacagaaggcttttccaagcaaactgcggtgagcgtagtgttgaatatgttgcatgtccatgttagaaaacagaatccagtcatcagctaatacaaatgatttcccagagcagtgtttgtttcaagcttctgtcaaatagtttggcttttctgcagggtctctgtgatttccccacctatgtacttttctgtgttaactcacttattatggtataactcaggaacaggtctcaggatggagagaagcatacaacatgagcaaagctttttctcgtgctctgaagggtcttgagaggggagtgggatgccttctgtgaggatttttatcgcagtgaagctcaagtggtacccaactgcgttgtaattaacatgattattggcatgtttttgactctcattttctacaaggctgcagtgggcccacccatgggctggcccataactgtatgttatgtggaagaagtgtgggaatgatgggttttccatgaaatgtgatgcttctggagatggggcataaacatgttcattcttgttgagctgcattgtgttaaaccaaattgtgtgaagcgaggtcacctggaccactcttgggaaatgcttcagaacaccagtctgttccttctagagaatttgtttttgtgttctatgtatcttaaatcaaatgtgtgcctaagcaattctgtcctctgattcccacccctacccaccaaaaaatggtagacatgaaaggcaggtgaggaaacagaaaaggtctctttgcagatatatattttttaaatggcactatgtagtaattaagagctaaggagacagaaagacagtagatgagaatagaagagtacctgtacctacaaggggaaaaatgaatgcaattctttatttgataagagtgaactgaaagagaatattattttcctacaataaagcaagctgtcctctcacaggataaagtggaattctgacatggattatggacttcttctaactcccattgacattgcttcttaccagacatggggaaaagctacctttcctgaaaggggaggagggcactgtcctttcagacaaagcttgtacaaattcctgaaccgcaaatttgctgaagtgaccgtatatattatattcataatttaaatgattatttatggtcagatacatattgttaaacttgaaaatgttttattacattacatcaaataaagtttatttgtagctgaaataaagcaacgtaagtaacaatttttaatt

SEQ ID NO: 20394 - protein, 479 aa, Homo sapiens; identical to SEQ ID NO: 2563

SEQ ID NO: 20395 - DNA, 3246 bp, Homo sapiens
gtcgggggccgaagcgcctcccgcagggagtccccgtgaggccgcgctgccgcgttacccgcagcggccgggggtccggggagtgcggggctccgagacagagccaggcgccccccagcggtcggcgcgggccccatggctgggccgggcggagcggaaccggtgaggtgaagccccggggccggcagccggaggcgcgtggccggggcgccggctccatgggcagcggcacacggcggcgcgatgatggacgttaacagcagcggccgcccggacctctacgggcacctccgctctttccttctgccagaagtggggcgcgggctgcccgacttgagccccgacggtggcgccgacccggtcgcgggctcctgggcgccgcacctgctgagcgaggtgacagccagcccggcgcccacctgggacgcgcccccggacaatgcctccggctgtggggaacagatcaactacggcagagtcgagaaagttgtgatcggctccatcctgacgctcatcacgctgctgacgatcgcgggcaactgcctggtggtgatctccgtgtgcttcgtcaagaagctccgccagccctccaactacctgatcgtgtccctggcgctggccgacctctcggtggctgtggcggtcatgcccttcgtcagcgtcaccgacctcatcgggggcaagtggatctttggacactttttctgtaatgtcttcatcgccatggacgtcatgtgctgcacggcctcgatcatgaccctgtgcgtgatcagcattgacaggtaccttgggatcacaaggcccctcacataccctgtgaggcagaatgggaaatgcatggcgaagatgattctctccgtctggcttctctccgcctccatcaccttacctccactctttggatgggctcagaatgtaaatgatgataaggtgtgcttgatcagccaggactttggctatacgatttactctaccgcagtggcattttatatccccatgtccgtcatgcttttcatgtactaccagatttacaaggctgccaggaagagtgctgccaaacacaagtttcctggcttccctcgagtggagccagacagcgtcatcgccctgaatggcatagtgaagctccagaaggaggtggaagagtgtgcaaacctttcgagactcctcaagcatgaaaggaaaaacatctccatctttaagcgagaacagaaagcagccaccaccctggggatcatcgtcggggcctttaccgtgtgctggctgccatttttcctcctctcgacagccagacccttcatctgtggcacttcctgcagctgcatcccactgtgggtggagaggacatttctgtggctaggctatgcaaactctctcattaacccttttatatatgccttcttcaaccgggacctgaggaccacctatcgcagcctgctccagtgccagtaccggaatatcaaccggaagctctcagctgcaggcatgcatgaagccctgaagcttgctgagaggccagagagacctgagtttgtgctacaaaatgctgactactgtagaaaaaaaggtcatgattcatgattgaaagcagaacaatggagatgaaataaacaaggcaaaatagaggtggaaacagaaggaagtcatttgctgagtctgcagaatggaatgcagcttctgtcctttcttgggatgtctaaaacatgacaaacagggtgatctgttgtacacactatcttatgagggagatggtgacttctccttttttctgtggatcagtgctattgtgtgttctcagtttaagatagcagatcatctcagcagtaagcacaccaacagaactgagttccagaaaggaagcagtttctggtgctttgcatatgtccaaatccatgcaagtgggagaaagttccagtgcacacttcccatgcttctgagtctaggcgttgtggtgaatatgcaggaatcattcatgagacagaatgtattttgttgtatgacagaaggcttttccaagcaaactgcggtgagcgtagtgttgaatatgttgcatgtccatgttagaaaacagaatccagtcatcagctaatacaaatgatttcccagagcagtgtttgtttcaagcttctgtcaaatagtttggcttttctgcagggtctctgtgatttccccacctatgtacttttctgtgttaactcacttattatggtataactcaggaacaggtctcaggatggagagaagcatacaacatgagcaaagctttttctcgtgctctgaagggtcttgagaggggagtgggatgccttctgtgaggatttttatcgcagtgaagctcaagtggtacccaactgcgttgtaattaacatgattattggcatgtttttgactctcattttctacaaggctgcagtgggcccacccatgggctggcccataactgtatgttatgtggaagaagtgtgggaatgatgggttttccatgaaatgtgatgcttctggagatggggcataaacatgttcattcttgttgagctgcattgtgttaaaccaaattgtgtgaagcgaggtcacctggaccactcttgggaaatgcttcagaacaccagtctgttccttctagagaatttgtttttgtgttctatgtatcttaaatcaaatgtgtgcctaagcaattctgtcctctgattcccacccctacccaccaaaaaatggtagacatgaaaggcaggtgaggaaacagaaaaggtctctttgcagatatatattttttaaatggcactatgtagtaattaagagctaaggagacagaaagacagtagatgagaatagaagagtacctgtacctacaaggggaaaaatgaatgcaattctttatttgataagagtgaactgaaagagaatattattttcctacaataaagcaagctgtcctctcacaggataaagtggaattctgacatggattatggacttcttctaactcccattgacattgcttcttaccagacatggggaaaagctacctttcctgaaaggggaggagggcactgtcctttcagacaaagcttgtacaaattcctgaaccgcaaatttgctgaagtgaccgtatatattatattcataatttaaatgattatttatggtcagatacatattgttaaacttgaaaatgttttattacattacatcaaataaagtttatttgtagctgaaataaagcaacgtaagtaacaatttttaatt

SEQ ID NO: 20396 - protein, 445 aa, Homo sapiens; identical to SEQ ID NO: 2561

SEQ ID NO: 20397 - DNA, 2612 bp, Homo sapiens
cacacacaaacgccttcttcccggagtattgaatagttgggaattggaacccctccagggggaaccaaacattgtcgttcagaagaagacaaagagagattgaaatgaagctgttgatttcaacacacaaattctggtggtagatgaaagcaaagcaagtaagtttctccgaatccctagtcaactggaggtagagacggactgcgcaggttaactacagctcccagcatgcctgaggggcgggctcagcggctgcgcagactggcgcgcgcggacggtcatgggacttcagcatggcggtgtttgcagatttggacctgcgagcgggttctgacctgaaggctctgcgcggacttgtggagacagccgctcaccttggctattcagttgttgctatcaatcatatcgttgactttaaggaaaagaaacaggaaattgaaaaaccagtagctgtttctgaactcttcacaactttgccaattgtacagggaaaatcaagaccaattaaaattttaactagattaacaattattgtctcggatccatctcactgcaatgttttgagagcaacttcttcaagggcccggctctatgatgttgttgcagtttttccaaagacagaaaagctttttcatattgcttgcacacatttagatgtggatttagtctgcataactgtaacagagaaactaccattttacttcaaaagacctcctattaatgtggcgattgaccgaggcctggcttttgaacttgtctatagccctgctatcaaagactccacaatgagaaggtatacaatttccagtgccctcaatttgatgcaaatctgcaaaggaaagaatgtaattatatctagtgctgcagaaaggcctttagaaataagagggccatatgacgtggcaaatctaggcttgctgtttgggctctctgaaagtgacgccaaggctgcggtgtccaccaactgccgagcagcgcttctccatggagaaactagaaaaactgcttttggaattatctctacagtgaagaaacctcggccatcagaaggagatgaagattgtcttccagcttccaagaaagccaagtgtgagggctgaaaagaatgccccagtctctgtcagcactcccttcttcccttttatagttcatcagccacaacaaaaataaaacctttgtgtgatttactgttttcatttggagctagaaatcaatagtctataaaaacagttttacttgcaatccattaaaacaacaaacgaaacctagtgaagcatctttttaaaaggctgccagcttaatgaatttagatgtactttaagagagaaagactggttatttctcctttgtgtaagtgataaacaacagcaaatatacttgaataaaatgtttcaggtatttttgtttcattttgtttttgagatagggtctttgttgctcaggctggagtacagtggcataatcacagctcactgcaacctcaatcctgggctcaagtgatcctcccgcttcagcctctcaagcagcgggaactacaggtgtgcactaccacacctggctattttttttttttttttttttttcccttgtagagacatggtctcactatgttgctgaggctggtctcaaactcctaggatcaagccatcctcccgctttggcctcctaaagtgctgggattacatgagccaccacatgcagccagatgtttgaatattttaagagcttctttcgaaagtttcttgttcatactcaaatagtagttattttgaagatattcaaacttatattgaagaagtgactttagttcctcttgttttaagcttctttcatgtattcaaatcagcatttttttctaagaaattgctatagaatttgtggaaggagagaggatacacatgtaaaattacatctggtctcttccttcactgcttcatgcctacgtaaggtctttgaaataggattccttacttttagttagaaacccctaaaacgctaatattgattttcctgatagctgtattaaaaatagcaaagcatcggactgaaccaactttggaaataatttatttttataatgggatcatgttaagtagaagtagctttttatgcaaatacatgcatttatgcaatattaatgtaagggctctaaaacaatggagtagagccagaggtataactgaataagaaatttttttaagcaagagaaagacaactgttctgcgggttggagaaaatacaatttttttttttttttttgagacagtctcgctctgtcccccaggctggagtgcagtggctcgatctctgctcactgcaagctccgcctcctgggttcatgccattctcctgcctcagcctcctgagtagctgggactacaggcgctcgccatgtatttagcagagacggggtttcaccgtgttagccaggatggtctcaatctcctgacctcatattccacccgcctcggcctcccaaagtgctgggattacaggcgttagccactgcgcccggcccgagaaaatacagttttaaaaagagaaagctttataacctcaccaatgaatacaaatgtttaaataaaatattgattaaaaaaacattaaaagtg

SEQ ID NO: 20398 - protein, 268 aa, Homo sapiens; identical to SEQ ID NO: 2567

SEQ ID NO: 20399 - DNA, 1358 bp, Homo sapiens
ggagtattgaatagttgggaattggaacccctccagggggaaccaaacattgtcgttcagaagaagacaaagagagattgaaatgaagctgttgatttcaacacacaaattctggtggtagatgaaagcaaagcaagtaagtttctccgaatccctagtcaactggaggtagagacggactgcgcaggttaactacagctcccagcatgcctgaggggcgggctcagcggctgcgcagactggcgcgcgcggacggtcatgggacttcagcatggcggtgtttgcagatttggacctgcgagcgggttctgacctgaaggctctgcgcggacttgtggagacagccgctcaccttggctattcagttgttgctatcaatcatatcgttgactttaaggaaaagaaacaggaaattgaaaaaccagtagctgtttctgaactcttcacaactttgccaattgtacagggaaaatcaagaccaattaaaattttaactagattaacaattattgtctcggatccatctcactgcaatgttttgagagcaacttcttcaagggcccggctctatgatgttgttgcagtttttccaaagacagaaaagctttttcatattgcttgcacacatttagatgtggatttagtctgcataactgtaacagagaaactaccattttacttcaaaagacctcctattaatgtggcgattgaccgaggcctggcttttgaacttgtctatagccctgctatcaaagactccacaatgagaaggtatacaatttccagtgccctcaatttgatgcaaatctgcaaaggaaaggtatggttctataattttaggatgtttttcgcatctggcagtttattattagtagtacactggaattgtcaaactgactccttttccttaaagcagaatgttctcatagcataggaacaaattctgccatttcagtgagctctgcaaattttaagggaaagaaaaataccaagggaagaataatgtaagggagaaaaagatgtgttggaagccatatcttttgataaaaatttgcaatttacatactgtgaaagaaaagtctagaataacaatggtcctcactgagttgaattaagatatgtgaccttttcatcttgttttttaaacttaattcacctttactaagatctgttaggaaaacatattttgttttttattacagattgcctttagtttgacatgaagtcttttcatttttttcaccttaattatttaccttatctttaaaagaagttggtatttgagccttaaatgttaaaatatgattactggctatttatattatgaaactcctttttttacatttatctaagattaa

SEQ ID NO: 20400 - protein, 220 aa, Homo sapiens
MAVFADLDLRAGSDLKALRGLVETAAHLGYSVVAINHIVDFKEKKQEIEKPVAVSELFTTLPIVQGKSRPIKILTRLTIIVSDPSHCNVLRATSSRARLYDVVAVFPKTEKLFHIACTHLDVDLVCITVTEKLPFYFKRPPINVAIDRGLAFELVYSPAIKDSTMRRYTISSALNLMQICKGKVWFYNFRMFFASGSLLLVVHWNCQTDSFSLKQNVLIA

SEQ ID NO: 20401 - DNA, 1100 bp, Homo sapiens
ggagtattgaatagttgggaattggaacccctccagggggaaccaaacattgtcgttcagaagaagacaaagagagattgaaatgaagctgttgatttcaacacacaaattctggtggtagatgaaagcaaagcaagtaagtttctccgaatccctagtcaactggaggtagagacggactgcgcaggttaactacagctcccagcatgcctgaggggcgggctcagcggctgcgcagactggcgcgcgcggacggtcatgggacttcagcatggcggtgtttgcagatttggacctgcgagcgggttctgacctgaaggctctgcgcggacttgtggagacagccgctcaccttggctattcagttgttgctatcaatcatatcgttgactttaaggaaaagaaacaggaaattgaaaaaccagtagctgtttctgaactcttcacaactttgccaattgtacagggaaaatcaagaccaattaaaattttaactagattaacaattattgtctcggatccatctcactgcaatgttttgagagcaacttcttcaagggcccggctctatgatgttgttgcagtttttccaaagacagaaaagctttttcatattgcttgcacacatttagatgtggatttagtctgcataactgtaacagagaaactaccattttacttcaaaagacctcctattaatgtggcgattgaccgaggcctggcttttgaacttgtctatagccctgctatcaaagactccacaatgagaaggtatacaatttccagtgccctcaatttgatgcaaatctgcaaaggaaagaatgtaattatatctagtgctgcagaaaggcctttagaaataagagggccatatgacgtggcaaatctaggcttgctgtttgggctctctgaaagtgacgccaaggctgcggtgtccaccaactgccgagcagcgcttctccatggagaaactagaaaaactgcttttggaattatctctacagtgaagaaacctcggccatcagaaggagatgaagattgtcttccagcttccaagaaagccaagtggtctttgttgctcaggctggagtacagtggca

SEQ ID NO: 20402 - protein, 275 aa, Homo sapiens
MAVFADLDLRAGSDLKALRGLVETAAHLGYSVVAINHIVDFKEKKQEIEKPVAVSELFTTLPIVQGKSRPIKILTRLTIIVSDPSHCNVLRATSSRARLYDVVAVFPKTEKLFHIACTHLDVDLVCITVTEKLPFYFKRPPINVAIDRGLAFELVYSPAIKDSTMRRYTISSALNLMQICKGKNVIISSAAERPLEIRGPYDVANLGLLFGLSESDAKAAVSTNCRAALLHGETRKTAFGIISTVKKPRPSEGDEDCLPASKKAKWSLLLRLEYS

SEQ ID NO: 20403 - DNA, 1938 bp, Homo sapiens
ggagtattgaatagttgggaattggaacccctccagggggaaccaaacattgtcgttcagaagaagacaaagagagattgaaatgaagctgttgatttcaacacacaaattctggtggtagatgaaagcaaagcaagtaagtttctccgaatccctagtcaactggaggtagagacggactgcgcaggttaactacagctcccagcatgcctgaggggcgggctcagcggctgcgcagactggcgcgcgcggacggtcatgggacttcagcatggcggtgtttgcagatttggacctgcgagcgggttctgacctgaaggctctgcgcggacttgtggagacagccgctcaccttggctattcagttgttgctatcaatcatatcgttgactttaaggaaaagaaacaggaaattgaaaaaccagtagctgtttctgaactcttcacaactttgccaattgtacagggaaaatcaagaccaattaaaattttaactagattaacaattattgtctcggatccatctcactgcaatgttttgagagcaacttcttcaagggcccggctctatgatgttgttgcagtttttccaaagacagaaaagctttttcatattgcttgcacacatttagatgtggatttacactgcattccagtctgggcgacagaatgagactctgtctaaaaaaaagaaagtaccaactattttattatttattacttcattatattaatttaaatattgaagtgtcagctatcatttaggaaaaaactaagtcaaatctctatctcacacccaatacacacccatagtaaatccaggtagattaaagatttaaattttttaacaaacttgtaaaatactagaggaaaatgtaagttaattaaaaaaataataatcttggattgcaatagacctgccgagcatggtcatcaaagccagaaaacaaagtttgattgatttgtctctacataacaacaagtaggaaagtacatttacaatacatattccaggaaggtttcatatgcttagcttttaagaattttttttttttaaatacccaacatgacatgctgttagcatccatagagatccccattcccagggtggtgtacctatattgccagtgcttcagatgttgggtactaatgacttatcttcacccttttccagaggattgtcctgggctgatgagagtcactttacctgaagatacctgggaagttttgtctcctctgaggttggcccatggccagtgactgatgcaggacattacagcctggcccactggcctcggtggtacaatttatgctcctgagcaccccatgggattacgctgtgtgtggatttctcctgaaaccacatatttgcctcttctgccctgttctgttttttctcattcccttatagaggactctcagtaagtcacttacacaagaatcctaatttgaaatgctgcttccaggagacctgacttagaaaattggacaaataaagttgatttttttaaatgtccagtaacatgaagatgctgaactttcctagtcatttagggggaaatcaccacaaatatatctggctgatcaggttgaaagttaaaagaaaaaaagatttataaagtgggtattttcaagatggtgtggagggagatacaatttgatgcaagtcttatacttttgatgtcaatttattcttcagaaataactggttaattataaagggtggatggataaggatattcactgcaacaatgtcttaaatgtgaaaatggaaacaacctaaatacccaataataacaggattaaataattcattgtacattaaaagaatactgtctataaagatgtctagaataagttgttcagttgaagttgtaaagctaaatacacaatacccataatgtgcacagaaataatcagaatgtcatgaaaccagga

SEQ ID NO: 20404 - protein, 133 aa, Homo sapiens
MAVFADLDLRAGSDLKALRGLVETAAHLGYSVVAINHIVDFKEKKQEIEKPVAVSELFTTLPIVQGKSRPIKILTRLTIIVSDPSHCNVLRATSSRARLYDVVAVFPKTEKLFHIACTHLDVDLHCIPVWATE

SEQ ID NO: 20405 - DNA, 1172 bp, Homo sapiens
gagtattgaatagttgggaattggaacccctccagggggaaccaaacattgtcgttcagaagaagacaaagagagattgaaatgaagctgttgatttcaacacacaaattctggtggtagatgaaagcaaagcaagtaagtttctccgaatccctagtcaactggaggtagagacggactgcgcaggttaactacagctcccagcatgcctgaggggcgggctcagcggctgcgcagactggcgcgcgcggacggtcatgggacttcagcatggcggtgtttgcagatttggacctgcgagcgggttctgacctgaaggctctgcgcggacttgtggagacagccgctcaccttggctattcagttgttgctatcaatcatatcgttgactttaaggaaaagaaacaggaaattgaaaaaccagtagctgtttctgaactcttcacaactttgccaattgtacagggaaaatcaagaccaattaaaattttaactagattaacaattattgtctcggatccatctcactgcaatgttttgagagcaacttcttcaagggcccggctctatgatgttgttgcagtttttccaaagacagaaaagctttttcatattgcttgcacacatttagatgtggatttagtctgcataactgtaacagagaaactaccattttacttcaaaagacctcctattaatgtggcgattgaccgaggcctggcttttgaacttgtctatagccctgctatcaaagactccacaatgagaaggtatacaatttccagtgccctcaatttgatgcaaatctgcaaaggaaagaatgtaattatatctagtgctgcagaaaggcctttagaaataagagggccatatgacgtggcaaatctaggcttgctgtttgggctctctgaaagtgacgccaaggctgcggtgtccaccaactgccgagcagcgcttctccatggagaaactagaaaaactgcttttggaattatctctacagtgaagaaacctcggccatcagaaggagatgaagattgtcttccagcttccaagaaagccaagtgtgagggctgaaaagaatgccccagtctctgtcagcactcccttcttcccttttatagttcatcagccacaacaaaaataaaacctttgtgtgatttactgttttc

SEQ ID NO: 20406 - protein, 268 aa, Homo sapiens; identical to SEQ ID NO: 2567

SEQ ID NO: 20407 - DNA, 1374 bp, Homo sapiens
gagtattgaatagttgggaattggaacccctccagggggaaccaaacattgtcgttcagaagaagacaaagagagattgaaatgaagctgttgatttcaacacacaaattctggtggtagatgaaagcaaagcaagtaagtttctccgaatccctagtcaactggaggtagagacggactgcgcaggttaactacagctcccagcatgcctgaggggcgggctcagcggctgcgcagactggcgcgcgcggacggtcatgggacttcagcatggcggtgtttgcagatttggacctgcgagcgggttctgacctgaaggctctgcgcggacttgtggagacagccgctcaccttggctattcagttgttgctatcaatcatatcgttgactttaaggaaaagaaacaggaaattgaaaaaccagtagctgtttctgaactcttcacaactttgccaattgtacagggaaaatcaagaccaattaaaattttaactagattaacaattattgtctcggatccatctcactgcaatgttttgagagcaacttcttcaagggcccggctctatgatgttgttgcagtttttccaaagacagaaaagctttttcatattgcttgcacacatttagatgtggatttagtctgcataactgtaacagagaaactaccattttacttcaaaagacctcctattaatgtggcgattgaccgaggcctggcttttgaacttgtctatagccctgctatcaaagactccacaatgagaaggtatacaatttccagtgccctcaatttgatgcaaatctgcaaaggaaagaatgtaattatatctagtgctgcagaaaggcctttagaaataagagggccatatgacgtggcaaatctaggcttgctgtttgggctctctgaaagtgacgccaaggctgcggtgtccaccaactgccgagcagcgcttctccatggagaaactagaaaaactgcttttggaattatctctacagtgaagaaacctcggccatcagaaggagatgaagattgtcttccagcttccaagaaagccaagtgtgagggctgaaaagaatgccccagtctctgtcagcactcccttcttcccttttatagttcatcagccacaacaaaaataaaacctttgtgtgatttactgttttcatttggagctagaaatcaatagtctataaaaacagttttacttgcaatccattaaaacaacaaacgaaacctagtgaagcatctttttaaaaggctgccagcttaatgaatttagatgtactttaagagagaaagactggttatttctcctttgtgtaagtgataaacaacagcaaatatacttgaataaaatgtttcaggt

SEQ ID NO: 20408 - protein, 268 aa, Homo sapiens; identical to SEQ ID NO: 2567

SEQ ID NO: 20409 - DNA, 4953 bp, Homo sapiens
aaaaagcccttctccagcaacgtgatcgcgccgcccaagttccctcgcgcggcccctctcacttccaagtcctggatggaggataacgctttccggaccgataatggtaacaatctgttgccatttcaggaccggagtaggccctatgatacttttaacttgcactcgttggagaactccttaatggatatgataaggactgatcatgaacctctgaaaggtaaacactaccctcccagtggcccaccaatgagtttcgctgatataatgtggaggaatcattttgcaggacgcatggggataaatttccatcatccaggaacagataatattatggcacttaacagtcgatcttctctctttccctttgaagatgccttcctggatgatagccatggtgatcaagccttgtcatctggcttaagttctcccactcgctgtcaaaatggggaacgagtagaacgctactctagaaaggtgtttgttggaggacttcctcctgatattgatgaagatgagatcactgccagctttcgcaggtttggacctctcgtagtagactggcctcacaaagctgaaagcaagtcttattttcctcctaaaggctatgcctttctgctgttccaagaggaaagctcagtacaagctttgatagatgcctgcctagaagaagatgggaaactctacctgtgtgtgtcaagccccaccatcaaggacaagccagtgcaaattcgaccatggaacctaagtgacagtgactttgtaatggatggttctcagcctttggaccccagaaaaactatctttgttgggggagttccacgaccccttcgagctgttgaactggcaatgatcatggaccgtttgtatggtggtgtctgctatgctggcattgatacggacccagagctgaagtaccccaaaggtgctggccgcgtggcattctccaatcagcagagttacattgcagccatcagcgctcgttttgtgcagcttcagcacaatgacattgacaaacgggttgaagtaaagccatatgtgctggatgatcagatgtgtgatgagtgccagggcacacgctgtggtgggaagtttgccccgttcttctgtgccaacgtcacctgtctgcagtattactgtgaatactgctgggcgagcatacattcccgagccgggcgggagttccacaaaccgctggtgaaggagggaggcgaccgccctcgtcacgtcccgttccgctggagctgagccacgggccgacccagccacaagtactggagtagataacaaggagggaaaagagagggcactgcctcagggcttacagtgttctggaaatctgtgcattcgttctcgatttttaaagaagaattgggtctttttattattattattattatttacagtcatattactgaactcagtgtccagtataatgcagaattgcagagtgtagaatggtactgatttgcactttgattcacacctttgtctgcttggtaccttaattttttatacctgatttgtcactcgtgacagtatgtagactgccattctcatcagcggccgtcaggctactgtctgtgattcttttgtttgttgttgtggtgttgttctgattgttttgaactggagcatgcacttattttcagaaacttagagagttgcccctaggacaagacttaccaaaggtaatactcgtgagtaggtggcagatgtagcaaaaacttcacaacaattcagcaatcattagctcgggtcacttagagtaaggataacccttcatgaaaataagcctttagttgctctctattttgacttgtaaggatacctcataagctggatcttttatttttccttcatgtttgatttttgttttgccgaggattttggttagatcttttagtattatgtaaatttatgctgcaatagcttttgctgctattaaaatggtattattaataccataatactctattcaggctaggatatcaattaaacacaaaaacccaacaacacacttttgtgattttagggatagagtcagctgccgaacggagatcagaatagacttcagaaagcttcggtggaaggtcactatttctgactgcatgtttacttaatcaggttgctgcatgcaataaattttatatccaatgtctagtataaaacgttcccacaatgcacaaattaagaatctatataagctataaaaatactcattttttaaaaaaagtttttttcattcaaagaattggtaattgaccggaggaaggcatgcctcaataaatggaatgctctgaatgggaagagcccataacagaatgacctatattacaaccgatataaaacctaggtgtaggatattcttcaagcaaatttgtggatggtagatgaagtactttgcggtgctctgttatatattgtgaaatttattttatatagtaaagtgattatgtctaactgtgatcaaacttaactgtttaaagcctctgtcagacattaatgaacttgacagttcataactgatatattataaactaacacatgagctcttagttacaatctcttagtgcttgcaccattttacatagcttcagaccttgtccagaaaaccaaagagctcatcttagcttacaaacactaagaatatatacaggatatagagataagttgtcagattgacaaactaggcacatttttaagaaagttgtgtaatggtgatgctaaagaaatgtctgtacaaaataagatggcctgggcagagttggttgtctgagtgagaaactaactacttaattccctggatttatcctgttaagcttgagtagaatgaaggcctgctagcactagcgtggtctagaatgaaggcctgctagcactagcgtggacatttttctagcattcacccttgggctgcagatagtaatatataaacacacacaatgattgcaagactatgtaaatctttttttaatcttcttcctatgttttggaattctggggacaatctgactggatatgacactgcagaatagatttaagtcgctgtgttttctgtgctgtgatgtccttgtactgtcttaagttagtgttgcttgtttttgttttgttctcccatgtttagttgcaattactggctctcaagctatagtttgttttcaaaaaggaaaaacaaaatagttttttactggattaaaaatgcttattttagaatcctcccctttttgaggctttttggtaataattgcttttttccagcccaggtgtggttttgtttgtttttttctatgtttgtgggttttttttcatctgtacaagaaattttgttatgcactactactttttgtattctagacagttttcaaaagttggcagatttttttttttgtttttaaggaaaaaggcatgctttctgactgacatgatcttttgcaatacctcaattttgaaatataggaaagaaaatgatattttctaagtaagtttattcagaaaaatatatattaatttaattctgcaagaaaatgatttaacagatgggtaactttatttttttcatgcttatttgtgttttttgaaaatgaagaagttagagctttataactataatattaaagatcatatctaacctacagaaatctacctaattatgtgaaagaagcaaaactttttgaagaagcacccctctttcatgtattaaaataacactgagatttttttaaaagctggaagattgtacagcataaagctaaagtgaaggcaaaaaacattgtcctgaagaataggttacaaaaaataaactccatttggtgctgaaagttgtgaatagatggtggaaactactttcccttaatttgtatatttctaatcaagtgttgattgtgcgcgactgaccaggattgtgaaagagttcttctgtttgtatttttttaaagagaacttttttagtttattaaattataacatgttcccttttgttttgtaaataaatgtgcccccaagttgttaatgttatattaaaagagagggtccttcaaaaaaattattttttaaaacacagaggtgttctgacctgcaacttgactgggaagcccctgggtaacacaggtcctgctgtggcctttccttggtgtgacacttgaactagtcgattttttgaaggctataacctaacctcgactatttgttgttatgtgcaatactgtttgtactgtttgtataaaaaatagaaaaaaaaaagaaaagaaaaaaggcataaatctttattgcagatttattttcattgcaaactttagacattgtgattcactgaaatcatttttctactgtcaaatatgtaccttttcttcatgctggtattttttcaatagtaatgtagcctttgtactgagacaaattttcattgttatttttagaaagattttttgctaagaaaaaaattaaacatatttacatatttttcattttatttcgtattttctttaaggagtgctttctcaatcattaatagagttgtttctgggagggactttcatatctggtcaatgtcataatattattttgtatttttattggaataaattaattttatgatgctaattctttaaaagtttatttttttcattttcagttatttttgaagctaaaacctttgtaatattgttactaaagtgtctagttttttgaaatgcaaagctttatgtattaacttgctgatgtggtttacaatagtgtgacaacgatgaaaatgcttggttatgtaaagtgattggaaatgtaatggataattgggtaataaaatgacagaatgagcagaacatgtgagattttgagaagccttttcctttatcacagtggtttagtgtaagactagggatgtcacagtgcagttctctagggatgtcacggtggatttatacaacaccaggtgcagccaaacctgtggccctg

SEQ ID NO: 20410 - protein, 390 aa, Homo sapiens
MEDNAFRTDNGNNLLPFQDRSRPYDTFNLHSLENSLMDMIRTDHEPLKGKHYPPSGPPMSFADIMWRNHFAGRMGINFHHPGTDNIMALNSRSSLFPFEDAFLDDSHGDQALSSGLSSPTRCQNGERVERYSRKVFVGGLPPDIDEDEITASFRRFGPLVVDWPHKAESKSYFPPKGYAFLLFQEESSVQALIDACLEEDGKLYLCVSSPTIKDKPVQIRPWNLSDSDFVMDGSQPLDPRKTIFVGGVPRPLRAVELAMIMDRLYGGVCYAGIDTDPELKYPKGAGRVAFSNQQSYIAAISARFVQLQHNDIDKRVEVKPYVLDDQMCDECQGTRCGGKFAPFFCANVTCLQYYCEYCWASIHSRAGREFHKPLVKEGGDRPRHVPFRWS

SEQ ID NO: 20411 - DNA, 5849 bp, Homo sapiens
cataatcaacctgaaagaagaaaataaatactgtatacttttaaattttatcgattcttaaaaactggacactcaaagctgcgcaaaccatgcaggatgatttactgatggacaaaagcaaaacccagccccagccccagcagcagcagcggcagcagcagcagccccaacctgagtccagcgtatccgaagccccgtccacgcccctctcctcagagacccccaagccggaggaaaacagcgcagtgccggccctcagcccagccgctgcccccccggcccccaacggcccggacaagatgcagatggaatcaccgctcctgccaggcttgagtttccatcagcctcctcagcagccgccgccgcctcaggagcccgcggcaccgggcgcgtcgctgtcgccgtccttcggcagcacctggtccacgggcaccaccaacgcggtagaggacagcttcttccaggggatcaccccagtcaacgggaccatgctcttccagaacttcccgcaccatgtcaacccagtcttcggaggcactttctccccgcagatcggcctggcgcagacccagcaccaccagcagccgccgccgcctgcgcccgcgccgcagccggcacagccagcgcagccaccacaggcgcagcccccgcagcagcgccgctcacccgccagccccagccaggcgccctacgcgcagaggagcgccgccgcggcgtacggccaccagcccatcatgaccagcaagccgtcctcgtcttcggcggttgcagccgctgctgccgcagccgccgcctcgtcggcctcgtccagctggaacacgcaccaaagcgtgaatgcagcctggagcgcaccgtccaacccctggggcggcctgcaggcgggccgggaccctcgccgggcggtcggtgtgggcgtgggtgtgggtgtcggggtgccttccccgctcaaccccatctcgccgctcaaaaagcccttctccagcaacgtgatcgcgccgcccaagttccctcgcgcggcccctctcacttccaagtcctggatggaggataacgctttccggaccgataatggtaacaatctgttgccatttcaggaccggagtaggccctatgatacttttaacttgcactcgttggagaactccttaatggatatgataaggactgatcatgaacctctgaaaggacgcatggggataaatttccatcatccaggaacagataatattatggcacttaacagtcgatcttctctctttccctttgaagatgccttcctggatgatagccatggtgatcaagccttgtcatctggcttaagttctcccactcgctgtcaaaatggggaacgagtagaacgctactctagaaaggtgtttgttggaggacttcctcctgatattgatgaagatgagatcactgccagctttcgcaggtttggacctctcgtagtagactggcctcacaaagctgaaagcaagtcttattttcctcctaaaggctatgcctttctgctgttccaagaggaaagctcagtacaagctttgatagatgcctgcctagaagaagatgggaaactctacctgtgtgtgtcaagccccaccatcaaggacaagccagtgcaaattcgaccatggaacctaagtgacagtgactttgtaatggatggttctcagcctttggaccccagaaaaactatctttgttgggggagttccacgaccccttcgagctgttgaactggcaatgatcatggaccgtttgtatggtggtgtctgctatgctggcattgatacggacccagagctgaagtaccccaaaggtgctggccgcgtggcattctccaatcagcagagttacattgcagccatcagcgctcgttttgtgcagcttcagcacaatgacattgacaaacgggttgaagtaaagccatatgtgctggatgatcagatgtgtgatgagtgccagggcacacgctgtggtgggaagtttgccccgttcttctgtgccaacgtcacctgtctgcagtattactgtgaatactgctgggcgagcatacattcccgagccgggcgggagttccacaaaccgctggtgaaggagggaggcgaccgccctcgtcacgtcccgttccgctggagctgagccacgggccgacccagccacaagtactggagtagataacaaggagggaaaagagagggcactgcctcagggcttacagtgttctggaaatctgtgcattcgttctcgatttttaaagaagaattgggtctttttattattattattattatttacagtcatattactgaactcagtgtccagtataatgcagaattgcagagtgtagaatggtactgatttgcactttgattcacacctttgtctgcttggtaccttaattttttatacctgatttgtcactcgtgacagtatgtagactgccattctcatcagcggccgtcaggctactgtctgtgattcttttgtttgttgttgtggtgttgttctgattgttttgaactggagcatgcacttattttcagaaacttagagagttgcccctaggacaagacttaccaaaggtaatactcgtgagtaggtggcagatgtagcaaaaacttcacaacaattcagcaatcattagctcgggtcacttagagtaaggataacccttcatgaaaataagcctttagttgctctctattttgacttgtaaggatacctcataagctggatcttttatttttccttcatgtttgatttttgttttgccgaggattttggttagatcttttagtattatgtaaatttatgctgcaatagcttttgctgctattaaaatggtattattaataccataatactctattcaggctaggatatcaattaaacacaaaaacccaacaacacacttttgtgattttagggatagagtcagctgccgaacggagatcagaatagacttcagaaagcttcggtggaaggtcactatttctgactgcatgtttacttaatcaggttgctgcatgcaataaattttatatccaatgtctagtataaaacgttcccacaatgcacaaattaagaatctatataagctataaaaatactcattttttaaaaaaagtttttttcattcaaagaattggtaattgaccggaggaaggcatgcctcaataaatggaatgctctgaatgggaagagcccataacagaatgacctatattacaaccgatataaaacctaggtgtaggatattcttcaagcaaatttgtggatggtagatgaagtactttgcggtgctctgttatatattgtgaaatttattttatatagtaaagtgattatgtctaactgtgatcaaacttaactgtttaaagcctctgtcagacattaatgaacttgacagttcataactgatatattataaactaacacatgagctcttagttacaatctcttagtgcttgcaccattttacatagcttcagaccttgtccagaaaaccaaagagctcatcttagcttacaaacactaagaatatatacaggatatagagataagttgtcagattgacaaactaggcacatttttaagaaagttgtgtaatggtgatgctaaagaaatgtctgtacaaaataagatggcctgggcagagttggttgtctgagtgagaaactaactacttaattccctggatttatcctgttaagcttgagtagaatgaaggcctgctagcactagcgtggtctagaatgaaggcctgctagcactagcgtggacatttttctagcattcacccttgggctgcagatagtaatatataaacacacacaatgattgcaagactatgtaaatctttttttaatcttcttcctatgttttggaattctggggacaatctgactggatatgacactgcagaatagatttaagtcgctgtgttttctgtgctgtgatgtccttgtactgtcttaagttagtgttgcttgtttttgttttgttctcccatgtttagttgcaattactggctctcaagctatagtttgttttcaaaaaggaaaaacaaaatagttttttactggattaaaaatgcttattttagaatcctcccctttttgaggctttttggtaataattgcttttttccagcccaggtgtggttttgtttgtttttttctatgtttgtgggttttttttcatctgtacaagaaattttgttatgcactactactttttgtattctagacagttttcaaaagttggcagatttttttttttgtttttaaggaaaaaggcatgctttctgactgacatgatcttttgcaatacctcaattttgaaatataggaaagaaaatgatattttctaagtaagtttattcagaaaaatatatattaatttaattctgcaagaaaatgatttaacagatgggtaactttatttttttcatgcttatttgtgttttttgaaaatgaagaagttagagctttataactataatattaaagatcatatctaacctacagaaatctacctaattatgtgaaagaagcaaaactttttgaagaagcacccctctttcatgtattaaaataacactgagatttttttaaaagctggaagattgtacagcataaagctaaagtgaaggcaaaaaacattgtcctgaagaataggttacaaaaaataaactccatttggtgctgaaagttgtgaatagatggtggaaactactttcccttaatttgtatatttctaatcaagtgttgattgtgcgcgactgaccaggattgtgaaagagttcttctgtttgtatttttttaaagagaacttttttagtttattaaattataacatgttcccttttgttttgtaaataaatgtgcccccaagttgttaatgttatattaaaagagagggtccttcaaaaaaattattttttaaaacacagaggtgttctgacctgcaacttgactgggaagcccctgggtaacacaggtcctgctgtggcctttccttggtgtgacacttgaactagtcgattttttgaaggctataacctaacctcgactatttgttgttatgtgcaatactgtttgtactgtttgtataaaaaatagaaaaaaaaaagaaaagaaaaaaggcataaatctttattgcagatttattttcattgcaaactttagacattgtgattcactgaaatcatttttctactgtcaaatatgtaccttttcttcatgctggtattttttcaatagtaatgtagcctttgtactgagacaaattttcattgttatttttagaaagattttttgctaagaaaaaaattaaacatatttacatatttttcattttatttcgtattttctttaaggagtgctttctcaatcattaatagagttgtttctgggagggactttcatatctggtcaatgtcataatattattttgtatttttattggaataaattaattttatgatgctaattctttaaaagtttatttttttcattttcagttatttttgaagctaaaacctttgtaatattgttactaaagtgtctagttttttgaaatgcaaagctttatgtattaacttgctgatgtggtttacaatagtgtgacaacgatgaaaatgcttggttatgtaaagtgattggaaatgtaatggataattgggtaataaaatgacagaatgagcagaacatgtgagattttgagaagccttttcctttatcacagtggtttagtgtaagactagggatgtcacagtgcagttctctagggatgtcacggtggatttatacaacaccaggtgcagccaaacctgtggccctg

SEQ ID NO: 20412 - protein, 684 aa, Homo sapiens
MQDDLLMDKSKTQPQPQQQQRQQQQPQPESSVSEAPSTPLSSETPKPEENSAVPALSPAAAPPAPNGPDKMQMESPLLPGLSFHQPPQQPPPPQEPAAPGASLSPSFGSTWSTGTTNAVEDSFFQGITPVNGTMLFQNFPHHVNPVFGGTFSPQIGLAQTQHHQQPPPPAPAPQPAQPAQPPQAQPPQQRRSPASPSQAPYAQRSAAAAYGHQPIMTSKPSSSSAVAAAAAAAAASSASSSWNTHQSVNAAWSAPSNPWGGLQAGRDPRRAVGVGVGVGVGVPSPLNPISPLKKPFSSNVIAPPKFPRAAPLTSKSWMEDNAFRTDNGNNLLPFQDRSRPYDTFNLHSLENSLMDMIRTDHEPLKGRMGINFHHPGTDNIMALNSRSSLFPFEDAFLDDSHGDQALSSGLSSPTRCQNGERVERYSRKVFVGGLPPDIDEDEITASFRRFGPLVVDWPHKAESKSYFPPKGYAFLLFQEESSVQALIDACLEEDGKLYLCVSSPTIKDKPVQIRPWNLSDSDFVMDGSQPLDPRKTIFVGGVPRPLRAVELAMIMDRLYGGVCYAGIDTDPELKYPKGAGRVAFSNQQSYIAAISARFVQLQHNDIDKRVEVKPYVLDDQMCDECQGTRCGGKFAPFFCANVTCLQYYCEYCWASIHSRAGREFHKPLVKEGGDRPRHVPFRWS

SEQ ID NO: 20413 - DNA, 4876 bp, Homo sapiens
gtctccactagaggctgcacagcccgcccggaccaacgcctccgcgcctgccgccgtctggccggcgccctcccgtttccttcctccagggggaaaaaatgtctttcgggccgctttccaggaagcagcaggatgcgccgctccactgtcggtagcaacaagctgcgcaaaccatgcaggatgatttactgatggacaaaagcaaaacccagccccagccccagcagcagcagcggcagcagcagcagccccaacctgagtccagcgtatccgaagccccgtccacgcccctctcctcagagacccccaagccggaggaaaacagcgcagtgccggccctcagcccagccgctgcccccccggcccccaacggcccggacaagatgcagatggaatcaccgctcctgccaggcttgagtttccatcagcctcctcagcagccgccgccgcctcaggagcccgcggcaccgggcgcgtcgctgtcgccgtccttcggcagcacctggtccacgggcaccaccaacgcggtagaggacagcttcttccaggggatcaccccagtcaacgggaccatgctcttccagaacttcccgcaccatgtcaacccagtcttcggaggcactttctccccgcagatcggcctggcgcagacccagcaccaccagcagccgccgccgcctgcgcccgcgccgcagccggcacagccagcgcagccaccacaggcgcagcccccgcagcagcgccgctcacccgccagccccagccaggcgccctacgcgcagaggagcgccgccgcggcgtacggccaccagcccatcatgaccagcaagccgtcctcgtcttcggcggttgcagccgctgctgccgcagccgccgcctcgtcggcctcgtccagctggaacacgcaccaaagcgtgaatgcagcctggagcgcaccgtccaacccctggggcggcctgcaggcgggccgggaccctcgccgggcggtcggtgtgggcgtgggtgtgggtgtcggggtgccttccccgctcaaccccatctcgccgctcaaaaagcccttctccagcaacgtgatcgcgccgcccaagttccctcgcgcggcccctctcacttccaagtcctggatggaggataacgctttccggaccgataatggtaacaatctgttgccatttcaggaccggagtaggccctatgatacttttaacttgcactcgttggagaactccttaatggatatgataaggactgatcatgaacctctgaaaggtaaacactaccctcccagtggcccaccaatgagtttcgctgatataatgtggaggaatcattttgcaggacgcatggggataaatttccatcatccaggaacagataatattatggcacttaacagtcgatcttctctctttccctttgaagatgccttcctggatgatagccatggtgatcaagccttgtcatctggcttaagttctcccactcgctgtcaaaatggggaacgagtagaacgctactctagaaaggtgtttgttggaggacttcctcctgatattgatgaagatgagatcactgccagctttcgcaggtttggacctctcgtagtagactggcctcacaaagctgaaagcaagtcttattttcctcctaaaggctatgcctttctgctgttccaagaggaaagctcagtacaagctttgatagatgcctgcctagaagaagatgggaaactctacctgtgtgtgtcaagccccaccatcaaggacaagccagtgcaaattcgaccatggaacctaagtgacagtgactttgtaatggatggttctcagcctttggaccccagaaaaactatctttgttgggggagttccacgaccccttcgagctgttgaactggcaatgatcatggaccgtttgtatggtggtgtctgctatgctggcattgatacggacccagagctgaagtaccccaaaggtgctggccgcgtggcattctccaatcagcagagttacattgcagccatcagcgctcgttttgtgcagcttcagcacaatgacattgacaaacgggttgaagtaaagccatatgtgctggatgatcagatgtgtgatgagtgccagggcacacgctgtggtgggaagtttgccccgttcttctgtgccaacgtcacctgtctgcagtattactgtgaatactgctgggcgagcatacattcccgagccgggcgggagttccacaaaccgctggtgaaggagggaggcgaccgccctcgtcacgtcccgttccgctggagctgagccacgggccgacccagccacaagtactggagtagataacaaggagggaaaagagagggcactgcctcagggcttacagtgttctggaaatctgtgcattcgttctcgatttttaaagaagaattgggtctttttattattattattattatttacagtcatattactgaactcagtgtccagtataatgcagaattgcagagtgtagaatggtactgatttgcactttgattcacacctttgtctgcttggtaccttaattttttatacctgatttgtcactcgtgacagtatgtagactgccattctcatcagcggccgtcaggctactgtctgtgattcttttgtttgttgttgtggtgttgttctgattgttttgaactggagcatgcacttattttcagaaacttagagagttgcccctaggacaagacttaccaaaggtaatactcgtgagtaggtggcagatgtagcaaaaacttcacaacaattcagcaatcattagctcgggtcacttagagtaaggataacccttcatgaaaataagcctttagttgctctctattttgacttgtaaggatacctcataagctggatcttttatttttccttcatgtttgatttttgttttgccgaggattttggttagatcttttagtattatgtaaatttatgctgcaatagcttttgctgctattaaaatggtattattaataccataatactctattcaggctaggatatcaattaaacacaaaaacccaacaacacacttttgtgattttagggatagagtcagctgccgaacggagatcagaatagacttcagaaagcttcggtggaaggtcactatttctgactgcatgtttacttaatcaggttgctgcatgcaataaattttatatccaatgtctagtataaaacgttcccacaatgcacaaattaagaatctatataagctataaaaatactcattttttaaaaaaagtttttttcattcaaagaattggtaattgaccggaggaaggcatgcctcaataaatggaatgctctgaatgggaagagcccataacagaatgacctatattacaaccgatataaaacctaggtgtaggatattcttcaagcaaatttgtggatggtagatgaagtactttgcggtgctctgttatatattgtgaaatttattttatatagtaaagtgattatgtctaactgtgatcaaacttaactgtttaaagcctctgtcagacattaatgaacttgacagttcataactgatatattataaactaacacatgagctcttagttacaatctcttagtgcttgcaccattttacatagcttcagaccttgtccagaaaaccaaagagctcatcttagcttacaaacactaagaatatatacaggatatagagataagttgtcagattgacaaactaggcacatttttaagaaagttgtgtaatggtgatgctaaagaaatgtctgtacaaaataagatggcctgggcagagttggttgtctgagtgagaaactaactacttaattccctggatttatcctgttaagcttgagtagaatgaaggcctgctagcactagcgtggtctagaatgaaggcctgctagcactagcgtggacatttttctagcattcacccttgggctgcagatagtaatatataaacacacacaatgattgcaagactatgtaaatctttttttaatcttcttcctatgttttggaattctggggacaatctgactggatatgacactgcagaatagatttaagtcgctgtgttttctgtgctgtgatgtccttgtactgtcttaagttagtgttgcttgtttttgttttgttctcccatgtttagttgcaattactggctctcaagctatagtttgttttcaaaaaggaaaaacaaaatagttttttactggattaaaaatgcttattttagaatcctcccctttttgaggctttttggtaataattgcttttttccagcccaggtgtggttttgtttgtttttttctatgtttgtgggttttttttcatctgtacaagaaattttgttatgcactactactttttgtattctagacagttttcaaaagttggcagatttttttttttgtttttaaggaaaaaggcatgctttctgactgacatgatcttttgcaatacctcaattttgaaatataggaaagaaaatgatattttctaagtaagtttattcagaaaaatatatattaatttaattctgcaagaaaatgatttaacagatgggtaactttatttttttcatgcttatttgtgttttttgaaaatgaagaagttagagctttataactataatattaaagatcatatctaacctacagaaatctacctaattatgtgaaagaagcaaaactttttgaagaagcacccctctttcatgtattaaaataacactgagatttttttaaaagctggaagattgtacagcataaagctaaagtgaaggcaaaaaacattgtcctgaagaataggttacaaaaaataaactccatttggtgctgaaagttgtg

SEQ ID NO: 20414 - protein, 707 aa, Homo sapiens
MQDDLLMDKSKTQPQPQQQQRQQQQPQPESSVSEAPSTPLSSETPKPEENSAVPALSPAAAPPAPNGPDKMQMESPLLPGLSFHQPPQQPPPPQEPAAPGASLSPSFGSTWSTGTTNAVEDSFFQGITPVNGTMLFQNFPHHVNPVFGGTFSPQIGLAQTQHHQQPPPPAPAPQPAQPAQPPQAQPPQQRRSPASPSQAPYAQRSAAAAYGHQPIMTSKPSSSSAVAAAAAAAAASSASSSWNTHQSVNAAWSAPSNPWGGLQAGRDPRRAVGVGVGVGVGVPSPLNPISPLKKPFSSNVIAPPKFPRAAPLTSKSWMEDNAFRTDNGNNLLPFQDRSRPYDTFNLHSLENSLMDMIRTDHEPLKGKHYPPSGPPMSFADIMWRNHFAGRMGINFHHPGTDNIMALNSRSSLFPFEDAFLDDSHGDQALSSGLSSPTRCQNGERVERYSRKVFVGGLPPDIDEDEITASFRRFGPLVVDWPHKAESKSYFPPKGYAFLLFQEESSVQALIDACLEEDGKLYLCVSSPTIKDKPVQIRPWNLSDSDFVMDGSQPLDPRKTIFVGGVPRPLRAVELAMIMDRLYGGVCYAGIDTDPELKYPKGAGRVAFSNQQSYIAAISARFVQLQHNDIDKRVEVKPYVLDDQMCDECQGTRCGGKFAPFFCANVTCLQYYCEYCWASIHSRAGREFHKPLVKEGGDRPRHVPFRWS

SEQ ID NO: 20415 - DNA, 321 bp, Homo sapiens
ccggagctcctcataggggtaggggcagggactgcacctcctccaggcactcgtcgtaagcctcctggtactcctcgtggggcttgaccattatcacacaggtggggcgcttggagcctgtggctgcacccaggatccctttttctcctttgttgacaaatttctgaacctctttcaccccgcgccgaatctgcttctgcttcaccgctttcttaatgcatttgtagagcttccgcttgaggcggcgagaagccaggagctgcgcgatggggttctggttgaccagcagctcctggtaggtgcgctccccggaacacacct

SEQ ID NO: 20416 - protein, 98 aa, Homo sapiens
GQGLHLLQALVVSLLVLLVGLDHYHTGGALGACGCTQDPFFSFVDKFLNLFHPAPNLLLLHRFLNAFVELPLEAARSQELRDGVLVDQQLLVGALPGT

SEQ ID NO: 20417 - DNA, 395 bp, Homo sapiens
cagcccgcccggaccaacgcctccgcgcctgccgccgtctggccggcgccctcccgtttccttcctccagggggaaaaaatgtctttcgggccgctttccaggaagcagcaggatgcgccgctccactgtcggtagcaacaagcttgcttgtaagaggaagagaaaaagaccactcaggaatagaagggaacttcctcaacttgataaagtgcatctacaaaaaaatctgtagccaacatcttgcctgatggtgaaagactgaatgctttccccctatgatcaggaacaaggcaagaatatgtcctcttacatcctctattcaacgttgtactggaggttctagccaggtcaattagtcaagaaaaagaaataaaaggcagccatattggaaagg

SEQ ID NO: 20418 - protein, 39 aa, Homo sapiens
MRRSTVGSNKLACKRKRKRPLRNRRELPQLDKVHLQKNL

SEQ ID NO: 20419 - DNA, 1235 bp, Homo sapiens
gtggaagctgtctggtccaggcagtccctatttgcccgccccctcaagaagaacctcacgcaccaaaccaaccgacccctcgcggaggtggtgtaattcccccaaaatgggctctgccgcaggagaggctggctccagcgccgggggcttcggaaggagtttctgccacccccactgccgccactgaccgccccgacgccacggccggggccggggaccctgataagaaatggcccttcagccccctcccctcacctggctcggtcccacctgagggcaagagcggaggcaaaaacaaacaggcagggagggctgaccttgttgctaccgacagtggagcggcgcatcctgctgcttcctggaaagcggcccgaaagacattttttccccctggaggaaggaaacgggagggcgccggccagacggcggcaggcgcggaggcgttggtccgggcgggctgtgcagcctctagtggagacggtccgaagactacatctcccaggctgctctgggccgccctgcgtcgtaaccctggcgcgcacggaggcggcgactcttacctcacaaaggtagctcctccgccggcagcaactcggcgcccgcggtccatggaccggaacctcgggccgacggacgggaacccgggccgcgatcgccgcctccccgcctcaggctcctcctcctcgctctccgccgcctccgccggactcccgcaggccctgcaccgccgccgccaggctagcggagctgccccgggaagctgggtgacgggttcgcggctgccgccggactgcggcctactccgccgcctctcagtgctattgtccctgggcctggccttgagcgggtccactggggaaggccgtgtgcgccggctccgcggaagatgccggaccaagccctacagcagatgctggacagaagttgctgggtttgttttgctactgatgaagatgatagaacagctgaatgggtgagaccatgcaggtgcagaggatctacaaaatgggttcaccaggcctgtctacaacgctgggtggatgaaaagcaaagaggaaacagtacagccagagtggcatgtcctcagtgcaatgctgaatacctaatagtttttccaaaattggagacagggtttcaccacgttgcccaggctggtctcaaattcctgacctcaggtgatccacccaccttggcctcccaaaatcctgggattgcaggtgtgagccaccacgccc

SEQ ID NO: 20420 - protein, 122 aa, Homo sapiens [sequence omitted]

SEQ ID NO: 20421 - DNA, 1329 bp, Homo sapiens
gtggaagctgtctggtccaggcagtccctatttgcccgccccctcaagaagaacctcacgcaccaaaccaaccgacccctcgcggaggtggtgtaattcccccaaaatgggctctgccgcaggagaggctggctccagcgccgggggcttcggaaggagtttctgccacccccactgccgccactgaccgccccgacgccacggccggggccggggaccctgataagaaatggcccttcagccccctcccctcacctggctcggtcccacctgagggcaagagcggaggcaaaaacaaacaggcagggagggctgaccttgttgctaccgacagtggagcggcgcatcctgctgcttcctggaaagcggcccgaaagacattttttccccctggaggaaggaaacgggagggcgccggccagacggcggcaggcgcggaggcgttggtccgggcgggctgtgcagcctctagtggagacggtccgaagactacatctcccaggctgctctgggccgccctgcgtcgtaaccctggcgcgcacggaggcggcgactcttacctcacaaaggtagctcctccgccggcagcaactcggcgcccgcggtccatggaccggaacctcgggccgacggacgggaacccgggccgcgatcgccgcctccccgcctcaggctcctcctcctcgctctccgccgcctccgccggactcccgcaggccctgcaccgccgccgccaggctagcggagctgccccgggaagctgggtgacgggttcgcggctgccgccggactgcggcctactccgccgcctctcagtgctattgtccctgggcctggccttgagcgggtccactggggaaggccgtgtgcgccggctccgcggaagatgccggaccaagccctacagcagatgctggacagaagttgctgggtttgttttgctactgatgaagatgatagaacagctgaatgggtgagaccatgcaggtgcagaggatctacaaaatgggttcaccaggcctgtctacaacgctgggtggatgaaaagcaaagaggaaacagtacagccagagtggcatgtcctcagtgcaatgctgaatacctaatagtttttccaaaattgggtccagtggtttacgtcttggatcttgcagatagactgatctcaaaagcctgtccatttgctgcagcaggaataatggtcggctctatctattggacagctgtgacttatggagcagtgacagtgatgcaggttcactattttacctatatagtgatattacttggtgtgaagatctattaaaacattttttgttagacatttaa

SEQ ID NO: 20422 - protein, 139 aa, Homo sapiens
MPDQALQQMLDRSCWVCFATDEDDRTAEWVRPCRCRGSTKWVHQACLQRWVDEKQRGNSTARVACPQCNAEYLIVFPKLGPVVYVLDLADRLISKACPFAAAGIMVGSIYWTAVTYGAVTVMQVHYFTYIVILLGVKIY

SEQ ID NO: 20423 - DNA, 2056 bp, Homo sapiens
gtggaagctgtctggtccaggcagtccctatttgcccgccccctcaagaagaacctcacgcaccaaaccaaccgacccctcgcggaggtggtgtaattcccccaaaatgggctctgccgcaggagaggctggctccagcgccgggggcttcggaaggagtttctgccacccccactgccgccactgaccgccccgacgccacggccggggccggggaccctgataagaaatggcccttcagccccctcccctcacctggctcggtcccacctgagggcaagagcggaggcaaaaacaaacaggcagggagggctgaccttgttgctaccgacagtggagcggcgcatcctgctgcttcctggaaagcggcccgaaagacattttttccccctggaggaaggaaacgggagggcgccggccagacggcggcaggcgcggaggcgttggtccgggcgggctgtgcagcctctagtggagacggtccgaagactacatctcccaggctgctctgggccgccctgcgtcgtaaccctggcgcgcacggaggcggcgactcttacctcacaaaggtagctcctccgccggcagcaactcggcgcccgcggtccatggaccggaacctcgggccgacggacgggaacccgggccgcgatcgccgcctccccgcctcaggctcctcctcctcgctctccgccgcctccgccggactcccgcaggccctgcaccgccgccgccaggctagcggagctgccccgggaagctgggtgacgggttcgcggctgccgccggactgcggcctactccgccgcctctcagtgctattgtccctgggcctggccttgagcgggtccactggggaaggccgtgtgcgccggctccgcggaagatgccggaccaagccctacagcagatgctggacagaagttgctgggtttgttttgctactgatgaagatgatagaacagctgaatgggtgagaccatgcaggtgcagaggatctacaaaatgggttcaccaggcctgtctacaacgctgggtggatgaaaagcaaagaggaaacagtacagccagagtggcatgtcctcagtgcaatgctgaatacctaatagtttttccaaaattgggtccagtggtttacgtcttggatcttgcagatagactgatctcaaaagcctgtccatttgctgcagcaggaataatggtcggctctatctattggacagctgtgacttatggagcagtgacagtgatgcaggttgtaggtcataaagaaggtctggatgttatggagagagctgatcctttattccttttaattggacttcctactattcctgtcatgctgatattaggcaagatgattcgctgggaggactatgtgcttagactgtggcgcaaatactcgaataaactacaaattttaaatagtatatttccagggataggttgtcctgttcctcgaattccagctgaggccaatcctttagcagatcatgtctctgctactcgaatcttgtgtggagcccttgtctttcctactattgctacaatagttggtaaattgatgttcagtagtgttaactctaatttacaaaggacaatcttgggtggaattgcgtttgttgccataaaaggagcatttaaagtttacttcaaacagcagcaatatttacgacaggcacaccgcaaaattctgaattatccagaacaagaagaagcataaaactgacttctggttgttctgcagttctctcatccttatgaatctgttgtgttgttttgattccatcattaatgcacttgtggagacttgtgataagctgctgctcctatattttttaagaaatataataaagcacttagggcaggggaaatcatctcggtaatcatggaacctaaggatgtgatttgttttcattgtttgtatgtactacttttatggcagtcatatgaaccattatcttagcatggtaaacctgggttttgttcatattttctccagacagaaatgcaaagatcaaactgtgcaaatattaaaaaaatgcacatgctgttt

SEQ ID NO: 20424 - protein, 278 aa, Homo sapiens; identical to SEQ ID NO: 2571

SEQ ID NO: 20425 - DNA, 2255 bp, Homo sapiens
gtggaagctgtctggtccaggcagtccctatttgcccgccccctcaagaagaacctcacgcaccaaaccaaccgacccctcgcggaggtggtgtaattcccccaaaatgggctctgccgcaggagaggctggctccagcgccgggggcttcggaaggagtttctgccacccccactgccgccactgaccgccccgacgccacggccggggccggggaccctgataagaaatggcccttcagccccctcccctcacctggctcggtcccacctgagggcaagagcggaggcaaaaacaaacaggcagggagggctgaccttgttgctaccgacagtggagcggcgcatcctgctgcttcctggaaagcggcccgaaagacattttttccccctggaggaaggaaacgggagggcgccggccagacggcggcaggcgcggaggcgttggtccgggcgggctgtgcagcctctagtggagacggtccgaagactacatctcccaggctgctctgggccgccctgcgtcgtaaccctggcgcgcacggaggcggcgactcttacctcacaaaggtagctcctccgccggcagcaactcggcgcccgcggtccatggaccggaacctcgggccgacggacgggaacccgggccgcgatcgccgcctccccgcctcaggctcctcctcctcgctctccgccgcctccgccggactcccgcaggccctgcaccgccgccgccaggctagcggagctgccccgggaagctgggtgacgggttcgcggctgccgccggactgcggcctactccgccgcctctcagtgctattgtccctgggcctggccttgagcgggtccactggggaaggccgtgtgcgccggctccgcggaagatgccggaccaagccctacagcagatgctggacagaagttgctgggtttgttttgctactgatgaagatgatagaacagctgaatgggtgagaccatgcaggtgcagaggatctacaaaatgggttcaccaggcctgtctacaacgctgggtggatgaaaagcaaagaggaaacagtacagccagagtggcatgtcctcagtgcaatgctgaatacctaatagtttttccaaaattgggtccagtggtttacgtcttggatcttgcagatagactgatctcaaaagcctgtccatttgctgcagcaggaataatggtcggctctatctattggacagctgtgacttatggagcagtgacagtgatgcaggttgtaggtcataaagaaggtctggatgttatggagagagctgatcctttattccttttaattggacttcctactattcctgtcatgctgatattaggcaagatgattcgctgggaggactatgtgcttagactgtggcgcaaatactcgaataaactacaaattttaaatagtatatttccagggataggttgtcctgttcctcgaattccagctgaggccaatcctttagcagatcatgtctctgctactcgaatcttgtgtggagcccttgtctttcctactattgctacaatagttggtaaattgatgttcagtagtgttaactctaatttacaaaggacaatcttgggtggaattgcgtttgttgccataaaaggagcatttaaagtttacttcaaacagcagcaatatttacgacaggcacaccgcaaaattctgaattatccagaacaagaagaagcataaaactgacttctggttgttctgcagttctctcatccttatgaatctgttgtgttgttttgattccatcattaatgcacttgtggagacttgtgataagctgctgctcctatattttttaagaaatataataaagcacttagggcaggggaaatcatctcggtaatcatggaacctaaggatgtgatttgttttcattgtttgtatgtactacttttatggcagtcatatgaaccattatcttagcatggtaaacctgggttttgttcatattttctccagacagaaatgcaaagatcaaactgtgcaaatattaaaaaaatgcacatgctgttttattcaaatgcctcttttgtacatgttcatgtttagtgttttctcagaatcagcaactcaaggtactatgaggatttttctcactgacataatttgattacatactaaataagaggatatgttaatatgaggaaatgtaaattaaattagttataaataaataaccaaaaatgtatgtaaacattcaaatgattatctg

SEQ ID NO: 20426 - protein, 278 aa, Homo sapiens; identical to SEQ ID NO: 2571

SEQ ID NO: 20427 - DNA, 2386 bp, Homo sapiens
gtggaagctgtctggtccaggcagtccctatttgcccgccccctcaagaagaacctcacgcaccaaaccaaccgacccctcgcggaggtggtgtaattcccccaaaatgggctctgccgcaggagaggctggctccagcgccgggggcttcggaaggagtttctgccacccccactgccgccactgaccgccccgacgccacggccggggccggggaccctgataagaaatggcccttcagccccctcccctcacctggctcggtcccacctgagggcaagagcggaggcaaaaacaaacaggcagggagggctgaccttgttgctaccgacagtggagcggcgcatcctgctgcttcctggaaagcggcccgaaagacattttttccccctggaggaaggaaacgggagggcgccggccagacggcggcaggcgcggaggcgttggtccgggcgggctgtgcagcctctagtggagacggtccgaagactacatctcccaggctgctctgggccgccctgcgtcgtaaccctggcgcgcacggaggcggcgactcttacctcacaaaggtagctcctccgccggcagcaactcggcgcccgcggtccatggaccggaacctcgggccgacggacgggaacccgggccgcgatcgccgcctccccgcctcaggctcctcctcctcgctctccgccgcctccgccggactcccgcaggccctgcaccgccgccgccaggctagcggagctgccccgggaagctgggtgacgggttcgcggctgccgccggactgcggcctactccgccgcctctcagtgctattgtccctgggcctggccttgagcgggtccactggggaaggccgtgtgcgccggctccgcggaagatgccggaccaagccctacagcagatgctggacagaagttgctgggtttgttttgctactgatgaagatgatagaacagctgaatgggtgagaccatgcaggtgcagaggatctacaaaatgggttcaccaggcctgtctacaacgctgggtggatgaaaagcaaagaggaaacagtacagccagagtggcatgtcctcagtgcaatgctgaatacctaatagtttttccaaaattgggtccagtggtttacgtcttggatcttgcagatagactgatctcaaaagcctgtccatttgctgcagcaggaataatggtcggctctatctattggacagctgtgacttatggagcagtgacagtgatgcaggttgtaggtcataaagaaggtctggatgttatggagagagctgatcctttattccttttaattggacttcctactattcctgtcatgctgatattaggcaagatgattcgctgggaggactatgtgcttagactgtggcgcaaatactcgaataaactacaaattttaaatagtatatttccagggataggttgtcctgttcctcgaattccagctgaggccaatcctttagcagatcatgtctctgctactcgaatcttgtgtggagcccttgtctttcctactattgctacaatagttggtaaattgatgttcagtagtgttaactctaatttacaaaggacaatcttgggtggaattgcgtttgttgccataaaaggagcatttaaagtttacttcaaacagcagcaatatttacgacaggcacaccgcaaaattctgaattatccagaacaagaagaagcataaaactgacttctggttgttctgcagttctctcatccttatgaatctgttgtgttgttttgattccatcattaatgcacttgtggagacttgtgataagctgctgctcctatattttttaagaaatataataaagcacttagggcaggggaaatcatctcggtaatcatggaacctaaggatgtgatttgttttcattgtttgtatgtactacttttatggcagtcatatgaaccattatcttagcatggtaaacctgggttttgttcatattttctccagacagaaatgcaaagatcaaactgtgcaaatattaaaaaaatgcacatgctgttttattcaaatgcctcttttgtacatgttcatgtttagtgttttctcagaatcagcaactcaaggtactatgaggatttttctcactgacataatttgattacatactaaataagaggatatgttaatatgaggaaatgtaaattaaattagttataaataaataaccaaaaatgtatgtaaacattcaaatgattatctgaacaaatgagattttgtggtgttttctttaacccatgtgatgtcctccaaaatgtgtagggtaaaaattcacagggcttccagatcactttttcaatattaaattttatttacataatgttgacatctcat

SEQ ID NO: 20428 - protein, 278 aa, Homo sapiens; identical to SEQ ID NO: 2571

SEQ ID NO: 20429 - DNA, 4386 bp, Homo sapiens
gtggaagctgtctggtccaggcagtccctatttgcccgccccctcaagaagaacctcacgcaccaaaccaaccgacccctcgcggaggtggtgtaattcccccaaaatgggctctgccgcaggagaggctggctccagcgccgggggcttcggaaggagtttctgccacccccactgccgccactgaccgccccgacgccacggccggggccggggaccctgataagaaatggcccttcagccccctcccctcacctggctcggtcccacctgagggcaagagcggaggcaaaaacaaacaggcagggagggctgaccttgttgctaccgacagtggagcggcgcatcctgctgcttcctggaaagcggcccgaaagacattttttccccctggaggaaggaaacgggagggcgccggccagacggcggcaggcgcggaggcgttggtccgggcgggctgtgcagcctctagtggagacggtccgaagactacatctcccaggctgctctgggccgccctgcgtcgtaaccctggcgcgcacggaggcggcgactcttacctcacaaaggtagctcctccgccggcagcaactcggcgcccgcggtccatggaccggaacctcgggccgacggacgggaacccgggccgcgatcgccgcctccccgcctcaggctcctcctcctcgctctccgccgcctccgccggactcccgcaggccctgcaccgccgccgccaggctagcggagctgccccgggaagctgggtgacgggttcgcggctgccgccggactgcggcctactccgccgcctctcagtgctattgtccctgggcctggccttgagcgggtccactggggaaggccgtgtgcgccggctccgcggaagatgccggaccaagccctacagcagatgctggacagaagttgctgggtttgttttgctactgatgaagatgatagaacagctgaatgggtgagaccatgcaggtgcagaggatctacaaaatgggttcaccaggcctgtctacaacgctgggtggatgaaaagcaaagaggaaacagtacagccagagtggcatgtcctcagtgcaatgctgaatacctaatagtttttccaaaattgggtccagtggtttacgtcttggatcttgcagatagactgatctcaaaagcctgtccatttgctgcagcaggaataatggtcggctctatctattggacagctgtgacttatggagcagtgacagtgatgcaggttgtaggtcataaagaaggtctggatgttatggagagagctgatcctttattccttttaattggacttcctactattcctgtcatgctgatattaggcaagatgattcgctgggaggactatgtgcttagactgtggcgcaaatactcgaataaactacaaattttaaatagtatatttccagggataggttgtcctgttcctcgaattccagctgaggccaatcctttagcagatcatgtctctgctactcgaatcttgtgtggagcccttgtctttcctactattgctacaatagttggtaaattgatgttcagtagtgttaactctaatttacaaaggacaatcttgggtggaattgcgtttgttgccataaaaggagcatttaaagtttacttcaaacagcagcaatatttacgacaggcacaccgcaaaattctgaattatccagaacaagaagaagcataaaactgacttctggttgttctgcagttctctcatccttatgaatctgttgtgttgttttgattccatcattaatgcacttgtggagacttgtgataagctgctgctcctatattttttaagaaatataataaagcacttagggcaggggaaatcatctcggtaatcatggaacctaaggatgtgatttgttttcattgtttgtatgtactacttttatggcagtcatatgaaccattatcttagcatggtaaacctgggttttgttcatattttctccagacagaaatgcaaagatcaaactgtgcaaatattaaaaaaatgcacatgctgttttattcaaatgcctcttttgtacatgttcatgtttagtgttttctcagaatcagcaactcaaggtactatgaggatttttctcactgacataatttgattacatactaaataagaggatatgttaatatgaggaaatgtaaattaaattagttataaataaataaccaaaaatgtatgtaaacattcaaatgattatctgaacaaatgagattttgtggtgttttctttaacccatgtgatgtcctccaaaatgtgtagggtaaaaattcacagggcttccagatcactttttcaatattaaattttatttacataatgttgacatctcatacttcatgaagtaattttgactcatgcagtcgtgtgtgtgtgtgtgtgtgtgtgtgtgtgtgtgtgtgtatttgtgtgtttcagtgtttcatcaggtccttccatctctgggagttttttcaacccatatttctagaaattacagctgccagtttatagtagtttgagcagaggatgatttgcaaaaataaaaataaagttattttactctcctcttgcattgattcagttattgagatattcgttgatcacctcctatttcccaggcactgtgcagagtgctgtaggacatagtggtgaacaagacagacttggtccaagctcttacagagttgacagtctagtttcagcacatagaaaaccagcagtgaataaaccaaggtgaggccttgagctctttgtttttatattaatgaggagaaaagtatgaaaacaagaagtcttaagtaaatattgaggtcattgtttttggcttaagtttattatagaaaatcaacactaatgtttttagattttaattgtcctattgatgaggctagcaccttaatcactgtttagttttgtattcatttttaaaagcaattattgaagccattttcaatagattggccattttaatgttcagcaacctgaatggttatttttgttaattaaaattaaatttttaagagatattttcaaaaccctatttattttcttgttcacagtaatgcatgtcaataataaatgtttccccttactgataagcggccactttaggagtgtagcaaatatagattgagctatgttagtttgcaataatatatgttaactttagtaattaaagactggtttctatagtatgaatgtcttaattttgagttatatgatgtttatttgaatgactgttgaacattcaaatttgtattatttggagatgaagatttgactaacagtgagccttattaagaacactactacagttctgaaggggaaatataacatctatggttatatattttaaaaacttagattataggctgtaattataaaatatattggcttttgttttcaatgtgaaagatacattaaatggacacatatcttgcaaaattttgttgtatagaacagtttttaggcagcctttactaaagttatgcaaacacacagttccccatttactacattaatgcccttgacagggagtagctgcttggttttataggtattagggctcatgaaggccggggaacaactctaatccttttggggcaggagggagggtttttttagggttgcggggagggaactgcaagtgcctgaggaccagagtggcctctagccccgaattgaacacttttaaacctaaagagccttattattattagctcgagaaataccacatgccagtcttcccaggaaggtgacctgcctgaccatgaagcaacaaaagagcataggcagacttaaagttggatagacctgggttcaaatcatagttcagctttcaataactgtatgtatgattttggctaaaggatttgactttctctcaactgcagttttcttaatctttgaaatgcaaataatgtttatctcagaagactatttctaggattaactgagagattaaaggaacagcagcacttaggctcaaaatcgcccctacaaagcagtagttgtttcttaattgctaagtaatctgtttgcactctaggaaaagtaaatggagaggtaaaagaaaggcattggggacaaatgaaagagatgatgtagatttttcggatgggtgggtatattttattttccagtttattttcatatttctttactgtgttatttctggaaactttaatgttttaaacctcttttataaaattcaatgacgactactagaattcttttcaaaagttaacttatctccaaagtggctgaaaatattgtttaccattacatgattatgaaatgactgtgaagaatataaaattaaacttagtgacttaattagtcactgccttgct

SEQ ID NO: 20430 - protein, 278 aa, Homo sapiens; identical to SEQ ID NO: 2571

SEQ ID NO: 20431 - DNA, 4480 bp, Homo sapiens
gtggaagctgtctggtccaggcagtccctatttgcccgccccctcaagaagaacctcacgcaccaaaccaaccgacccctcgcggaggtggtgtaattcccccaaaatgggctctgccgcaggagaggctggctccagcgccgggggcttcggaaggagtttctgccacccccactgccgccactgaccgccccgacgccacggccggggccggggaccctgataagaaatggcccttcagccccctcccctcacctggctcggtcccacctgagggcaagagcggaggcaaaaacaaacaggcagggagggctgaccttgttgctaccgacagtggagcggcgcatcctgctgcttcctggaaagcggcccgaaagacattttttccccctggaggaaggaaacgggagggcgccggccagacggcggcaggcgcggaggcgttggtccgggcgggctgtgcagcctctagtggagacggtccgaagactacatctcccaggctgctctgggccgccctgcgtcgtaaccctggcgcgcacggaggcggcgactcttacctcacaaaggtagctcctccgccggcagcaactcggcgcccgcggtccatggaccggaacctcgggccgacggacgggaacccgggccgcgatcgccgcctccccgcctcaggctcctcctcctcgctctccgccgcctccgccggactcccgcaggccctgcaccgccgccgccaggctagcggagctgccccgggaagctgggtgacgggttcgcggctgccgccggactgcggcctactccgccgcctctcagtgctattgtccctgggcctggccttgagcgggtccactggggaaggccgtgtgcgccggctccgcggaagatgccggaccaagccctacagcagatgctggacagaagttgctgggtttgttttgctactgatgaagatgatagaacagctgaatgggtgagaccatgcaggtgcagaggatctacaaaatgggttcaccaggcctgtctacaacgctgggtggatgaaaagcaaagaggaaacagtacagccagagtggcatgtcctcagtgcaatgctgaatacctaatagtttttccaaaattgggtccagtggtttacgtcttggatcttgcagatagactgatctcaaaagcctgtccatttgctgcagcaggaataatggtcggctctatctattggacagctgtgacttatggagcagtgacagtgatgcaggttgtaggtcataaagaaggtctggatgttatggagagagctgatcctttattccttttaattggacttcctactattcctgtcatgctgatattaggcaagatgattcgctgggaggactatgtgcttagactgtggcgcaaatactcgaataaactacaaattttaaatagtatatttccagggataggttgtcctgttcctcgaattccagctgaggccaatcctttagcagatcatgtctctgctactcgaatcttgtgtggagcccttgtctttcctactattgctacaatagttggtaaattgatgttcagtagtgttaactctaatttacaaaggacaatcttgggtggaattgcgtttgttgccataaaaggagcatttaaagtttacttcaaacagcagcaatatttacgacaggcacaccgcaaaattctgaattatccagaacaagaagaagcataaaactgacttctggttgttctgcagttctctcatccttatgaatctgttgtgttgttttgattccatcattaatgcacttgtggagacttgtgataagctgctgctcctatattttttaagaaatataataaagcacttagggcaggggaaatcatctcggtaatcatggaacctaaggatgtgatttgttttcattgtttgtatgtactacttttatggcagtcatatgaaccattatcttagcatggtaaacctgggttttgttcatattttctccagacagaaatgcaaagatcaaactgtgcaaatattaaaaaaatgcacatgctgttttattcaaatgcctcttttgtacatgttcatgtttagtgttttctcagaatcagcaactcaaggtactatgaggatttttctcactgacataatttgattacatactaaataagaggatatgttaatatgaggaaatgtaaattaaattagttataaataaataaccaaaaatgtatgtaaacattcaaatgattatctgaacaaatgagattttgtggtgttttctttaacccatgtgatgtcctccaaaatgtgtagggtaaaaattcacagggcttccagatcactttttcaatattaaattttatttacataatgttgacatctcatacttcatgaagtaattttgactcatgcagtcgtgtgtgtgtgtgtgtgtgtgtgtgtgtgtgtgtgtgtatttgtgtgtttcagtgtttcatcaggtccttccatctctgggagttttttcaacccatatttctagaaattacagctgccagtttatagtagtttgagcagaggatgatttgcaaaaataaaaataaagttattttactctcctcttgcattgattcagttattgagatattcgttgatcacctcctatttcccaggcactgtgcagagtgctgtaggacatagtggtgaacaagacagacttggtccaagctcttacagagttgacagtctagtttcagcacatagaaaaccagcagtgaataaaccaaggtgaggccttgagctctttgtttttatattaatgaggagaaaagtatgaaaacaagaagtcttaagtaaatattgaggtcattgtttttggcttaagtttattatagaaaatcaacactaatgtttttagattttaattgtcctattgatgaggctagcaccttaatcactgtttagttttgtattcatttttaaaagcaattattgaagccattttcaatagattggccattttaatgttcagcaacctgaatggttatttttgttaattaaaattaaatttttaagagatattttcaaaaccctatttattttcttgttcacagtaatgcatgtcaataataaatgtttccccttactgataagcggccactttaggagtgtagcaaatatagattgagctatgttagtttgcaataatatatgttaactttagtaattaaagactggtttctatagtatgaatgtcttaattttgagttatatgatgtttatttgaatgactgttgaacattcaaatttgtattatttggagatgaagatttgactaacagtgagccttattaagaacactactacagttctgaaggggaaatataacatctatggttatatattttaaaaacttagattataggctgtaattataaaatatattggcttttgttttcaatgtgaaagatacattaaatggacacatatcttgcaaaattttgttgtatagaacagtttttaggcagcctttactaaagttatgcaaacacacagttccccatttactacattaatgcccttgacagggagtagctgcttggttttataggtattagggctcatgaaggccggggaacaactctaatccttttggggcaggagggagggtttttttagggttgcggggagggaactgcaagtgcctgaggaccagagtggcctctagccccgaattgaacacttttaaacctaaagagccttattattattagctcgagaaataccacatgccagtcttcccaggaaggtgacctgcctgaccatgaagcaacaaaagagcataggcagacttaaagttggatagacctgggttcaaatcatagttcagctttcaataactgtatgtatgattttggctaaaggatttgactttctctcaactgcagttttcttaatctttgaaatgcaaataatgtttatctcagaagactatttctaggattaactgagagattaaaggaacagcagcacttaggctcaaaatcgcccctacaaagcagtagttgtttcttaattgctaagtaatctgtttgcactctaggaaaagtaaatggagaggtaaaagaaaggcattggggacaaatgaaagagatgatgtagatttttcggatgggtgggtatattttattttccagtttattttcatatttctttactgtgttatttctggaaactttaatgttttaaacctcttttataaaattcaatgacgactactagaattcttttcaaaagttaacttatctccaaagtggctgaaaatattgtttaccattacatgattatgaaatgactgtgaagaatataaaattaaacttagtgacttaattagtcactgccttgctaactttgctgtaatttttttaaacgtcttgtttttaatatagcaaactatctcaatactggctggattaggttaaataaagaatttttatgttc

SEQ ID NO: 20432 - protein, 278 aa, Homo sapiens; identical to SEQ ID NO: 2571

SEQ ID NO: 20433 - DNA, 4585 bp, Homo sapiens
gtggaagctgtctggtccaggcagtccctatttgcccgccccctcaagaagaacctcacgcaccaaaccaaccgacccctcgcggaggtggtgtaattcccccaaaatgggctctgccgcaggagaggctggctccagcgccgggggcttcggaaggagtttctgccacccccactgccgccactgaccgccccgacgccacggccggggccggggaccctgataagaaatggcccttcagccccctcccctcacctggctcggtcccacctgagggcaagagcggaggcaaaaacaaacaggcagggagggctgaccttgttgctaccgacagtggagcggcgcatcctgctgcttcctggaaagcggcccgaaagacattttttccccctggaggaaggaaacgggagggcgccggccagacggcggcaggcgcggaggcgttggtccgggcgggctgtgcagcctctagtggagacggtccgaagactacatctcccaggctgctctgggccgccctgcgtcgtaaccctggcgcgcacggaggcggcgactcttacctcacaaaggtagctcctccgccggcagcaactcggcgcccgcggtccatggaccggaacctcgggccgacggacgggaacccgggccgcgatcgccgcctccccgcctcaggctcctcctcctcgctctccgccgcctccgccggactcccgcaggccctgcaccgccgccgccaggctagcggagctgccccgggaagctgggtgacgggttcgcggctgccgccggactgcggcctactccgccgcctctcagtgctattgtccctgggcctggccttgagcgggtccactggggaaggccgtgtgcgccggctccgcggaagatgccggaccaagccctacagcagatgctggacagaagttgctgggtttgttttgctactgatgaagatgatagaacagctgaatgggtgagaccatgcaggtgcagaggatctacaaaatgggttcaccaggcctgtctacaacgctgggtggatgaaaagcaaagaggaaacagtacagccagagtggcatgtcctcagtgcaatgctgaatacctaatagtttttccaaaattgggtccagtggtttacgtcttggatcttgcagatagactgatctcaaaagcctgtccatttgctgcagcaggaataatggtcggctctatctattggacagctgtgacttatggagcagtgacagtgatgcaggttgtaggtcataaagaaggtctggatgttatggagagagctgatcctttattccttttaattggacttcctactattcctgtcatgctgatattaggcaagatgattcgctgggaggactatgtgcttagactgtggcgcaaatactcgaataaactacaaattttaaatagtatatttccagggataggttgtcctgttcctcgaattccagctgaggccaatcctttagcagatcatgtctctgctactcgaatcttgtgtggagcccttgtctttcctactattgctacaatagttggtaaattgatgttcagtagtgttaactctaatttacaaaggacaatcttgggtggaattgcgtttgttgccataaaaggagcatttaaagtttacttcaaacagcagcaatatttacgacaggcacaccgcaaaattctgaattatccagaacaagaagaagcataaaactgacttctggttgttctgcagttctctcatccttatgaatctgttgtgttgttttgattccatcattaatgcacttgtggagacttgtgataagctgctgctcctatattttttaagaaatataataaagcacttagggcaggggaaatcatctcggtaatcatggaacctaaggatgtgatttgttttcattgtttgtatgtactacttttatggcagtcatatgaaccattatcttagcatggtaaacctgggttttgttcatattttctccagacagaaatgcaaagatcaaactgtgcaaatattaaaaaaatgcacatgctgttttattcaaatgcctcttttgtacatgttcatgtttagtgttttctcagaatcagcaactcaaggtactatgaggatttttctcactgacataatttgattacatactaaataagaggatatgttaatatgaggaaatgtaaattaaattagttataaataaataaccaaaaatgtatgtaaacattcaaatgattatctgaacaaatgagattttgtggtgttttctttaacccatgtgatgtcctccaaaatgtgtagggtaaaaattcacagggcttccagatcactttttcaatattaaattttatttacataatgttgacatctcatacttcatgaagtaattttgactcatgcagtcgtgtgtgtgtgtgtgtgtgtgtgtgtgtgtgtgtgtgtatttgtgtgtttcagtgtttcatcaggtccttccatctctgggagttttttcaacccatatttctagaaattacagctgccagtttatagtagtttgagcagaggatgatttgcaaaaataaaaataaagttattttactctcctcttgcattgattcagttattgagatattcgttgatcacctcctatttcccaggcactgtgcagagtgctgtaggacatagtggtgaacaagacagacttggtccaagctcttacagagttgacagtctagtttcagcacatagaaaaccagcagtgaataaaccaaggtgaggccttgagctctttgtttttatattaatgaggagaaaagtatgaaaacaagaagtcttaagtaaatattgaggtcattgtttttggcttaagtttattatagaaaatcaacactaatgtttttagattttaattgtcctattgatgaggctagcaccttaatcactgtttagttttgtattcatttttaaaagcaattattgaagccattttcaatagattggccattttaatgttcagcaacctgaatggttatttttgttaattaaaattaaatttttaagagatattttcaaaaccctatttattttcttgttcacagtaatgcatgtcaataataaatgtttccccttactgataagcggccactttaggagtgtagcaaatatagattgagctatgttagtttgcaataatatatgttaactttagtaattaaagactggtttctatagtatgaatgtcttaattttgagttatatgatgtttatttgaatgactgttgaacattcaaatttgtattatttggagatgaagatttgactaacagtgagccttattaagaacactactacagttctgaaggggaaatataacatctatggttatatattttaaaaacttagattataggctgtaattataaaatatattggcttttgttttcaatgtgaaagatacattaaatggacacatatcttgcaaaattttgttgtatagaacagtttttaggcagcctttactaaagttatgcaaacacacagttccccatttactacattaatgcccttgacagggagtagctgcttggttttataggtattagggctcatgaaggccggggaacaactctaatccttttggggcaggagggagggtttttttagggttgcggggagggaactgcaagtgcctgaggaccagagtggcctctagccccgaattgaacacttttaaacctaaagagccttattattattagctcgagaaataccacatgccagtcttcccaggaaggtgacctgcctgaccatgaagcaacaaaagagcataggcagacttaaagttggatagacctgggttcaaatcatagttcagctttcaataactgtatgtatgattttggctaaaggatttgactttctctcaactgcagttttcttaatctttgaaatgcaaataatgtttatctcagaagactatttctaggattaactgagagattaaaggaacagcagcacttaggctcaaaatcgcccctacaaagcagtagttgtttcttaattgctaagtaatctgtttgcactctaggaaaagtaaatggagaggtaaaagaaaggcattggggacaaatgaaagagatgatgtagatttttcggatgggtgggtatattttattttccagtttattttcatatttctttactgtgttatttctggaaactttaatgttttaaacctcttttataaaattcaatgacgactactagaattcttttcaaaagttaacttatctccaaagtggctgaaaatattgtttaccattacatgattatgaaatgactgtgaagaatataaaattaaacttagtgacttaattagtcactgccttgctaactttgctgtaatttttttaaacgtcttgtttttaatatagcaaactatctcaatactggctggattaggttaaataaagaatttttatgttctctaggtgtactttgttaaatctcaaaacattctgtacatacataattttttttaatcacagttatcgagatactagtttttgtaagtaaaagtaatctgaattt

SEQ ID NO: 20434 - protein, 278 aa, Homo sapiens; identical to SEQ ID NO: 2571

SEQ ID NO: 20435 - DNA, 2174 bp, Homo sapiens
cggctgtcgaaagaggagcacgacgtgaacttccaccgacaatcgtttaaatactgcaggcgaaggacgggttcttattgttccttcaggcaaaccggcagctgagtccagcttgtgaacttgaacttgaacttgctgaagaagctcccggcggccctctgctggccgccgcctttgccagagggagaggctggagtcaccctgttggaacccatttctggggctggcacctgttgggctgcccggccgcgcgtacctggtcccatcgggggctctgcccactccgctgatgacgcgggtagaagggaggccgcagggacactctggggggactgtgccgggcgggcaccccccagctgctcactgtggggtgcggcaccgaggcctggttgggctgcaaggagaccgactgggattcccgggctggtggccggggagacggggtagaggtgagaagcaagagctcaggaggcctcaggccccagcgctgtggggctgccgttgtcgttctgggtggaggtctggccaaaccggcttttgccccgagtgaggaattcctgctcattttggtgttagtggagaggtcgctgttcacagcgggggtggggttcgtcccctccaggctagtagggagctggctggtgcattgctgtgttgctgcccttctgccctgtctcctgatcctgttcagactctgggtggctcctttgagtcttctcaggccgtgaaagatgggaaaggcaggttgttgaaaccactgctgctccgggctggcagagaccctgagctgtacctcctgggatgaaaggagaacccaggagcaggcaggtgaccactgcttcctcatactcctcagcaagtcctggatctcttcctgtctgtaacccacggataccatgaacttagtttgcagggggtcctcccagtgggagagtggctgcacacagcgcttaagttcctcaccttcatgactcgcattcatccatggacccctcacagtgtgctctgaagggcctctcttcctgcaattgacaatgagaaatttcttcagcaagttttcactctccggggacatgggggagggaatggaatacatcctgctcagtacctgctcctatagctccttgaagttctgtccatcgaaaaataaggatccatttaccagtatatagaggataactcgcagacgccatacatccaccagctcatatttgtggccctagaagaattccagggcagcctaaggggactgccacaaaaggtatccagcttgttgcgaaaggcgaatttattcctgaacccaatctgtgatgttcatgttaacatggacaatacatttctggtgacaatacacaatatctgtggacaatgcacttctggtaacagcttgcatagcagacacttttggtggaatttgcttcaggcctctttcctgctgctgtgagcaggtattcacaaacttctcgctagcgtgctttgtgatgaggcagagattcctcactatcgatcacagcaaatacttcactatgttggggtgatctgagccttcatgattcctactttgtggatggtgtctggaggctggaggagatctgctgagtctcatcaatgaacttcacggcggctgctttcccagtcaggatgtcccaggccaaccccaccttagccaggttgtccttgacgatggtctcaaggatcctcgctgccaataaggatccctcctcagcagagatggctgagaggccctgcggcgtgtgggacttactactgggcttggagtcaaggtgtcccaggtcggcttaattttgggaaaagctggtgagaagcttggtccaaatcacctgaaaagaaaatcacttgcatagtttacctgaagaacggatttctataatggaatcaaaacacaatactggacaaaaatcaaataagcaaaagcaacaaactgaaaaggaaatgctgagtaaaaaagaacttaaaaattagaaaaataagagaaaaaagaacaagaagaaccagtaacctcagccaagccagggacttacatacgtgcttggaattccaaagcagcagttccttatgaggaagaactaagcctagtaacaaggctgaggataatctatgtggctttctcatgctttggtctcaagaactctttactcttaaagaaaatatat

SEQ ID NO: 20436 - protein, 86 aa, Homo sapiens
MTRVEGRPQGHSGGTVPGGHPPAAHCGVRHRGLVGLQGDRLGFPGWWPGRRGRGEKQELRRPQAPALWGCRCRSGWRSGQTGFCPE

SEQ ID NO: 20437 - DNA, 4641 bp, Homo sapiens
atggtgcaaaacagcctgggataatattgccagctgccagaccagactagggtggctcaaggggttgccatagtttctaaatcttttgaaggaaaaactgatcgcacagaagagtggtatggaacccagtacaaacaagaagctataccggatgaagtcatcaagaaatggcaaaatgctgacctgaatgggaaatttaaacttcctacaaagaatgaatttattcctacgaattttgagattttaccgttagaaaaagaggcgacaccataccctgctcttattaaggatacagctatgagcaaactttggttcaaacaagatgataagttttttttgccgaaggcttgtctcaactttgaatttttcagtcgctacatttatgctgatcctctccattgcaacatgacatacctgtttatcaggttattgaaggatgatttaaaagagtatacatatgcagcacgcctctcaggtttgagctatggcattgcatcaggaatgaatgcaatacttctttcagtgaaaggttacaatgacaagcagccaattttactaaagaagattattgagaaaatggctacctttgagattgatgaaaaaagatttgaaattatcaaagaagcatatatgcgatctcttaacaatttccgggctgaacagcctcaccagcatgccatgtactacctccgcttgctgatgactgaagtggcctggactaaagatgagttaaaagaagctctggatgatgtaacccttcctcgccttaaggccttcatacctcagctcctgtcacggctgcacattgaagcccttctccatggaaacataacaaagcaggctgcattaggaattatgcagatggttgaagacaccctcattgaacatgctcataccaaacctctccttccaagtcagctggttcggtatagagaagttcagctccctgacagaggatggtttgtttatcagcagagaaatgaagttcacaataactgtggcatcgagatatactaccaaacagacatgcaaagcacctcagagaatatgtttctggagctcttctgtcagattatctcggaaccttgcttcaacaccctgcgcaccaaggagcagttgggctatatcgtcttcagcgggccacgtcgagctaatggcatacagggcttgagattcatcatccagtcagaaaagccacctcactacctagaaagcagagtggaagctttcttaattaccatggaaaagtccatagaggacatgacagaagaggccttccaaaaacacattcaggcattagcaattcgtcgactagacaaaccaaagaagctatctgctgagtgtgctaaatactggggagaaatcatctcccagcaatataattttgacagagataacactgaggttgcatatttaaagacacttaccaaggaagatatcatcaaattctacaaggaaatgttggcagtagatgctccaaggagacataaggtatccgtccatgttcttgccagggaaatggattcttgtcctgttgttggagagttcccatgtcaaaatgacataaatttgtcacaagcaccagccttgccacaacctgaagtgattcagaacatgaccgaattcaagcgtggtctgccactgtttccccttgtgaaaccacatattaacttcatggctgcaaaactctgaagattccccatgcatgggaaagtgcaagtggatgcattcctgagtcttccagagcctaagaaaatcatcttggccactttaatagtttctgattcactattagagaaacaaacaaaaaattgtcaaatgtcattatgtagaaatattataaatccaaagtaaattacaaaatcttatagatgtagaatattttttaaatacatgcctcttaaatattttaaaatttttcttttgattactgagagaaatttccccaatataacaatgcttaaaatgaatgatattcctatagaatcttccttccctattctgtaaaatagtcacttgtccgaagaaagttaaaagttagctcttttctaaaagcctcctagcttgacatagaaggcttcacaacatttagaaaggtaataactttttaaaaattgatcctcaaatttgctttctacttgatggtttcatgtaaatcagtggaaaacattacatttggcagatgataaagcaatgtcatcttttattagtgaaatgctggttatataaggcatggttttaatctttttataaaatttgaacatgttttttatgccaactcgtaaaatgctagaaaaccctacttatttacaatgctagaaatacagacttaccttacatcaattttgtcctaaaccgaatttctcaggattactgtggtttctttcattctgattgaattatattgacctacttcttcatagttggtttgcagtgttccatgagttttacttttcctcatcaacatattgctttaacacaacatatttatttaacacgtacaaatagggtcaacttcagatcctactgagtgtgtgacatgcttttccaacatcagctttttgtaaccacctgtataactttttattacagtgaaattgcagtcagtatgtgaaccaaaatatcttgcccctttatgaatttaaaaggcagccaatacaaagccacctttttggaaatataaaaagtaaagccttgcattcttatatagcaggtcttcataaaactctaaaatcccttgttgctaccagtctaatcttgccttaaatgttaagttattttttgaatatataaatataaacatataaacacagatgatgactggagtagacttttaaaaaaatatttttttcatgagatactattttaggtgaaattgttactgtagatttaacagctgttttgaaatatttactgttattaaaacttgcttcaagagaaattgtgaatatatttccatatacaagcactagtaacagtaagtggccctgtcatccactaactcaggcaaagtaaagaatggcatttttgaaggacattttacctccccatatgatttgattggctaggactttcttctgtaaagtcataccttttcacatcttaagtttttacatttgccattttccaaatctcaattttgggcaagaacgatatagtcacaactatggggctgctttcaaaagcggggctccatttctactgtcagatcaatgtggtgctgtaaccatctttttatccctaccttcaagaacctccttatatgaagcctgtctttatccatcagaaggtgtgtgaaatcatcacttccttctggttttatgtatttgtagactatgcagcttttcattaaactgcaagtatatacaagacagatctgaaattaggcctgagtgttccgatccaccactgtactagtaaataaaaatccacctaccttttatgtggaaaattatgtgctattgagtaacttttagctcttttttaaaaaatgggtgaaatttaagtgtcttttttatgagaatgacacatgaagagatctgagagcaatctcatgtagtcttccatgaacctgcaattgtttggtatgcgtcagcattttccaatttccaggttggatctagagctgctgttgatcactcaggcatactaatggattcatttagatgggtccaagctgcagtccatgagcaataacagactaccccagatactgcagtttacgcagtgcttagtaaatgagatttgtggaactaagttattagttacctgaggcttcttaagaaagtcttcttttttgaccagttgatgtgaaagagggagcatgtgacacagccagtatggtggagtgctagggttatcctgtttacaataaatcgcctgaatttcacctctggagtctgcatttgtattatttttccagttttagtgaaatagtacagtggccagtcctcagcctacctctcaacatcccagtttgaccagatttcttgctttcattgttcataatgcagaaagcagtgaattatattaacattttaaaagtgtttctgggtaacaatgatttttgtcaaatagaagactcaatttcacaaccttaagaatagatcacttttgtaaaacaagaatctcagtatttgatgttggactccttgctgtgagtattgtcactgactccaaacccagaaagatttgttcctgcccttacagggatgaaaataaaaaggatagaaaaaatatttctctcctctacaatgagtccttacatcttcttgccacatctccagctgcagtttaggcagatatcttgttcaatctctgtcttcttgatccctgtcaaaataatttttctactcatatagtggccagttggctcaggcaggcatttcaagaggaatctgcttgttcctcacttttccagcataggacagtggtccagcccgcacagtcagcattgttctcagggacgatgtggcagccccacacagaggccaagagcaacagagcaactccaggatttatgagttgggacagtcgtcctctcattcatgatacatggagggactcaggggactcagcaggtccccctgttgttttttagggtttttgtttttgtttttttttgagacagagtctcgctct

SEQ ID NO: 20438 - protein, 464 aa, Homo sapiens
MSKLWFKQDDKFFLPKACLNFEFFSRYIYADPLHCNMTYLFIRLLKDDLKEYTYAARLSGLSYGIASGMNAILLSVKGYNDKQPILLKKIIEKMATFEIDEKRFEIIKEAYMRSLNNFRAEQPHQHAMYYLRLLMTEVAWTKDELKEALDDVTLPRLKAFIPQLLSRLHIEALLHGNITKQAALGIMQMVEDTLIEHAHTKPLLPSQLVRYREVQLPDRGWFVYQQRNEVHNNCGIEIYYQTDMQSTSENMFLELFCQIISEPCFNTLRTKEQLGYIVFSGPRRANGIQGLRFIIQSEKPPHYLESRVEAFLITMEKSIEDMTEEAFQKHIQALAIRRLDKPKKLSAECAKYWGEIISQQYNFDRDNTEVAYLKTLTKEDIIKFYKEMLAVDAPRRHKVSVHVLAREMDSCPVVGEFPCQNDINLSQAPALPQPEVIQNMTEFKRGLPLFPLVKPHINFMAAKL

SEQ ID NO: 20439 - DNA, 6249 bp, Homo sapiens
gacttcggggggaccgcttctcaccttgccctcagccctgcccttttctccgggcactgagtttccaggaccgtgtggaatgcccgcgctgggaaaaaagtttgcctgcctcccgccttggaagacgagtgtggggtttcctatcgggggacatttaggagccaaaagatacctcgggatcctctacagcagctcccttgttttacgtcggagacaaccggagctccgagagatggcttgatttcccagcaactgccgagattgtggcaaaaccaggattaggacacaggttttttgccatccggcggcgtgccctctccactgcaccgttgatctgctttccaaaaaaagacttacagcaaaatgaataatccagccatcaagagaataggaaatcacattaccaagtctcctgaagacaagcgagaatatcgagggctagagctggccaatggtatcaaagtacttcttatcagtgatcccaccacggataagtcatcagcagcacttgatgtgcacataggttcattgtcggatcctccaaatattgctggcttaagtcatttttgtgaacatatgctttttttgggaacaaagaaataccctaaagaaaatgaatacagccagtttctcagtgagcatgcaggaagttcaaatgcctttactagtggagagcataccaattactattttgatgtttctcatgaacacctagaaggtgccctagacaggtttgcacagttttttctgtgccccttgttcgatgaaagttgcaaagacagagaggtgaatgcagttgattcagaacatgagaagaatgtgatgaatgatgcctggagactctttcaattggaaaaagctacagggaatcctaaacaccccttcagtaaatttgggacaggtaacaaatatactctggagactagaccaaaccaagaaggcattgatgtaagacaagagctactgaaattccattctgcttactattcatccaacttaatggctgtttgtgttttaggtcgagaatctttagatgacttgactaatctggtggtaaagttattttctgaagtagagaacaaaaatgttccattgccagaatttcctgaacaccctttccaagaagaacatcttaaacaactttacaaaatagtacccattaaagatattaggaatctctatgtgacatttcccatacctgaccttcagaaatactacaaatcaaatcctggtcattatcttggtcatctcattgggcatgaaggtcctggaagtctgttatcagaacttaagtcaaagggctgggttaatactcttgttggtgggcagaaggaaggagcccgaggttttatgttttttatcattaatgtggacttgaccgaggaaggattattacatgttgaagatataattttgcacatgtttcaatacattcagaagttacgtgcagaaggacctcaagaatgggttttccaagagtgcaaggacttgaatgctgttgcttttaggtttaaagacaaagagaggccacggggctatacatctaagattgcaggaatattgcattattatcccctagaagaggtgctcacagcggaatatttactggaagaatttagacctgacttaatagagatggttctcgataaactcagaccagaaaatgtccgggttgccatagtttctaaatcttttgaaggaaaaactgatcgcacagaagagtggtatggaacccagtacaaacaagaagctataccggatgaagtcatcaagaaatggcaaaatgctgacctgaatgggaaatttaaacttcctacaaagaatgaatttattcctacgaattttgagattttaccgttagaaaaagaggcgacaccataccctgctcttattaaggatacagctatgagcaaactttggttcaaacaagatgataagttttttttgccgaaggcttgtctcaactttgaatttttcagcccatttgcttatgtggaccccttgcactgtaacatggcctatttgtaccttgagctcctcaaagactcactcaacgagtatgcatatgcagcagagctagcaggcttgagctatgatctccaaaataccatctatgggatgtatctttcagtgaaaggttacaatgacaagcagccaattttactaaagaagattattgagaaaatggctacctttgagattgatgaaaaaagatttgaaattatcaaagaagcatatatgcgatctcttaacaatttccgggctgaacagcctcaccagcatgccatgtactacctccgcttgctgatgactgaagtggcctggactaaagatgagttaaaagaagctctggatgatgtaacccttcctcgccttaaggccttcatacctcagctcctgtcacggctgcacattgaagcccttctccatggaaacataacaaagcaggctgcattaggaattatgcagatggttgaagacaccctcattgaacatgctcataccaaacctctccttccaagtcagctggttcggtatagagaagttcagctccctgacagaggatggtttgtttatcagcagagaaatgaagttcacaataactgtggcatcgagatatactaccaaacagacatgcaaagcacctcagagaatatgtttctggagctcttctgtcagattatctcggaaccttgcttcaacaccctgcgcaccaaggagcagttgggctatatcgtcttcagcgggccacgtcgagctaatggcatacagggcttgagattcatcatccagtcagaaaagccacctcactacctagaaagcagagtggaagctttcttaattaccatggaaaagtccatagaggacatgacagaagaggccttccaaaaacacattcaggcattagcaattcgtcgactagacaaaccaaagaagctatctgctgagtgtgctaaatactggggagaaatcatctcccagcaatataattttgacagagataacactgaggttgcatatttaaagacacttaccaaggaagatatcatcaaattctacaaggaaatgttggcagtagatgctccaaggagacataaggtatccgtccatgttcttgccagggaaatggattcttgtcctgttgttggagagttcccatgtcaaaatgacataaatttgtcacaagcaccagccttgccacaacctgaagtgattcagaacatgaccgaattcaagcgtggtctgccactgtttccccttgtgaaaccacatattaacttcatggctgcaaaactctgaagattccccatgcatgggaaagtgcaagtggatgcattcctgagtcttccagagcctaagaaaatcatcttggccactttaatagtttctgattcactattagagaaacaaacaaaaaattgtcaaatgtcattatgtagaaatattataaatccaaagtaaattacaaaatcttatagatgtagaatattttttaaatacatgcctcttaaatattttaaaatttttcttttgattactgagagaaatttccccaatataacaatgcttaaaatgaatgatattcctatagaatcttccttccctattctgtaaaatagtcacttgtccgaagaaagttaaaagttagctcttttctaaaagcctcctagcttgacatagaaggcttcacaacatttagaaaggtaataactttttaaaaattgatcctcaaatttgctttctacttgatggtttcatgtaaatcagtggaaaacattacatttggcagatgataaagcaatgtcatcttttattagtgaaatgctggttatataaggcatggttttaatctttttataaaatttgaacatgttttttatgccaactcgtaaaatgctagaaaaccctacttatttacaatgctagaaatacagacttaccttacatcaattttgtcctaaaccgaatttctcaggattactgtggtttctttcattctgattgaattatattgacctacttcttcatagttggtttgcagtgttccatgagttttacttttcctcatcaacatattgctttaacacaacatatttatttaacacgtacaaatagggtcaacttcagatcctactgagtgtgtgacatgcttttccaacatcagctttttgtaaccacctgtataactttttattacagtgaaattgcagtcagtatgtgaaccaaaatatcttgcccctttatgaatttaaaaggcagccaatacaaagccacctttttggaaatataaaaagtaaagccttgcattcttatatagcaggtcttcataaaactctaaaatcccttgttgctaccagtctaatcttgccttaaatgttaagttattttttgaatatataaatataaacatataaacacagatgatgactggagtagacttttaaaaaaatatttttttcatgagatactattttaggtgaaattgttactgtagatttaacagctgttttgaaatatttactgttattaaaacttgcttcaagagaaattgtgaatatatttccatatacaagcactagtaacagtaagtggccctgtcatccactaactcaggcaaagtaaagaatggcatttttgaaggacattttacctccccatatgatttgattggctaggactttcttctgtaaagtcataccttttcacatcttaagtttttacatttgccattttccaaatctcaattttgggcaagaacgatatagtcacaactatggggctgctttcaaaagcggggctccatttctactgtcagatcaatgtggtgctgtaaccatctttttatccctaccttcaagaacctccttatatgaagcctgtctttatccatcagaaggtgtgtgaaatcatcacttccttctggttttatgtatttgtagactatgcagcttttcattaaactgcaagtatatacaagacagatctgaaattaggcctgagtgttccgatccaccactgtactagtaaataaaaatccacctaccttttatgtggaaaattatgtgctattgagtaacttttagctcttttttaaaaaatgggtgaaatttaagtgtcttttttatgagaatgacacatgaagagatctgagagcaatctcatgtagtcttccatgaacctgcaattgtttggtatgcgtcagcattttccaatttccaggttggatctagagctgctgttgatcactcaggcatactaatggattcatttagatgggtccaagctgcagtccatgagcaataacagactaccccagatactgcagtttacgcagtgcttagtaaatgagatttgtggaactaagttattagttacctgaggcttcttaagaaagtcttcttttttgaccagttgatgtgaaagagggagcatgtgacacagccagtatggtggagtgctagggttatcctgtttacaataaatcgcctgaatttcacctctggagtctgcatttgtattatttttccagttttagtgaaatagtacagtggccagtcctcagcctacctctcaacatcccagtttgaccagatttcttgctttcattgttcataatgcagaaagcagtgaattatattaacattttaaaagtgtttctgggtaacaatgatttttgtcaaatagaagactcaatttcacaaccttaagaatagatcacttttgtaaaacaagaatctcagtatttgatgttggactccttgctgtgagtattgtcactgactccaaacccagaaagatttgttcctgcccttacagggatgaaaataaaaaggatagaaaaaatatttctctcctctacaatgagtccttacatcttcttgccacatctccagctgcagtttaggcagatatcttgttcaatctctgtcttcttgatccctgtcaaaataatttttctactcatatagtggccagttggctcaggcaggcatttcaagaggaatctgcttgttcctcacttttccagcataggacagtggtccagcccgcacagtcagcattgttctcagggacgatgtggcagccccacacagaggccaagagcaacagagcaactccaggatttatgagttgggacagtcgtcctctcattcatgatacatggagggactcaggggactcagcaggtccccctgttgttttttagggtttttgtttttgtttttttttgagacagagtctcgctct

SEQ ID NO: 20440 - protein, 978 aa, Homo sapiens
MNNPAIKRIGNHITKSPEDKREYRGLELANGIKVLLISDPTTDKSSAALDVHIGSLSDPPNIAGLSHFCEHMLFLGTKKYPKENEYSQFLSEHAGSSNAFTSGEHTNYYFDVSHEHLEGALDRFAQFFLCPLFDESCKDREVNAVDSEHEKNVMNDAWRLFQLEKATGNPKHPFSKFGTGNKYTLETRPNQEGIDVRQELLKFHSAYYSSNLMAVCVLGRESLDDLTNLVVKLFSEVENKNVPLPEFPEHPFQEEHLKQLYKIVPIKDIRNLYVTFPIPDLQKYYKSNPGHYLGHLIGHEGPGSLLSELKSKGWVNTLVGGQKEGARGFMFFIINVDLTEEGLLHVEDIILHMFQYIQKLRAEGPQEWVFQECKDLNAVAFRFKDKERPRGYTSKIAGILHYYPLEEVLTAEYLLEEFRPDLIEMVLDKLRPENVRVAIVSKSFEGKTDRTEEWYGTQYKQEAIPDEVIKKWQNADLNGKFKLPTKNEFIPTNFEILPLEKEATPYPALIKDTAMSKLWFKQDDKFFLPKACLNFEFFSPFAYVDPLHCNMAYLYLELLKDSLNEYAYAAELAGLSYDLQNTIYGMYLSVKGYNDKQPILLKKIIEKMATFEIDEKRFEIIKEAYMRSLNNFRAEQPHQHAMYYLRLLMTEVAWTKDELKEALDDVTLPRLKAFIPQLLSRLHIEALLHGNITKQAALGIMQMVEDTLIEHAHTKPLLPSQLVRYREVQLPDRGWFVYQQRNEVHNNCGIEIYYQTDMQSTSENMFLELFCQIISEPCFNTLRTKEQLGYIVFSGPRRANGIQGLRFIIQSEKPPHYLESRVEAFLITMEKSIEDMTEEAFQKHIQALAIRRLDKPKKLSAECAKYWGEIISQQYNFDRDNTEVAYLKTLTKEDIIKFYKEMLAVDAPRRHKVSVHVLAREMDSCPVVGEFPCQNDINLSQAPALPQPEVIQNMTEFKRGLPLFPLVKPHINFMAAKL

SEQ ID NO: 20441 - DNA, 6074 bp, Homo sapiens
gcgcagggccggctcgaagcgcaagcaggaagcgtttgcggtgatcccggcgactgcgctggctaatgcggtaccggctagcgtggcttctgcaccccgcactgcccagcaccttccgctcagtcctcggcgcccgcctgccgcctccggagcgcctgtgtggtttccaaaaaaagacttacagcaaaatgaataatccagccatcaagagaataggaaatcacattaccaagtctcctgaagacaagcgagaatatcgagggctagagctggccaatggtatcaaagtacttcttatcagtgatcccaccacggataagtcatcagcagcacttgatgtgcacataggttcattgtcggatcctccaaatattgctggcttaagtcatttttgtgaacatatgctttttttgggaacaaagaaataccctaaagaaaatgaatacagccagtttctcagtgagcatgcaggaagttcaaatgcctttactagtggagagcataccaattactattttgatgtttctcatgaacacctagaaggtgccctagacaggtttgcacagttttttctgtgccccttgttcgatgaaagttgcaaagacagagaggtgaatgcagttgattcagaacatgagaagaatgtgatgaatgatgcctggagactctttcaattggaaaaagctacagggaatcctaaacaccccttcagtaaatttgggacaggtaacaaatatactctggagactagaccaaaccaagaaggcattgatgtaagacaagagctactgaaattccattctgcttactattcatccaacttaatggctgtttgtgttttaggtcgagaatctttagatgacttgactaatctggtggtaaagttattttctgaagtagagaacaaaaatgttccattgccagaatttcctgaacaccctttccaagaagaacatcttaaacaactttacaaaatagtacccattaaagatattaggaatctctatgtgacatttcccatacctgaccttcagaaatactacaaatcaaatcctggtcattatcttggtcatctcattgggcatgaaggtcctggaagtctgttatcagaacttaagtcaaagggctgggttaatactcttgttggtgggcagaaggaaggagcccgaggttttatgttttttatcattaatgtggacttgaccgaggaaggattattacatgttgaagatataattttgcacatgtttcaatacattcagaagttacgtgcagaaggacctcaagaatgggttttccaagagtgcaaggacttgaatgctgttgcttttaggtttaaagacaaagagaggccacggggctatacatctaagattgcaggaatattgcattattatcccctagaagaggtgctcacagcggaatatttactggaagaatttagacctgacttaatagagatggttctcgataaactcagaccagaaaatgtccgggttgccatagtttctaaatcttttgaaggaaaaactgatcgcacagaagagtggtatggaacccagtacaaacaagaagctataccggatgaagtcatcaagaaatggcaaaatgctgacctgaatgggaaatttaaacttcctacaaagaatgaatttattcctacgaattttgagattttaccgttagaaaaagaggcgacaccataccctgctcttattaaggatacagctatgagcaaactttggttcaaacaagatgataagttttttttgccgaaggcttgtctcaactttgaatttttcagcccatttgcttatgtggaccccttgcactgtaacatggcctatttgtaccttgagctcctcaaagactcactcaacgagtatgcatatgcagcagagctagcaggcttgagctatgatctccaaaataccatctatgggatgtatctttcagtgaaaggttacaatgacaagcagccaattttactaaagaagattattgagaaaatggctacctttgagattgatgaaaaaagatttgaaattatcaaagaagcatatatgcgatctcttaacaatttccgggctgaacagcctcaccagcatgccatgtactacctccgcttgctgatgactgaagtggcctggactaaagatgagttaaaagaagctctggatgatgtaacccttcctcgccttaaggccttcatacctcagctcctgtcacggctgcacattgaagcccttctccatggaaacataacaaagcaggctgcattaggaattatgcagatggttgaagacaccctcattgaacatgctcataccaaacctctccttccaagtcagctggttcggtatagagaagttcagctccctgacagaggatggtttgtttatcagcagagaaatgaagttcacaataactgtggcatcgagatatactaccaaacagacatgcaaagcacctcagagaatatgtttctggagctcttctgtcagattatctcggaaccttgcttcaacaccctgcgcaccaaggagcagttgggctatatcgtcttcagcgggccacgtcgagctaatggcatacagggcttgagattcatcatccagtcagaaaagccacctcactacctagaaagcagagtggaagctttcttaattaccatggaaaagtccatagaggacatgacagaagaggccttccaaaaacacattcaggcattagcaattcgtcgactagacaaaccaaagaagctatctgctgagtgtgctaaatactggggagaaatcatctcccagcaatataattttgacagagataacactgaggttgcatatttaaagacacttaccaaggaagatatcatcaaattctacaaggaaatgttggcagtagatgctccaaggagacataaggtatccgtccatgttcttgccagggaaatggattcttgtcctgttgttggagagttcccatgtcaaaatgacataaatttgtcacaagcaccagccttgccacaacctgaagtgattcagaacatgaccgaattcaagcgtggtctgccactgtttccccttgtgaaaccacatattaacttcatggctgcaaaactctgaagattccccatgcatgggaaagtgcaagtggatgcattcctgagtcttccagagcctaagaaaatcatcttggccactttaatagtttctgattcactattagagaaacaaacaaaaaattgtcaaatgtcattatgtagaaatattataaatccaaagtaaattacaaaatcttatagatgtagaatattttttaaatacatgcctcttaaatattttaaaatttttcttttgattactgagagaaatttccccaatataacaatgcttaaaatgaatgatattcctatagaatcttccttccctattctgtaaaatagtcacttgtccgaagaaagttaaaagttagctcttttctaaaagcctcctagcttgacatagaaggcttcacaacatttagaaaggtaataactttttaaaaattgatcctcaaatttgctttctacttgatggtttcatgtaaatcagtggaaaacattacatttggcagatgataaagcaatgtcatcttttattagtgaaatgctggttatataaggcatggttttaatctttttataaaatttgaacatgttttttatgccaactcgtaaaatgctagaaaaccctacttatttacaatgctagaaatacagacttaccttacatcaattttgtcctaaaccgaatttctcaggattactgtggtttctttcattctgattgaattatattgacctacttcttcatagttggtttgcagtgttccatgagttttacttttcctcatcaacatattgctttaacacaacatatttatttaacacgtacaaatagggtcaacttcagatcctactgagtgtgtgacatgcttttccaacatcagctttttgtaaccacctgtataactttttattacagtgaaattgcagtcagtatgtgaaccaaaatatcttgcccctttatgaatttaaaaggcagccaatacaaagccacctttttggaaatataaaaagtaaagccttgcattcttatatagcaggtcttcataaaactctaaaatcccttgttgctaccagtctaatcttgccttaaatgttaagttattttttgaatatataaatataaacatataaacacagatgatgactggagtagacttttaaaaaaatatttttttcatgagatactattttaggtgaaattgttactgtagatttaacagctgttttgaaatatttactgttattaaaacttgcttcaagagaaattgtgaatatatttccatatacaagcactagtaacagtaagtggccctgtcatccactaactcaggcaaagtaaagaatggcatttttgaaggacattttacctccccatatgatttgattggctaggactttcttctgtaaagtcataccttttcacatcttaagtttttacatttgccattttccaaatctcaattttgggcaagaacgatatagtcacaactatggggctgctttcaaaagcggggctccatttctactgtcagatcaatgtggtgctgtaaccatctttttatccctaccttcaagaacctccttatatgaagcctgtctttatccatcagaaggtgtgtgaaatcatcacttccttctggttttatgtatttgtagactatgcagcttttcattaaactgcaagtatatacaagacagatctgaaattaggcctgagtgttccgatccaccactgtactagtaaataaaaatccacctaccttttatgtggaaaattatgtgctattgagtaacttttagctcttttttaaaaaatgggtgaaatttaagtgtcttttttatgagaatgacacatgaagagatctgagagcaatctcatgtagtcttccatgaacctgcaattgtttggtatgcgtcagcattttccaatttccaggttggatctagagctgctgttgatcactcaggcatactaatggattcatttagatgggtccaagctgcagtccatgagcaataacagactaccccagatactgcagtttacgcagtgcttagtaaatgagatttgtggaactaagttattagttacctgaggcttcttaagaaagtcttcttttttgaccagttgatgtgaaagagggagcatgtgacacagccagtatggtggagtgctagggttatcctgtttacaataaatcgcctgaatttcacctctggagtctgcatttgtattatttttccagttttagtgaaatagtacagtggccagtcctcagcctacctctcaacatcccagtttgaccagatttcttgctttcattgttcataatgcagaaagcagtgaattatattaacattttaaaagtgtttctgggtaacaatgatttttgtcaaatagaagactcaatttcacaaccttaagaatagatcacttttgtaaaacaagaatctcagtatttgatgttggactccttgctgtgagtattgtcactgactccaaacccagaaagatttgttcctgcccttacagggatgaaaataaaaaggatagaaaaaatatttctctcctctacaatgagtccttacatcttcttgccacatctccagctgcagtttaggcagatatcttgttcaatctctgtcttcttgatccctgtcaaaataatttttctactcatatagtggccagttggctcaggcaggcatttcaagaggaatctgcttgttcctcacttttccagcataggacagtggtccagcccgcacagtcagcattgttctcagggacgatgtggcagccccacacagaggccaagagcaacagagcaactccaggatttatgagttgggacagtcgtcctctcattcatgatacatggagggactcaggggactcagcaggtccccctgttgttttttagggtttttgtttttgtttttttttgagacagagtctcgctct

SEQ ID NO: 20442 - protein, 1019 aa, Homo sapiens [sequence omitted]

SEQ ID NO: 20443 - DNA, 3888 bp, Homo sapiens
atggtgcaaaacagcctgggataatattgccagctgccagaccagactagggtggctcaaggggttgccatagtttctaaatcttttgaaggaaaaactgatcgcacagaagagtggtatggaacccagtacaaacaagaagctataccggatgaagtcatcaagaaatggcaaaatgctgacctgaatgggaaatttaaacttcctacaaagaatgaatttattcctacgaattttgagattttaccgttagaaaaagaggcgacaccataccctgctcttattaaggatacagctatgagcaaactttggttcaaacaagatgataagttttttttgccgaaggcttgtctcaactttgaatttttcagtcgctacatttatgctgatcctctccattgcaacatgacatacctgtttatcaggttattgaaggatgatttaaaagagtatacatatgcagcacgcctctcaggtttgagctatggcattgcatcaggaatgaatgcaatacttctttcagtgaaaggttacaatgacaagcagccaattttactaaagaagattattgagaaaatggctacctttgagattgatgaaaaaagatttgaaattatcaaagaagcatatatgcgatctcttaacaatttccgggctgaacagcctcaccagcatgccatgtactacctccgcttgctgatgactgaagtggcctggactaaagatgagttaaaagaagctctggatgatgtaacccttcctcgccttaaggccttcatacctcagctcctgtcacggctgcacattgaagcccttctccatggaaacataacaaagcaggctgcattaggaattatgcagatggttgaagacaccctcattgaacatgctcataccaaacctctccttccaagtcagctggttcggtatagagaagttcagctccctgacagaggatggtttgtttatcagcagagaaatgaagttcacaataactgtggcatcgagatatactaccaaacagacatgcaaagcacctcagagaatatgtttctggagctcttctgtcagattatctcggaaccttgcttcaacaccctgcgcaccaaggagcagttgggctatatcgtcttcagcgggccacgtcgagctaatggcatacagggcttgagattcatcatccagtcagaaaagccacctcactacctagaaagcagagtggaagctttcttaattaccatggaaaagtccatagaggacatgacagaagaggccttccaaaaacacattcaggcattagcaattcgtcgactagacaaaccaaagaagctatctgctgagtgtgctaaatactggggagaaatcatctcccagcaatataattttgacagagataacactgaggttgcatatttaaagacacttaccaaggaagatatcatcaaattctacaaggaaatgttggcagtagatgctccaaggagacataaggtatccgtccatgttcttgccagggaaatggattcttgtcctgttgttggagagttcccatgtcaaaatgacataaatttgtcacaagcaccagccttgccacaacctgaagtgattcagaacatgaccgaattcaagcgtggtctgccactgtttccccttgtgaaaccacatattaacttcatggctgcaaaactctgaagattccccatgcatgggaaagtgcaagtggatgcattcctgagtcttccagagcctaagaaaatcatcttggccactttaatagtttctgattcactattagagaaacaaacaaaaaattgtcaaatgtcattatgtagaaatattataaatccaaagtaaattacaaaatcttatagatgtagaatattttttaaatacatgcctcttaaatattttaaaatttttcttttgattactgagagaaatttccccaatataacaatgcttaaaatgaatgatattcctatagaatcttccttccctattctgtaaaatagtcacttgtccgaagaaagttaaaagttagctcttttctaaaagcctcctagcttgacatagaaggcttcacaacatttagaaaggtaataactttttaaaaattgatcctcaaatttgctttctacttgatggtttcatgtaaatcagtggaaaacattacatttggcagatgataaagcaatgtcatcttttattagtgaaatgctggttatataaggcatggttttaatctttttataaaatttgaacatgttttttatgccaactcgtaaaatgctagaaaaccctacttatttacaatgctagaaatacagacttaccttacatcaattttgtcctaaaccgaatttctcaggattactgtggtttctttcattctgattgaattatattgacctacttcttcatagttggtttgcagtgttccatgagttttacttttcctcatcaacatattgctttaacacaacatatttatttaacacgtacaaatagggtcaacttcagatcctactgagtgtgtgacatgcttttccaacatcagctttttgtaaccacctgtataactttttattacagtgaaattgcagtcagtatgtgaaccaaaatatcttgcccctttatgaatttaaaaggcagccaatacaaagccacctttttggaaatataaaaagtaaagccttgcattcttatatagcaggtcttcataaaactctaaaatcccttgttgctaccagtctaatcttgccttaaatgttaagttattttttgaatatataaatataaacatataaacacagatgatgactggagtagacttttaaaaaaatatttttttcatgagatactattttaggtgaaattgttactgtagatttaacagctgttttgaaatatttactgttattaaaacttgcttcaagagaaattgtgaatatatttccatatacaagcactagtaacagtaagtggccctgtcatccactaactcaggcaaagtaaagaatggcatttttgaaggacattttacctccccatatgatttgattggctaggactttcttctgtaaagtcataccttttcacatcttaagtttttacatttgccattttccaaatctcaattttgggcaagaacgatatagtcacaactatggggctgctttcaaaagcggggctccatttctactgtcagatcaatgtggtgctgtaaccatctttttatccctaccttcaagaacctccttatatgaagcctgtctttatccatcagaaggtgtgtgaaatcatcacttccttctggttttatgtatttgtagactatgcagcttttcattaaactgcaagtatatacaagacagatctgaaattaggcctgagtgttccgatccaccactgtactagtaaataaaaatccacctaccttttatgtggaaaattatgtgctattgagtaacttttagctcttttttaaaaaatgggtgaaatttaagtgtcttttttatgagaatgacacatgaagagatctgagagcaatctcatgtagtcttccatgaacctgcaattgtttggtatgcgtcagcattttccaatttccaggttggatctagagctgctgttgatcactcaggcatactaatggattcatttagatgggtccaagctgcagtccatgagcaataacagactaccccagatactgcagtttacgcagtgcttagtaaatgagatttgtggaactaagttattagttacctgaggcttcttaagaaagtcttcttttttgaccagttgatgtgaaagagggagcatgtgacacagccagtatggtggagtgctagggttatcctgtttacaataaatcgcctgaatttc

SEQ ID NO: 20444 - protein, 464 aa, Homo sapiens; identical to SEQ ID NO: 20438

SEQ ID NO: 20445 - DNA, 5321 bp, Homo sapiens
gcgcagggccggctcgaagcgcaagcaggaagcgtttgcggtgatcccggcgactgcgctggctaatgcggtaccggctagcgtggcttctgcaccccgcactgcccagcaccttccgctcagtcctcggcgcccgcctgccgcctccggagcgcctgtgtggtttccaaaaaaagacttacagcaaaatgaataatccagccatcaagagaataggaaatcacattaccaagtctcctgaagacaagcgagaatatcgagggctagagctggccaatggtatcaaagtacttcttatcagtgatcccaccacggataagtcatcagcagcacttgatgtgcacataggttcattgtcggatcctccaaatattgctggcttaagtcatttttgtgaacatatgctttttttgggaacaaagaaataccctaaagaaaatgaatacagccagtttctcagtgagcatgcaggaagttcaaatgcctttactagtggagagcataccaattactattttgatgtttctcatgaacacctagaaggtgccctagacaggtttgcacagttttttctgtgccccttgttcgatgaaagttgcaaagacagagaggtgaatgcagttgattcagaacatgagaagaatgtgatgaatgatgcctggagactctttcaattggaaaaagctacagggaatcctaaacaccccttcagtaaatttgggacaggtaacaaatatactctggagactagaccaaaccaagaaggcattgatgtaagacaagagctactgaaattccattctgcttactattcatccaacttaatggctgtttgtgttttaggtcgagaatctttagatgacttgactaatctggtggtaaagttattttctgaagtagagaacaaaaatgttccattgccagaatttcctgaacaccctttccaagaagaacatcttaaacaactttacaaaatagtacccattaaagatattaggaatctctatgtgacatttcccatacctgaccttcagaaatactacaaatcaaatcctggtcattatcttggtcatctcattgggcatgaaggtcctggaagtctgttatcagaacttaagtcaaagggctgggttaatactcttgttggtgggcagaaggaaggagcccgaggttttatgttttttatcattaatgtggacttgaccgaggaaggattattacatgttgaagatataattttgcacatgtttcaatacattcagaagttacgtgcagaaggacctcaagaatgggttttccaagagtgcaaggacttgaatgctgttgcttttaggtttaaagacaaagagaggccacggggctatacatctaagattgcaggaatattgcattattatcccctagaagaggtgctcacagcggaatatttactggaagaatttagacctgacttaatagagatggttctcgataaactcagaccagaaaatgtccgggttgccatagtttctaaatcttttgaaggaaaaactgatcgcacagaagagtggtatggaacccagtacaaacaagaagctataccggatgaagtcatcaagaaatggcaaaatgctgacctgaatgggaaatttaaacttcctacaaagaatgaatttattcctacgaattttgagattttaccgttagaaaaagaggcgacaccataccctgctcttattaaggatacagctatgagcaaactttggttcaaacaagatgataagttttttttgccgaaggcttgtctcaactttgaatttttcagcccatttgcttatgtggaccccttgcactgtaacatggcctatttgtaccttgagctcctcaaagactcactcaacgagtatgcatatgcagcagagctagcaggcttgagctatgatctccaaaataccatctatgggatgtatctttcagtgaaaggttacaatgacaagcagccaattttactaaagaagattattgagaaaatggctacctttgagattgatgaaaaaagatttgaaattatcaaagaagcatatatgcgatctcttaacaatttccgggctgaacagcctcaccagcatgccatgtactacctccgcttgctgatgactgaagtggcctggactaaagatgagttaaaagaagctctggatgatgtaacccttcctcgccttaaggccttcatacctcagctcctgtcacggctgcacattgaagcccttctccatggaaacataacaaagcaggctgcattaggaattatgcagatggttgaagacaccctcattgaacatgctcataccaaacctctccttccaagtcagctggttcggtatagagaagttcagctccctgacagaggatggtttgtttatcagcagagaaatgaagttcacaataactgtggcatcgagatatactaccaaacagacatgcaaagcacctcagagaatatgtttctggagctcttctgtcagattatctcggaaccttgcttcaacaccctgcgcaccaaggagcagttgggctatatcgtcttcagcgggccacgtcgagctaatggcatacagggcttgagattcatcatccagtcagaaaagccacctcactacctagaaagcagagtggaagctttcttaattaccatggaaaagtccatagaggacatgacagaagaggccttccaaaaacacattcaggcattagcaattcgtcgactagacaaaccaaagaagctatctgctgagtgtgctaaatactggggagaaatcatctcccagcaatataattttgacagagataacactgaggttgcatatttaaagacacttaccaaggaagatatcatcaaattctacaaggaaatgttggcagtagatgctccaaggagacataaggtatccgtccatgttcttgccagggaaatggattcttgtcctgttgttggagagttcccatgtcaaaatgacataaatttgtcacaagcaccagccttgccacaacctgaagtgattcagaacatgaccgaattcaagcgtggtctgccactgtttccccttgtgaaaccacatattaacttcatggctgcaaaactctgaagattccccatgcatgggaaagtgcaagtggatgcattcctgagtcttccagagcctaagaaaatcatcttggccactttaatagtttctgattcactattagagaaacaaacaaaaaattgtcaaatgtcattatgtagaaatattataaatccaaagtaaattacaaaatcttatagatgtagaatattttttaaatacatgcctcttaaatattttaaaatttttcttttgattactgagagaaatttccccaatataacaatgcttaaaatgaatgatattcctatagaatcttccttccctattctgtaaaatagtcacttgtccgaagaaagttaaaagttagctcttttctaaaagcctcctagcttgacatagaaggcttcacaacatttagaaaggtaataactttttaaaaattgatcctcaaatttgctttctacttgatggtttcatgtaaatcagtggaaaacattacatttggcagatgataaagcaatgtcatcttttattagtgaaatgctggttatataaggcatggttttaatctttttataaaatttgaacatgttttttatgccaactcgtaaaatgctagaaaaccctacttatttacaatgctagaaatacagacttaccttacatcaattttgtcctaaaccgaatttctcaggattactgtggtttctttcattctgattgaattatattgacctacttcttcatagttggtttgcagtgttccatgagttttacttttcctcatcaacatattgctttaacacaacatatttatttaacacgtacaaatagggtcaacttcagatcctactgagtgtgtgacatgcttttccaacatcagctttttgtaaccacctgtataactttttattacagtgaaattgcagtcagtatgtgaaccaaaatatcttgcccctttatgaatttaaaaggcagccaatacaaagccacctttttggaaatataaaaagtaaagccttgcattcttatatagcaggtcttcataaaactctaaaatcccttgttgctaccagtctaatcttgccttaaatgttaagttattttttgaatatataaatataaacatataaacacagatgatgactggagtagacttttaaaaaaatatttttttcatgagatactattttaggtgaaattgttactgtagatttaacagctgttttgaaatatttactgttattaaaacttgcttcaagagaaattgtgaatatatttccatatacaagcactagtaacagtaagtggccctgtcatccactaactcaggcaaagtaaagaatggcatttttgaaggacattttacctccccatatgatttgattggctaggactttcttctgtaaagtcataccttttcacatcttaagtttttacatttgccattttccaaatctcaattttgggcaagaacgatatagtcacaactatggggctgctttcaaaagcggggctccatttctactgtcagatcaatgtggtgctgtaaccatctttttatccctaccttcaagaacctccttatatgaagcctgtctttatccatcagaaggtgtgtgaaatcatcacttccttctggttttatgtatttgtagactatgcagcttttcattaaactgcaagtatatacaagacagatctgaaattaggcctgagtgttccgatccaccactgtactagtaaataaaaatccacctaccttttatgtggaaaattatgtgctattgagtaacttttagctcttttttaaaaaatgggtgaaatttaagtgtcttttttatgagaatgacacatgaagagatctgagagcaatctcatgtagtcttccatgaacctgcaattgtttggtatgcgtcagcattttccaatttccaggttggatctagagctgctgttgatcactcaggcatactaatggattcatttagatgggtccaagctgcagtccatgagcaataacagactaccccagatactgcagtttacgcagtgcttagtaaatgagatttgtggaactaagttattagttacctgaggcttcttaagaaagtcttcttttttgaccagttgatgtgaaagagggagcatgtgacacagccagtatggtggagtgctagggttatcctgtttacaataaatcgcctgaatttc

SEQ ID NO: 20446 - protein, 1019 aa, Homo sapiens [sequence omitted]

SEQ ID NO: 20447 - DNA, 1875 bp, Homo sapiens
atggtgcaaaacagcctgggataatattgccagctgccagaccagactagggtggctcaaggggttgccatagtttctaaatcttttgaaggaaaaactgatcgcacagaagagtggtatggaacccagtacaaacaagaagctataccggatgaagtcatcaagaaatggcaaaatgctgacctgaatgggaaatttaaacttcctacaaagaatgaatttattcctacgaattttgagattttaccgttagaaaaagaggcgacaccataccctgctcttattaaggatacagctatgagcaaactttggttcaaacaagatgataagttttttttgccgaaggcttgtctcaactttgaatttttcagtcgctacatttatgctgatcctctccattgcaacatgacatacctgtttatcaggttattgaaggatgatttaaaagagtatacatatgcagcacgcctctcaggtttgagctatggcattgcatcaggaatgaatgcaatacttctttcagtgaaaggttacaatgacaagcagccaattttactaaagaagattattgagaaaatggctacctttgagattgatgaaaaaagatttgaaattatcaaagaagcatatatgcgatctcttaacaatttccgggctgaacagcctcaccagcatgccatgtactacctccgcttgctgatgactgaagtggcctggactaaagatgagttaaaagaagctctggatgatgtaacccttcctcgccttaaggccttcatacctcagctcctgtcacggctgcacattgaagcccttctccatggaaacataacaaagcaggctgcattaggaattatgcagatggttgaagacaccctcattgaacatgctcataccaaacctctccttccaagtcagctggttcggtatagagaagttcagctccctgacagaggatggtttgtttatcagcagagaaatgaagttcacaataactgtggcatcgagatatactaccaaacagacatgcaaagcacctcagagaatatgtttctggagctcttctgtcagattatctcggaaccttgcttcaacaccctgcgcaccaaggagcagttgggctatatcgtcttcagcgggccacgtcgagctaatggcatacagggcttgagattcatcatccagtcagaaaagccacctcactacctagaaagcagagtggaagctttcttaattaccatggaaaagtccatagaggacatgacagaagaggccttccaaaaacacattcaggcattagcaattcgtcgactagacaaaccaaagaagctatctgctgagtgtgctaaatactggggagaaatcatctcccagcaatataattttgacagagataacactgaggttgcatatttaaagacacttaccaaggaagatatcatcaaattctacaaggaaatgttggcagtagatgctccaaggagacataaggtatccgtccatgttcttgccagggaaatggattcttgtcctgttgttggagagttcccatgtcaaaatgacataaatttgtcacaagcaccagccttgccacaacctgaagtgattcagaacatgaccgaattcaagcgtggtctgccactgtttccccttgtgaaaccacatattaacttcatggctgcaaaactctgaagattccccatgcatgggaaagtgcaagtggatgcattcctgagtcttccagagcctaagaaaatcatcttggccactttaatagtttctgattcactattagagaaacaaacaaaaaattgtcaaatgtcattatgtagaaatattataaatccaaagtaaattacaaaatcttatagatgt

SEQ ID NO: 20448 - protein, 464 aa, Homo sapiens; identical to SEQ ID NO: 20438

SEQ ID NO: 20449 - DNA, 3308 bp, Homo sapiens
gcgcagggccggctcgaagcgcaagcaggaagcgtttgcggtgatcccggcgactgcgctggctaatgcggtaccggctagcgtggcttctgcaccccgcactgcccagcaccttccgctcagtcctcggcgcccgcctgccgcctccggagcgcctgtgtggtttccaaaaaaagacttacagcaaaatgaataatccagccatcaagagaataggaaatcacattaccaagtctcctgaagacaagcgagaatatcgagggctagagctggccaatggtatcaaagtacttcttatcagtgatcccaccacggataagtcatcagcagcacttgatgtgcacataggttcattgtcggatcctccaaatattgctggcttaagtcatttttgtgaacatatgctttttttgggaacaaagaaataccctaaagaaaatgaatacagccagtttctcagtgagcatgcaggaagttcaaatgcctttactagtggagagcataccaattactattttgatgtttctcatgaacacctagaaggtgccctagacaggtttgcacagttttttctgtgccccttgttcgatgaaagttgcaaagacagagaggtgaatgcagttgattcagaacatgagaagaatgtgatgaatgatgcctggagactctttcaattggaaaaagctacagggaatcctaaacaccccttcagtaaatttgggacaggtaacaaatatactctggagactagaccaaaccaagaaggcattgatgtaagacaagagctactgaaattccattctgcttactattcatccaacttaatggctgtttgtgttttaggtcgagaatctttagatgacttgactaatctggtggtaaagttattttctgaagtagagaacaaaaatgttccattgccagaatttcctgaacaccctttccaagaagaacatcttaaacaactttacaaaatagtacccattaaagatattaggaatctctatgtgacatttcccatacctgaccttcagaaatactacaaatcaaatcctggtcattatcttggtcatctcattgggcatgaaggtcctggaagtctgttatcagaacttaagtcaaagggctgggttaatactcttgttggtgggcagaaggaaggagcccgaggttttatgttttttatcattaatgtggacttgaccgaggaaggattattacatgttgaagatataattttgcacatgtttcaatacattcagaagttacgtgcagaaggacctcaagaatgggttttccaagagtgcaaggacttgaatgctgttgcttttaggtttaaagacaaagagaggccacggggctatacatctaagattgcaggaatattgcattattatcccctagaagaggtgctcacagcggaatatttactggaagaatttagacctgacttaatagagatggttctcgataaactcagaccagaaaatgtccgggttgccatagtttctaaatcttttgaaggaaaaactgatcgcacagaagagtggtatggaacccagtacaaacaagaagctataccggatgaagtcatcaagaaatggcaaaatgctgacctgaatgggaaatttaaacttcctacaaagaatgaatttattcctacgaattttgagattttaccgttagaaaaagaggcgacaccataccctgctcttattaaggatacagctatgagcaaactttggttcaaacaagatgataagttttttttgccgaaggcttgtctcaactttgaatttttcagcccatttgcttatgtggaccccttgcactgtaacatggcctatttgtaccttgagctcctcaaagactcactcaacgagtatgcatatgcagcagagctagcaggcttgagctatgatctccaaaataccatctatgggatgtatctttcagtgaaaggttacaatgacaagcagccaattttactaaagaagattattgagaaaatggctacctttgagattgatgaaaaaagatttgaaattatcaaagaagcatatatgcgatctcttaacaatttccgggctgaacagcctcaccagcatgccatgtactacctccgcttgctgatgactgaagtggcctggactaaagatgagttaaaagaagctctggatgatgtaacccttcctcgccttaaggccttcatacctcagctcctgtcacggctgcacattgaagcccttctccatggaaacataacaaagcaggctgcattaggaattatgcagatggttgaagacaccctcattgaacatgctcataccaaacctctccttccaagtcagctggttcggtatagagaagttcagctccctgacagaggatggtttgtttatcagcagagaaatgaagttcacaataactgtggcatcgagatatactaccaaacagacatgcaaagcacctcagagaatatgtttctggagctcttctgtcagattatctcggaaccttgcttcaacaccctgcgcaccaaggagcagttgggctatatcgtcttcagcgggccacgtcgagctaatggcatacagggcttgagattcatcatccagtcagaaaagccacctcactacctagaaagcagagtggaagctttcttaattaccatggaaaagtccatagaggacatgacagaagaggccttccaaaaacacattcaggcattagcaattcgtcgactagacaaaccaaagaagctatctgctgagtgtgctaaatactggggagaaatcatctcccagcaatataattttgacagagataacactgaggttgcatatttaaagacacttaccaaggaagatatcatcaaattctacaaggaaatgttggcagtagatgctccaaggagacataaggtatccgtccatgttcttgccagggaaatggattcttgtcctgttgttggagagttcccatgtcaaaatgacataaatttgtcacaagcaccagccttgccacaacctgaagtgattcagaacatgaccgaattcaagcgtggtctgccactgtttccccttgtgaaaccacatattaacttcatggctgcaaaactctgaagattccccatgcatgggaaagtgcaagtggatgcattcctgagtcttccagagcctaagaaaatcatcttggccactttaatagtttctgattcactattagagaaacaaacaaaaaattgtcaaatgtcattatgtagaaatattataaatccaaagtaaattacaaaatcttatagatgt

SEQ ID NO: 20450 - protein, 1019 aa, Homo sapiens [sequence omitted]

SEQ ID NO: 20451 - DNA, 3083 bp, Homo sapiens
gaagcgcaagcaggaagcgtttgcggtgatcccggcgactgcgctggctaatgcggtaccggctagcgtggcttctgcaccccgcactgcccagcaccttccgctcagtcctcggcgcccgcctgccgcctccggagcgcctgtgtgggaactaccaggttgtttttcaaagcagcggcactattttgcatttccaccagcagtgtgtgaaaattccaatttctctatatccttgacaacacttgctatatgtacttttgttataagccatcctggtgggtatgaagtggtgtctcattggaattttgactttcattttcctgatgaccattgtaagagttttaaaatatattctctaggccgggcgtgttggctcatgcctgtaatcccagcactttgggaggatgaggcaggtggatcacctgcagtcaggagttcaggaccagcctgaccaacaagctcctgcatgtggcatctgaaagctatctgtgaagaggttcaagcaattcttctgcctcagcctcccgagtagctgggattacagtttccaaaaaaagacttacagcaaaatgaataatccagccatcaagagaataggaaatcacattaccaagtctcctgaagacaagcgagaatatcgagggctagagctggccaatggtatcaaagtacttcttatcagtgatcccaccacggataagtcatcagcagcacttgatgtgcacataggttcattgtcggatcctccaaatattgctggcttaagtcatttttgtgaacatatgctttttttgggaacaaagaaataccctaaagaaaatgaatacagccagtttctcagtgagcatgcaggaagttcaaatgcctttactagtggagagcataccaattactattttgatgtttctcatgaacacctagaaggtgccctagacaggtttgcacagttttttctgtgccccttgttcgatgaaagttgcaaagacagagaggtgaatgcagttgattcagaacatgagaagaatgtgatgaatgatgcctggagactctttcaattggaaaaagctacagggaatcctaaacaccccttcagtaaatttgggacaggtaacaaatatactctggagactagaccaaaccaagaaggcattgatgtaagacaagagctactgaaattccattctgcttactattcatccaacttaatggctgtttgtgttttaggtcgagaatctttagatgacttgactaatctggtggtaaagttattttctgaagtagagaacaaaaatgttccattgccagaatttcctgaacaccctttccaagaagaacatcttaaacaactttacaaaatagtacccattaaagatattaggaatctctatgtgacatttcccatacctgaccttcagaaatactacaaatcaaatcctggtcattatcttggtcatctcattgggcatgaaggtcctggaagtctgttatcagaacttaagtcaaagggctgggttaatactcttgttggtgggcagaaggaaggagcccgaggttttatgttttttatcattaatgtggacttgaccgaggaaggattattacatgttgaagatataattttgcacatgtttcaatacattcagaagttacgtgcagaaggacctcaagaatgggttttccaagagtgcaaggacttgaatgctgttgcttttaggtttaaagacaaagagaggccacggggctatacatctaagattgcaggaatattgcattattatcccctagaagaggtgctcacagcggaatatttactggaagaatttagacctgacttaatagagatggttctcgataaactcagaccagaaaatgtccgggttgccatagtttctaaatcttttgaaggaaaaactgatcgcacagaagagtggtatggaacccagtacaaacaagaagctataccggatgaagtcatcaagaaatggcaaaatgctgacctgaatgggaaatttaaacttcctacaaagaatgaatttattcctacgaattttgagattttaccgttagaaaaagaggcgacaccataccctgctcttattaaggatacagctatgagcaaactttggttcaaacaagatgataagttttttttgccgaaggcttgtctcaactttgaatttttcagctttgataaaattgttggcttttggctgggtgcgatagctcacacctgtaatcctaacattttgggaagccgaggcaggaagatcgcttgagcctaggagttcgagaccagcctggacaacacacccatttgcttatgtggaccccttgcactgtaacatggcctatttgtaccttgagctcctcaaagactcactcaacgagtatgcatatgcagcagagctagcaggcttgagctatgatctccaaaataccatctatgggatgtattcgctacatttatgctgatcctctccattgcaacatgacatacctgtttatcaggttattgaaggatgatttaaaagagtatacatatgcagcacgcctctcaggtttgagctatggcattgcatcaggaatgaatgcaatacttctttcagtgaaaggttacaatgacaagcagccaattttactaaagaagattattgagaaaatggctacctttgagattgatgaaaaaagatttgaaattatcaaagaagcatatatgcgatctcttaacaatttccgggctgaacagcctcaccagcatgccatgtactacctccgcttgctgatgactgaagtggcctggactaaagatgagttaaaagaagctctggatggtgagactttctacttaaagcttaatgctttcttcatttttttcctaaattcattttggtttattctgatattgactgtttatacttttaaataacttgtagttctattaaagctggctgtgtatatgttttataaaaacagtggtgggcaggatggctatagttaacagtaacatatacttttaaataggtagaaggaagatattgaacattcccaacccaaacaaatgataaataaacttgagatgatgg

SEQ ID NO: 20452 - protein, 568 aa, Homo sapiens
MNNPAIKRIGNHITKSPEDKREYRGLELANGIKVLLISDPTTDKSSAALDVHIGSLSDPPNIAGLSHFCEHMLFLGTKKYPKENEYSQFLSEHAGSSNAFTSGEHTNYYFDVSHEHLEGALDRFAQFFLCPLFDESCKDREVNAVDSEHEKNVMNDAWRLFQLEKATGNPKHPFSKFGTGNKYTLETRPNQEGIDVRQELLKFHSAYYSSNLMAVCVLGRESLDDLTNLVVKLFSEVENKNVPLPEFPEHPFQEEHLKQLYKIVPIKDIRNLYVTFPIPDLQKYYKSNPGHYLGHLIGHEGPGSLLSELKSKGWVNTLVGGQKEGARGFMFFIINVDLTEEGLLHVEDIILHMFQYIQKLRAEGPQEWVFQECKDLNAVAFRFKDKERPRGYTSKIAGILHYYPLEEVLTAEYLLEEFRPDLIEMVLDKLRPENVRVAIVSKSFEGKTDRTEEWYGTQYKQEAIPDEVIKKWQNADLNGKFKLPTKNEFIPTNFEILPLEKEATPYPALIKDTAMSKLWFKQDDKFFLPKACLNFEFFSFDKIVGFWLGAIAHTCNPNILGSRGRKIA

SEQ ID NO: 20453 - DNA, 748 bp, Homo sapiens
ggtcagtgatacatggtgcaaaacagcctgggataatattgccagctgccagaccagactagggtggctcaaggggttgccatagtttctaaatcttttgaaggaaaaactgatcgcacagaagagtggtatggaacccagtacaaacaagaagctataccggatgaagtcatcaagaaatggcaaaatgctgacctgaatgggaaatttaaacttcctacaaagaatgaatttattcctacgaattttgagattttaccgttagaaaaagaggcgacaccataccctgctcttattaaggatacagctatgagcaaactttggttcaaacaagatgataagttttttttgccgaaggcttgtctcaactttgaatttttcagctttgataaaattgttggcttttggctgggtgcgatagctcacacctgtaatcctaacattttgggaagccgaggcaggaagatcgcttgagcctaggagttcgagaccagcctggacaacacagtgagaccttgactcaactttaaaaaacaaaatgttgactttgttatcagtacattagttatatttactgtgctacaagtagagtgaaacttttaatttgctgccaaacaagccaagcaggcacctgcctcaggcctttagcagtagctatttcttcagcctgggaagttctccactccaccccttagatatccccagggctcactcccttgcctccttcaggtctgagtccagatgtcac

SEQ ID NO: 20454 - protein, 54 aa, Homo sapiens
MSKLWFKQDDKFFLPKACLNFEFFSFDKIVGFWLGAIAHTCNPNILGSRGRKIA

SEQ ID NO: 20455 - DNA, 5016 bp, Homo sapiens
agtttctggggattcgggcggagacgagattagtgatttggcggctccgactggcgcgggacaaacgccacggccagagtaccgggtagagagcggggacgccgacctgcgtgcgtcggtcctccaggccacgccagcgcccgagagggaccagggagactccggcccctgtcggccgccaagcccctccgcccctcacagcgcccaggtccgcggccgggccttgattttttggcggggaccgtcatggcgtcgcagccaaattcgtctgcgaagaagaaagaggagaaggggaagaacatccaggtggtggtgagatgcagaccatttaatttggcagagcggaaagctagcgcccattcaatagtagaatgtgatcctgtacgaaaagaagttagtgtacgaactggaggattggctgacaagagctcaaggaaaacatacacttttgatatggtgtttggagcatctactaaacagattgatgtttaccgaagtgttgtttgtccaattctggatgaagttattatgggctataattgcactatctttgcgtatggccaaactggcactggaaaaacttttacaatggaaggtgaaaggtcacctaatgaagagtatacctgggaagaggatcccttggctggtataattccacgtacccttcatcaaatttttgagaaacttactgataatggtactgaattttcagtcaaagtgtctctgttggagatctataatgaagagctttttgatcttcttaatccatcatctgatgtttctgagagactacagatgtttgatgatccccgtaacaagagaggagtgataattaaaggtttagaagaaattacagtacacaacaaggatgaagtctatcaaattttagaaaagggggcagcaaaaaggacaactgcagctactctgatgaatgcatactctagtcgttcccactcagttttctctgttacaatacatatgaaagaaactacgattgatggagaagagcttgttaaaatcggaaagttgaacttggttgatcttgcaggaagtgaaaacattggccgttctggagctgttgataagagagctcgggaagctggaaatataaatcaatccctgttgactttgggaagggtcattactgcccttgtagaaagaacacctcatgttccttatcgagaatctaaactaactagaatcctccaggattctcttggagggcgtacaagaacatctataattgcaacaatttctcctgcatctctcaatcttgaggaaactctgagtacattggaatatgctcatagagcaaagaacatattgaataagcctgaagtgaatcagaaactcaccaaaaaagctcttattaaggagtatacggaggagatagaacgtttaaaacgagatcttgctgcagcccgtgagaaaaatggagtgtatatttctgaagaaaattttagagtcatgagtggaaaattaactgttcaagaagagcagattgtagaattgattgaaaaaattggtgctgttgaggaggagctgaatagggttacagagttgtttatggataataaaaatgaacttgaccagtgtaaatctgacctgcaaaataaaacacaagaacttgaaaccactcaaaaacatttgcaagaaactaaattacaacttgttaaagaagaatatatcacatcagctttggaaagtactgaggagaaacttcatgatgctgccagcaagctgcttaacacagttgaagaaactacaaaagatgtatctggtctccattccaaactggatcgtaagaaggcagttgaccaacacaatgcagaagctcaggatatttttggcaaaaacctgaatagtctgtttaataatatggaagaattaattaaggatggcagctcaaagcaaaaggccatgctagaagtacataagaccttatttggtaatctgctgtcttccagtgtctctgcattagataccattactacagtagcacttggatctctcacatctattccagaaaatgtgtctactcatgtttctcagatttttaatatgatactaaaagaacaatcattagcagcagaaagtaaaactgtactacaggaattgattaatgtactcaagactgatcttctaagttcactggaaatgattttatccccaactgtggtgtctatactgaaaatcaatagtcaactaaagcatattttcaagacttcattgacagtggccgataagatagaagatcaaaaaaaggaactagatggctttctcagtatactgtgtaacaatctacatgaactacaagaaaataccatttgttccttggttgagtcacaaaagcaatgtggaaacctaactgaagacctgaagacaataaagcagacccattcccaggaactttgcaagttaatgaatctttggacagagagattctgtgctttggaggaaaagtgtgaaaatatacagaaaccacttagtagtgtccaggaaaatatacagcagaaatctaaggatatagtcaacaaaatgacttttcacagtcaaaaattttgtgctgattctgatggcttctcacaggaactcagaaattttaaccaagaaggtacaaaattggttgaagaatctgtgaaacactctgataaactcaatggcaacctggaaaaaatatctcaagagactgaacagagatgtgaatctctgaacacaagaacagtttatttttctgaacagtgggtatcttccttaaatgaaagggaacaggaacttcacaacttattggaggttgtaagccaatgttgtgaggcttcaagttcagacatcactgagaaatcagatggacgtaaggcagctcatgagaaacagcataacatttttcttgatcagatgactattgatgaagataaattgatagcacaaaatctagaacttaatgaaaccataaaaattggtttgactaagcttaattgctttctggaacaggatctgaaactggatatcccaacaggtacgacaccacagaggaaaagttatttatacccatcaacactggtaagaactgaaccacgtgaacatctccttgatcagctgaaaaggaaacagcctgagctgttaatgatgctaaactgttcagaaaacaacaaagaagagacaattccggatgtggatgtagaagaggcagttctggggcagtatactgaagaacctctaagtcaagagccatctgtagatgctggtgtggattgttcatcaattggcggggttccatttttccagcataaaaaatcacatggaaaagacaaagaaaacagaggcattaacacactggagaggtctaaagtggaagaaactacagagcacttggttacaaagagcagattacctctgcgagcccagatcaacctttaattcacttgggggttggcaattttatttttaaagaaaacttaaaaataaaacctgaaaccccagaacttgagccttgtgtatagattttaaaagaatatatatatcagccgggcgcggtggctcatgcctgtaatcccagcactttgggaggctgaggcgggtggattgcttgagcccaggagtttgagaccagcctggccaacgtggcaaaacctcgtctctgttaaaaattagccgggcgtggtggcacactcctgtaatcccagctactggggaggctgaggcacgagaatcacttgaacccaggaagcggggttgcagtgagccaaaggtacaccactacactccagcctgggcaacagagcaagactcggtctcaaaaacaaaatttaaaaaagatataaggcagtactgtaaattcagttgaattttgatatctacccatttttctgtcatccctatagttcactttgtattaaattgggtttcatttgggatttgcaatgtaaatacgtatttctagttttcatataaagtagttcttttataacaaatgaaaagtatttttcttgtatattattaagtaatgaatatataagaactgtactcttctcagcttgagcttacataggtaaatatcaccaacatctgtccttagaaaggaccatctcatgttttttttcttgctatgacttgtgtattttcttgcatcctccctagacttccctatttcgctttctcctcggctcactttctccctttttatttttcaccaaaccatttgtagagctacaaaaggtatcctttcttattttcagtagtcagaattttatctagaaatcttttaacacctttttagtggttatttctaaaatcactgtcaacaataaatctaaccctagttgtatccctcctttcagtatttttcacttgttgccccaaatgtgaaagcatttcattcctttaagaggcctaactcattcaccctgacagagttcacaaaaagcccacttaagagtatacattgctattatgggagaccacccagacatctgactaatggctctgtgcccacactccaagacctgtgccttttagagaagctcacaatgatttaaggactgtttgaaacttccaattatgtctataatttatattcttttgtttacatgatgaaactttttgttgttgcttgtttgtatataatacaatgtgtacatgtatctttttctcgattcaaatcttaacccttaggactctggtatttttgatctggcaaccatatttctggaagttgagatgtttcagcttgaagaaccaaaacagaaggaatatgtacaaagaataaattttctgctcacgatgagtttagtgtgtaaagtttagagacatctgactttgatagctaaattaaaccaaaccctattgaagaattgaatatatgctacttcaagaaactaaattgatctcgtagaattatcttaataaaataatggctataatttctctgcaaaatcagatgtcagcataagcgatggataatacctaataaactgccctcagtaaatccatggttaataaatgtggtttctacattaa

SEQ ID NO: 20456 - protein, 1056 aa, Homo sapiens; identical to SEQ ID NO: 2575

SEQ ID NO: 20457 - DNA, 2312 bp, Homo sapiens
agtttctggggattcgggcggagacgagattagtgatttggcggctccgactggcgcgggacaaacgccacggccagagtaccgggtagagagcggggacgccgacctgcgtgcgtcggtcctccaggccacgccagcgcccgagagggaccagggagactccggcccctgtcggccgccaagcccctccgcccctcacagcgcccaggtccgcggccgggccttgattttttggcggggaccgtcatggcgtcgcagccaaattcgtctgcgaagaagaaagaggagaaggggaagaacatccaggtggtggtacgacaccacagaggaaaagttatttatacccatcaacactggtaagaactgaaccacgtgaacatctccttgatcagctgaaaaggaaacagcctgagctgttaatgatgctaaactgttcagaaaacaacaaagaagagacaattccggatgtggatgtagaagaggcagttctggggcagtatactgaagaacctctaagtcaagagccatctgtagatgctggtgtggattgttcatcaattggcggggttccatttttccagcataaaaaatcacatggaaaagacaaagaaaacagaggcattaacacactggagaggtctaaagtggaagaaactacagagcacttggttacaaagagcagattacctctgcgagcccagatcaacctttaattcacttgggggttggcaattttatttttaaagaaaacttaaaaataaaacctgaaaccccagaacttgagccttgtgtatagattttaaaagaatatatatatcagccgggcgcggtggctcatgcctgtaatcccagcactttgggaggctgaggcgggtggattgcttgagcccaggagtttgagaccagcctggccaacgtggcaaaacctcgtctctgttaaaaattagccgggcgtggtggcacactcctgtaatcccagctactggggaggctgaggcacgagaatcacttgaacccaggaagcggggttgcagtgagccaaaggtacaccactacactccagcctgggcaacagagcaagactcggtctcaaaaacaaaatttaaaaaagatataaggcagtactgtaaattcagttgaattttgatatctacccatttttctgtcatccctatagttcactttgtattaaattgggtttcatttgggatttgcaatgtaaatacgtatttctagttttcatataaagtagttcttttataacaaatgaaaagtatttttcttgtatattattaagtaatgaatatataagaactgtactcttctcagcttgagcttacataggtaaatatcaccaacatctgtccttagaaaggaccatctcatgttttttttcttgctatgacttgtgtattttcttgcatcctccctagacttccctatttcgctttctcctcggctcactttctccctttttatttttcaccaaaccatttgtagagctacaaaaggtatcctttcttattttcagtagtcagaattttatctagaaatcttttaacacctttttagtggttatttctaaaatcactgtcaacaataaatctaaccctagttgtatccctcctttcagtatttttcacttgttgccccaaatgtgaaagcatttcattcctttaagaggcctaactcattcaccctgacagagttcacaaaaagcccacttaagagtatacattgctattatgggagaccacccagacatctgactaatggctctgtgcccacactccaagacctgtgccttttagagaagctcacaatgatttaaggactgtttgaaacttccaattatgtctataatttatattcttttgtttacatgatgaaactttttgttgttgcttgtttgtatataatacaatgtgtacatgtatctttttctcgattcaaatcttaacccttaggactctggtatttttgatctggcaaccatatttctggaagttgagatgtttcagcttgaagaaccaaaacagaaggaatatgtacaaagaataaattttctgctcacgatgagtttagtgtgtaaagtttagagacatctgactttgatagctaaattaaaccaaaccctattgaagaattgaatatatgctacttcaagaaactaaattgatctcgtagaattatcttaataaaataatggctataatttctctgcaaaatcagatgtcagcataagcgatggataatacctaataaactgccctcagtaaatccatggttaataaatgtggtttctacattaa

SEQ ID NO: 20458 - protein, 97 aa, Homo sapiens [sequence omitted]

SEQ ID NO: 20459 - DNA, 639 bp, Homo sapiens
cctcccgcaacgcgtgggaattatgggagctacaagatgagatttaggtggggacacagagccaaaccatattaaggggttacatcttcaagtggcttactgagtccttttgattaacctagtaggctttgcttagcttatttccttgtcttatttgacaagatgttccgtattcatcttgaatattttctgcctcagtcctggaatcagatgcttttataaggaatcctggttcattttagtgtgaattactcctaccaacctgggtactggaggttgtggtttttcttgggaagtccatatttctagaatgagtgtatttaaaaaggagctttgaaagactttatttctaaacaaattaatattgattaaaaagtatggttataactttttatcatacttctttaagttttaaaagacataaaaaggctaactttacattttatttgttgcatgtccttcccaaactgaatgaaaaaagtactaaactgacacctacaacattcctcttgtgtaggagtatacggaggagatagaacgtttaaaacgagatcttgctgcagcccgtgagaaaaatggagtgtatatttctgaagaaaattttagagtcatgagtggaaaattaactgttcaagaaga

SEQ ID NO: 20460 - protein, 52 aa, Homo sapiens
MVITFYHTSLSFKRHKKANFTFYLLHVLPKLNEKSTKLTPTTFLLCRSIRRR

SEQ ID NO: 20461 - DNA, 1759 bp, Homo sapiens
aaatgtagcgccgcggcgcgggccagcagctctgcgaggggccggagcgcggcggagccatgcagtacccgcaccccgggccggcggcgggcgccgtgggggtgccgctgtacgcgcccacgccgctgctgcaacccgcacacccgacgcccttttacatcgaggacatcctgggccgcgggcccgccgcgcccacgcccgcccccacgctgccgtcccccaactcctccttcaccagcctcgtgtccccctaccggaccccggtgtacgagcccacgccgatccatccagccttctcgcaccactccgccgccgcgctggccgctgcctacggacccggcggcttcgggggccctctgtaccccttcccgcggacggtgaacgactacacgcacgccctgctccgccacgaccccctgggcaaacctctactctggagccccttcttgcagaggcctctgcataaaaggaaaggcggccaggtgagattctccaacgaccagaccatcgagctggagaagaaattcgagacgcagaaatatctctctccgcccgagaggaagcgtctggccaagatgctgcagctcagcgagagacaggtcaaaacctggtttcagaatcgacgcgctaaatggaggagactaaaacaggagaaccctcaaagcaataaaaaagaagaactggaaagtttggacagttcctgtgatcagaggcaagatttgcccagtgaacagaataaaggtgcttctttggatagctctcaatgttcgccctcccctgcctcccaggaagaccttgaatcagagatttcagaggattctgatcaggaagtggacattgagggcgataaaagctattttaatgctggatgatgaccactggcattggcatgttcagaaaactggatttaggaataatgttttgctacagaaaatcttcatagaagaactggaaggctatataagaaagggaatcaattctctggtattctggaaacctaaaaatatttggtgcactgctcaattaacaaacctacatggagaccttaattttgacttaacaaatagtttatgtactgctcttaggttgttttgataaagtgacattatagtgattaaattcttccccctttaaaaaaacagttagtggttttcactatttataaaaaattaattttgaactttttgttaaatttttaagttatagctttaaaggttttaataggaccttcttgaacgacttttctgtaatctgtttatctcccacttaatggaaaggcaaaggggtaccccaaatccagaggtgcctacatttcaggcagccttggagtattttaaaaggaaaacattctttacttttatatgacattcttatactgctgtctcaaatccaaaaacatttcagagctcttgtctcagagatgtgtgttctttttgtcagagatatggttgatgagaatcttaaatgcttgttttgcactatcacttagtacctgtttgaccaaggtgttaaggggatagtacctcccaattcaagcagagaaactgacctgactaaagttaatcgcagatgaactagaagtcacaggttaattaaatgtaagtagattgtagatactgttttatatcaaacaatgtttataatgtgtatatagaattgttcactgtaaaaaaaatggccaaaatgtgttttttttttaataagtaacttgactataaaataaagccgtccgtgggacgactgacctcgttgcaagtct

SEQ ID NO: 20462 - protein, 270 aa, Homo sapiens; identical to SEQ ID NO: 2577

SEQ ID NO: 20463 - DNA, 1586 bp, Homo sapiens
ggattggaggctcctcgcgcaacctaatgcgggtgtccgggcccgagcgcttcccgcgcagccaggccttgtcggtgcagcagccccgctcctccccaacacgcacacacccggtgttcgcaagtgcggctcaccaagggagatccaagggggcaaaaagttatgtataaatccgagagccactggggaaagagggtcgtggtattgtaagcccagccggtagtgcccattctttttggggttaaaggcaaacctctactctggagccccttcttgcagaggcctctgcataaaaggaaaggcggccaggtgagattctccaacgaccagaccatcgagctggagaagaaattcgagacgcagaaatatctctctccgcccgagaggaagcgtctggccaagatgctgcagctcagcgagagacaggtcaaaacctggtttcagaatcgacgcgctaaatggaggagactaaaacaggagaaccctcaaagcaataaaaaagaagaactggaaagtttggacagttcctgtgatcagaggcaagatttgcccagtgaacagaataaaggtgcttctttggatagctctcaatgttcgccctcccctgcctcccaggaagaccttgaatcagagatttcagaggattctgatcaggaagtggacattgagggcgataaaagctattttaatgctggatgatgaccactggcattggcatgttcagaaaactggatttaggaataatgttttgctacagaaaatcttcatagaagaactggaaggctatataagaaagggaatcaattctctggtattctggaaacctaaaaatatttggtgcactgctcaattaacaaacctacatggagaccttaattttgacttaacaaatagtttatgtactgctcttaggttgttttgataaagtgacattatagtgattaaattcttccccctttaaaaaaacagttagtggttttcactatttataaaaaattaattttgaactttttgttaaatttttaagttatagctttaaaggttttaataggaccttcttgaacgacttttctgtaatctgtttatctcccacttaatggaaaggcaaaggggtaccccaaatccagaggtgcctacatttcaggcagccttggagtattttaaaaggaaaacattctttacttttatatgacattcttatactgctgtctcaaatccaaaaacatttcagagctcttgtctcagagatgtgtgttctttttgtcagagatatggttgatgagaatcttaaatgcttgttttgcactatcacttagtacctgtttgaccaaggtgttaaggggatagtacctcccaattcaagcagagaaactgacctgactaaagttaatcgcagatgaactagaagtcacaggttaattaaatgtaagtagattgtagatactgttttatatcaaacaatgtttataatgtgtatatagaattgttcactgtaaaaaaaatggccaaaatgtgttttttttttaataagtaacttgactataaaataaagccgtccgtgggacgactgacctcgttgcaagtct

SEQ ID NO: 20464 - protein, 98 aa, Homo sapiens
MLQLSERQVKTWFQNRRAKWRRLKQENPQSNKKEELESLDSSCDQRQDLPSEQNKGASLDSSQCSPSPASQEDLESEISEDSDQEVDIEGDKSYFNAG

SEQ ID NO: 20465 - DNA, 1732 bp, Homo sapiens
agtgcggctcaccaagggagatccaagggggcaaaaagttatgtataaatccgagagccactggggaaagagggtcgtggtattgtaagcccagccggtagtgcccattctttttggggttaaaggtatgtctggatttagttctaggtgtgacggctgtgtgtctgtctgtgtgtgtacaaggctgtgtgcatctgcggtgtcagtgtgtgactttgggtatgtttgtgtgtcggtgggaacgtgttaggtccacgtgccggtgggtgtatgtgaatgtgtctggttgggtggcctcctggcctacctttgtcatccctggggcccgacagctctggggtctggccaggccgctccagggcagtgggtgagcgccgctcttcccgctcgcaggcaaacctctactctggagccccttcttgcagaggcctctgcataaaaggaaaggcggccaggtgagattctccaacgaccagaccatcgagctggagaagaaattcgagacgcagaaatatctctctccgcccgagaggaagcgtctggccaagatgctgcagctcagcgagagacaggtcaaaacctggtttcagaatcgacgcgctaaatggaggagactaaaacaggagaaccctcaaagcaataaaaaagaagaactggaaagtttggacagttcctgtgatcagaggcaagatttgcccagtgaacagaataaaggtgcttctttggatagctctcaatgttcgccctcccctgcctcccaggaagaccttgaatcagagatttcagaggattctgatcaggaagtggacattgagggcgataaaagctattttaatgctggatgatgaccactggcattggcatgttcagaaaactggatttaggaataatgttttgctacagaaaatcttcatagaagaactggaaggctatataagaaagggaatcaattctctggtattctggaaacctaaaaatatttggtgcactgctcaattaacaaacctacatggagaccttaattttgacttaacaaatagtttatgtactgctcttaggttgttttgataaagtgacattatagtgattaaattcttccccctttaaaaaaacagttagtggttttcactatttataaaaaattaattttgaactttttgttaaatttttaagttatagctttaaaggttttaataggaccttcttgaacgacttttctgtaatctgtttatctcccacttaatggaaaggcaaaggggtaccccaaatccagaggtgcctacatttcaggcagccttggagtattttaaaaggaaaacattctttacttttatatgacattcttatactgctgtctcaaatccaaaaacatttcagagctcttgtctcagagatgtgtgttctttttgtcagagatatggttgatgagaatcttaaatgcttgttttgcactatcacttagtacctgtttgaccaaggtgttaaggggatagtacctcccaattcaagcagagaaactgacctgactaaagttaatcgcagatgaactagaagtcacaggttaattaaatgtaagtagattgtagatactgttttatatcaaacaatgtttataatgtgtatatagaattgttcactgtaaaaaaaatggccaaaatgtgttttttttttaataagtaacttgactataaaataaagccgtccgtgggacgactgacctcgttgcaagtct

SEQ ID NO: 20466 - protein, 98 aa, Homo sapiens; identical to SEQ ID NO: 20464

SEQ ID NO: 20467 - DNA, 3679 bp, Homo sapiens
gcaaaagcatttcagaaagaggggagagcaggagcataaaccctgaggtggagcatgcctggtaaagtgtgaggaacactgaggtcagtgcaactgaagtggaatgaaacacagctggaaaattaggggcctgtcgagcgatgttggaagaagaaacagatcaaacctatgagaatgtcctggctgagattcagtctttcgaactgcctgttgaagctactttaaggtctgtgtatgatgaccaaccaaatgcgcacaagaagtttatggaaaagttagatgcttgtatccgtaatcatgacaaggaaattgaaaagatgtgtaattttcatcatcagggttttgtagatgctattacagaactccttaaagtaaggactgatgcagaaaaactgaaggtgcaagttactgataccaaccgaaggtttcaagatgctggaaaagaggtgatagtccacacagaagatatcattcgatgtagaattcagcagagaaatattacaactgtagtagaaaaattgcagttatgccttcctgtgctagaaatgtacagtaagctgaaagaacagatgagtgccaaaaggtactattctgccctaaaaactatggaacaattagagaatgtgtactttccctgggttagtcaataccggttttgtcagctcatgatagaaaatcttcccaaactccgtgaggatattaaagaaatctccatgtctgatctcaaagactttttggaaagtattcgaaaacattctgacaaaataggtgaaacagcaatgaaacaggcacagcatcagaaaaccttcagtgtttctctgcagaaacaaaataaaatgaaatttgggaaaaatatgtatataaatcgtgatagaattccagaggaaaggaatgaaactgtattgaaacattcacttgaagaagaggatgagaatgaagaagagatcttaactgttcaggatcttgttgatttttcccctgtttatcgatgtttgcacatttattctgttttgggtgacgaggaaacatttgaaaactattatcgaaaacaaagaaagaaacaagcaagactggtattgcaaccccagtcgaatatgcatgaaacagttgatggctatagaagatatttcactcaaattgtagggttctttgtggtagaagatcacattttacatgtgacccaaggattagtaaccagggcatacactgatgaactttggaacatggccctctcaaagataattgctgtccttagagctcattcatcctattgcactgatcctgatcttgttctggagctgaagaatcttactgtaatatttgcagatactttacagggttatggttttccagtgaaccgactttttgaccttttatttgaaataagagaccaatacaatgaaacactgcttaagaaatgggctggagttttcagggacatttttgaagaagataattacagccccatccctgttgtcaatgaagaagaatataaaattgtcatcagcaaatttccctttcaagatccagaccttgaaaagcagtctttcccaaagaaattccccatgtctcagtcagtgcctcatatttacattcaagttaaagaatttatttatgccagccttaaattttcagagtcactacaccggagctcaacagaaatagacgatatgcttagaaaatcaacaaatctgctgctgaccagaactttgagtagctgtttactgaaccttattagaaaacctcatataggtttgacagagctggtacaaatcatcataaacacaacacacctggagcaagcttgtaaatatcttgaggactttataactaacattacaaatatttcccaagaaactgttcatactacaagactttatggactttctactttcaaggatgctcgacatgcagcagaaggagaaatatataccaaactgaatcaaaaaattgatgaatttgttcagcttgctgattatgactggacaatgtctgagccagatggaagagctagtggttatttaatggaccttataaattttttgagaagcatctttcaagtgtttactcatttgcctgggaaagttgctcagacagcttgcatgtcagcctgccagcatctgtcaacatccttaatgcagatgctactggacagtgagttaaaacaaataagcatgggagctgttcagcagtttaacttagatgtcatacagtgtgaattgtttgccagctctgagcctgtgccaggattccagggggataccctgcagctagcattcattgacctcagacaactccttgacctgtttatggtttgggattggtctacttacctagctgattatgggcagccagcttctaagtaccttcgggtgaatccaaacacagcccttactcttttggagaagatgaaggatactagcaaaaagaacaatatatttgctcagttcaggaagaatgatcgagacaaacagaagttgatagagacagtcgtgaaacagctgagaagtttggtgaatggtatgtcccagcacatgtagacctcacatggcttgcactcagtgacaccaaatccatgattcaatgttgatcttgagcaagtattggtcatgatacagtaatttgtttacagaatccaaaaatacaatagagaagatacatgagggcttaaacaagaaatagtaataaatatcatttgtatggatttttaaataatcgaatactattttatatatggaaaaaaatgaccattttttcacttttaggggaaaatgcaaaagtgtaatacataaattgtcacaaattatacatgaaattgattacaaatacatttgaaaaacatatgcctctactcataagtatttttttctatttagacttgaatgataatctgttttttgatcagtatatggctttggaattcaatcatgtctgatatggtagtatttcactaccattttctgacttttagcttttattttcacctcaatgtgatttaagcagaccaaaatttctaattctgctaattctgaaggggaaatagacaaatcttaaaagctgcctgaaatcaaacttgatttaactcagtaagaatgtgaattatttgttctacttgggtggtttaatttaatcgttctgaatatgaacaaaaggttttggattttctaaagatgcagtgttgtttctgttcatcagggttaatatttctaactatattgcttgtaggtgaccccattctggatttgtttggtttggtttggttccagttaaaagagaggacaggaactaaatggggctaaccacttcaggtgcagcttgtgcgagggtagatggttcctgcacacagaagttaccacaggggtcaggttactttcttcaaatagcagatttcagtactttatcctcattgtggaaacaagccaaaccaaatgaactctggaaaacctaaaacaaatgtacattttcctttgtgtatgtttccgtggtccaaatggcaatataaatccagtctttattctccctttgttgtatttatgctgaatcttccctttgccttttcaggatttaggcctgtaagaaactatgcctgattctgtaaaataagtgtaaagaattatatgtacatctctggattttgtgatgaaatattaaaaatattgagcaagttgttgaaaatgca

SEQ ID NO: 20468 - protein, 799 aa, Homo sapiens; identical to SEQ ID NO: 2579

SEQ ID NO: 20469 - DNA, 335 bp, Homo sapiens
ttgcactctacaacctcattctgagggaggcgctttcccaagacaggtcattagtctgtagataaaaggcgcaaagttaagttcctaatgactaagagtttatttacaagtcaaatccttactttgccaattacttttatactggacacaaaatgcatctcctgtcctgctggtcttcctggtgtatctttcttcttccaggagtcctgaaaagagattttggattgatctctggaagtcaatatccactgccaaaaaataattccacatgcatctgcaatctgcctgtctgtgccctgctatccttggggctgggcgtggtggctcatgcctgt

SEQ ID NO: 20470 - protein, 60 aa, Homo sapiens
MHLLSCWSSWCIFLLPGVLKRDFGLISGSQYPLPKNNSTCICNLPVCALLSLGLGVVAHA

SEQ ID NO: 20471 - DNA, 2699 bp, Homo sapiens
gtcgttcccgcggcgccgcgcctcgctggctcctcagcttccagccaaaatggcggagaacagcgagagtctgggcaccgtccccgagcacgagcggatcttgcaggagatcgagagcaccgacaccgcctgtgtggggcccaccctccggtctgtgtatgatgaccaaccaaatgcgcacaagaagtttatggaaaagttagatgcttgtatccgtaatcatgacaaggaaattgaaaagatgtgtaattttcatcatcagggttttgtagatgctattacagaactccttaaagtaaggactgatgcagaaaaactgaaggtgcaagttactgataccaaccgaaggtttcaagatgctggaaaagaggtgatagtccacacagaagatatcattcgatgtagaattcagcagagaaatattacaactgtagtagaaaaattgcagttatgccttcctgtgctagaaatgtacagtaagctgaaagaacagatgagtgccaaaaggtgagttggtttttttcctattgttttaaataagaatttttttctattattgaaaggacagatacatttactataaatcatagtgaatcatgagttttgctttcttcattacactaacctttgtacttaaaatttgcgcatcaggataatccactaaagcaaatcttagccttttattaataaatcattgtcctttataaatgatatcaaggattggtaatgttgatcaagtacaaatagccgaacaggaatgaaaatattgattagcttaccaacatactaatattgcatgtaactaagggctaagtgcatattgtggaaggaaaagagtgtaggcagttatattttgacagtctgggtgaatgtagtagttcacattctgttttataactcaaatgcatatatgacagttgaaaaagaaagtaatttaaagtagtttattgattgccataggagcattggatatagtgatgtttaaaatattttaaagacgaacagttttggccaggtgtcatggctcatgcttgtaatcccggcactttgggagtctgaggcaaggggatcacttgaacccaggagtttgagaccagcgtgggcaatatagggagacctcatttcacctccccacccccttccccccaaaaaacaaaagaaaaaaaacaaatgattcaaaagtaacatagaaaaaccagaataaattagacaatttggactagggaaaaaatgatttcttcttggttagtaactacttaattatcagaacacatcttatacagacctatagtaaaagatgtgtgtatgtcctgcttcattgtgctacatgttgaatttcattaggctttaccagttaatacaatttagtagaatgattttttccctgtaataaacaagccaaaaactattctgaaagtcttattttctttcacgtatgtattaataatatattctctttttaaatcaatgttatatatcctcacattttaaagattcaaataattttcctacgcgtttgctgccaaaaaaaaaaaaaacagatatcacctttcctatttcccattcaccattccttctttataggagcaaaaacttttacctcttttaatggattattttggtatttatatttatgtctttaaataactaacttttaattattaccatattattttccagtttggggcattatcggtttttcagtaatataatctaatatttatactcacattttctcaactatccccaaaatgtcttacgtctttttccctccctgaaaacattgatttgtatgtgttcttttgtcccttttaatctagaacagtcctcctgttctttgtttttttcatggaagagtgcaggtcagttctcttgtagaccagggcattttggatttatctagttgtttcttcatgtttagattcaagttaaaaggttttggcaagagtatagcataagtgatacctcacattgcatgacatcaggaggcttataaagtcatgttgtccttaggttatgctaaatttgatcatttggttaaggggaagtctaccagatgtcttttgaaaaggtatatttttctctttgcaattaataagtaatatgtgggtcctgtttcctaacaggttttcacccagtagttttatcattcttgccttaatccgttattatattggatttacaagatgttgatttaaaaaattctattatttcttaaacatttattaactggctgttttatatataaagaagagctttttattccccaccaccaccttttttctttttttccgattatggctgtgaacttacgcatttttaaaataaatatattataatttattattgtcattattcattttgatgcacaaattgtttcaaatttaacaagagaaacttctcaagccaattcctgtgtctttgtctttgagtatttttgtgtttattgtatcgtaagatgttccaagctctcattgtgccttttttttttttttttgcctcagatctggaagcagccattctccagggtaccctagctccttttagtattaatggtatttagaaactaagatgtatgggttgggagcagtggctcacacctgtaatctcagcactttgggaggctaaggcaggtggatcgcttaagctcaagagtttgagaccagcctggcccgtatggtaaaaccccatctctactg

SEQ ID NO: 20472 - protein, 153 aa, Homo sapiens
MAENSESLGTVPEHERILQEIESTDTACVGPTLRSVYDDQPNAHKKFMEKLDACIRNHDKEIEKMCNFHHQGFVDAITELLKVRTDAEKLKVQVTDTNRRFQDAGKEVIVHTEDIIRCRIQQRNITTVVEKLQLCLPVLEMYSKLKEQMSAKR

SEQ ID NO: 20473 - DNA, 3603 bp, Homo sapiens
gtcgttcccgcggcgccgcgcctcgctggctcctcagcttccagccaaaatggcggagaacagcgagagtctgggcaccgtccccgagcacgagcggatcttgcaggagatcgagagcaccgacaccgcctgtgtggggcccaccctccggtctgtgtatgatgaccaaccaaatgcgcacaagaagtttatggaaaagttagatgcttgtatccgtaatcatgacaaggaaattgaaaagatgtgtaattttcatcatcagggttttgtagatgctattacagaactccttaaagtaaggactgatgcagaaaaactgaaggtgcaagttactgataccaaccgaaggtttcaagatgctggaaaagaggtgatagtccacacagaagatatcattcgatgtagaattcagcagagaaatattacaactgtagtagaaaaattgcagttatgccttcctgtgctagaaatgtacagtaagctgaaagaacagatgagtgccaaaaggtactattctgccctaaaaactatggaacaattagagaatgtgtactttccctgggttagtcaataccggttttgtcagctcatgatagaaaatcttcccaaactccgtgaggatattaaagaaatctccatgtctgatctcaaagactttttggaaagtattcgaaaacattctgacaaaataggtgaaacagcaatgaaacaggcacagcatcagaaaaccttcagtgtttctctgcagaaacaaaataaaatgaaatttgggaaaaatatgtatataaatcgtgatagaattccagaggaaaggaatgaaactgtattgaaacattcacttgaagaagaggatgagaatgaagaagagatcttaactgttcaggatcttgttgatttttcccctgtttatcgatgtttgcacatttattctgttttgggtgacgaggaaacatttgaaaactattatcgaaaacaaagaaagaaacaagcaagactggtattgcaaccccagtcgaatatgcatgaaacagttgatggctatagaagatatttcactcaaattgtagggttctttgtggtagaagatcacattttacatgtgacccaaggattagtaaccagggcatacactgatgaactttggaacatggccctctcaaagataattgctgtccttagagctcattcatcctattgcactgatcctgatcttgttctggagctgaagaatcttactgtaatatttgcagatactttacagggttatggttttccagtgaaccgactttttgaccttttatttgaaataagagaccaatacaatgaaacactgcttaagaaatgggctggagttttcagggacatttttgaagaagataattacagccccatccctgttgtcaatgaagaagaatataaaattgtcatcagcaaatttccctttcaagatccagaccttgaaaagcagtctttcccaaagaaattccccatgtctcagtcagtgcctcatatttacattcaagttaaagaatttatttatgccagccttaaattttcagagtcactacaccggagctcaacagaaatagacgatatgcttagaaaatcaacaaatctgctgctgaccagaactttgagtagctgtttactgaaccttattagaaaacctcatataggtttgacagagctggtacaaatcatcataaacacaacacacctggagcaagcttgtaaatatcttgaggactttataactaacattacaaatatttcccaagaaactgttcatactacaagactttatggactttctactttcaaggatgctcgacatgcagcagaaggagaaatatataccaaactgaatcaaaaaattgatgaatttgttcagcttgctgattatgactggacaatgtctgagccagatggaagagctagtggttatttaatggaccttataaattttttgagaagcatctttcaagtgtttactcatttgcctgggaaagttgctcagacagcttgcatgtcagcctgccagcatctgtcaacatccttaatgcagatgctactggacagtgagttaaaacaaataagcatgggagctgttcagcagtttaacttagatgtcatacagtgtgaattgtttgccagctctgagcctgtgccaggattccagggggataccctgcagctagcattcattgacctcagacaactccttgacctgtttatggtttgggattggtctacttacctagctgattatgggcagccagcttctaagtaccttcgggtgaatccaaacacagcccttactcttttggagaagatgaaggatactagcaaaaagaacaatatatttgctcagttcaggaagaatgatcgagacaaacagaagttgatagagacagtcgtgaaacagctgagaagtttggtgaatggtatgtcccagcacatgtagacctcacatggcttgcactcagtgacaccaaatccatgattcaatgttgatcttgagcaagtattggtcatgatacagtaatttgtttacagaatccaaaaatacaatagagaagatacatgagggcttaaacaagaaatagtaataaatatcatttgtatggatttttaaataatcgaatactattttatatatggaaaaaaatgaccattttttcacttttaggggaaaatgcaaaagtgtaatacataaattgtcacaaattatacatgaaattgattacaaatacatttgaaaaacatatgcctctactcataagtatttttttctatttagacttgaatgataatctgttttttgatcagtatatggctttggaattcaatcatgtctgatatggtagtatttcactaccattttctgacttttagcttttattttcacctcaatgtgatttaagcagaccaaaatttctaattctgctaattctgaaggggaaatagacaaatcttaaaagctgcctgaaatcaaacttgatttaactcagtaagaatgtgaattatttgttctacttgggtggtttaatttaatcgttctgaatatgaacaaaaggttttggattttctaaagatgcagtgttgtttctgttcatcagggttaatatttctaactatattgcttgtaggtgaccccattctggatttgtttggtttggtttggttccagttaaaagagaggacaggaactaaatggggctaaccacttcaggtgcagcttgtgcgagggtagatggttcctgcacacagaagttaccacaggggtcaggttactttcttcaaatagcagatttcagtactttatcctcattgtggaaacaagccaaaccaaatgaactctggaaaacctaaaacaaatgtacattttcctttgtgtatgtttccgtggtccaaatggcaatataaatccagtctttattctccctttgttgtatttatgctgaatcttccctttgccttttcaggatttaggcctgtaagaaactatgcctgattctgtaaaataagtgtaaagaattatatgtacatctctggattttgtgatgaaatattaaaaatattgagcaagttgttgaaaatgca

SEQ ID NO: 20474 - protein, 804 aa, Homo sapiens; identical to SEQ ID NO: 2581

SEQ ID NO: 20475 - DNA, 233 bp, Homo sapiens
catagagataggattaattttatcctccaaagtaatagtggaggagaacaaatgatagcatgtcaattttaacacaaaatttccaaatatattttgacttctgcttttaatactcttccagatcatgctttttgcctaatttttttttttttttgagacggaagctagactccgtctcaaaaaaaagaatcgcttgaacccgggaggctgaggctgcagtgagccgaaattgc

SEQ ID NO: 20476 - DNA, 2988 bp, Homo sapiens
cattgttttgatcttcaagagtttataatctcattgggaaaagagaagacacaagatacacagcttgagaattattcctatcaagaattatgacaggaggctgggcacagtggctcacgcctgtaatctcagcactttaggaggccgaggcaggcagatcatgaggtcaggagatcgagaccatcctggctaacacggtgaaaccccttctttactaaaaataaaattagccaggcgtggtggcacgcgcctgtagtccagctacttgggaggctgaggcagcagaatcacttgaacctgggagatggaggttgcagtgagccgagatcacaccactgcactccagcctgggtgacagagcgagactctgtctcaaaaaagaaaaaatagaaagaattatgacaggaatactttccattacgtggatccttttttagttacagataatgagcttgttcagaatatatcaccttgagaattattctagaatggaaaactaaagtgctgagaggttgtaaaacaagctagtggaaaaaggagattgtacctggattttgagggacaagacctatttgttgttgaattttagaattctggatgcttaggcagtatcttcctgtttggacctttaatagacaagtaaaaactgcttttgtaatagttggggttttttaaggtattgtcttttagtactctaataatatgctttgtaatgataagttttcaattttcctttcctaacagggacatttttgaagaagataattacagccccatccctgttgtcaatgaagaagaatataaaattgtcatcagcaaatttccctttcaagatccagaccttgaaaagcagtctttcccaaagaaattccccatgtctcagtcagtgcctcatatttacattcaagttaaagaatttatttatgccagccttaaattttcagagtcactacaccggagctcaacagaaatagacgatatgcttagaaaatcaacaaatctgctgctgaccagaactttgagtagctgtttactgaaccttattagaaaacctcatataggtttgacagagctggtacaaatcatcataaacacaacacacctggagcaagcttgtaaatatcttgaggactttataactaacattacaaatatttcccaagaaactgttcatactacaagactttatggactttctactttcaaggatgctcgacatgcagcagaaggagaaatatataccaaactgaatcaaaaaattgatgaatttgttcagcttgctgattatgactggacaatgtctgagccagatggaagagctagtggttatttaatggaccttataaattttttgagaagcatctttcaagtgtttactcatttgcctgggaaagttgctcagacagcttgcatgtcagcctgccagcatctgtcaacatccttaatgcagatgctactggacagtgagttaaaacaaataagcatgggagctgttcagcagtttaacttagatgtcatacagtgtgaattgtttgccagctctgagcctgtgccaggattccagggggataccctgcagctagcattcattgacctcagacaactccttgacctgtttatggtttgggattggtctacttacctagctgattatgggcagccagcttctaagtaccttcgggtgaatccaaacacagcccttactcttttggagaagatgaaggatactagcaaaaagaacaatatatttgctcagttcaggaagaatgatcgagacaaacagaagttgatagagacagtcgtgaaacagctgagaagtttggtgaatggtatgtcccagcacatgtagacctcacatggcttgcactcagtgacaccaaatccatgattcaatgttgatcttgagcaagtattggtcatgatacagtaatttgtttacagaatccaaaaatacaatagagaagatacatgagggcttaaacaagaaatagtaataaatatcatttgtatggatttttaaataatcgaatactattttatatatggaaaaaaatgaccattttttcacttttaggggaaaatgcaaaagtgtaatacataaattgtcacaaattatacatgaaattgattacaaatacatttgaaaaacatatgcctctactcataagtatttttttctatttagacttgaatgataatctgttttttgatcagtatatggctttggaattcaatcatgtctgatatggtagtatttcactaccattttctgacttttagcttttattttcacctcaatgtgatttaagcagaccaaaatttctaattctgctaattctgaaggggaaatagacaaatcttaaaagctgcctgaaatcaaacttgatttaactcagtaagaatgtgaattatttgttctacttgggtggtttaatttaatcgttctgaatatgaacaaaaggttttggattttctaaagatgcagtgttgtttctgttcatcagggttaatatttctaactatattgcttgtaggtgaccccattctggatttgtttggtttggtttggttccagttaaaagagaggacaggaactaaatggggctaaccacttcaggtgcagcttgtgcgagggtagatggttcctgcacacagaagttaccacaggggtcaggttactttcttcaaatagcagatttcagtactttatcctcattgtggaaacaagccaaaccaaatgaactctggaaaacctaaaacaaatgtacattttcctttgtgtatgtttccgtggtccaaatggcaatataaatccagtctttattctccctttgttgtatttatgctgaatcttccctttgccttttcaggatttaggcctgtaagaaactatgcctgattctgtaaaataagtgtaaagaattatatgtacatctctggattttgtgatgaaatattaaaaatattgagcaagttgttgaaaatgca

SEQ ID NO: 20477 - protein, 378 aa, Homo sapiens
MISFQFSFPNRDIFEEDNYSPIPVVNEEEYKIVISKFPFQDPDLEKQSFPKKFPMSQSVPHIYIQVKEFIYASLKFSESLHRSSTEIDDMLRKSTNLLLTRTLSSCLLNLIRKPHIGLTELVQIIINTTHLEQACKYLEDFITNITNISQETVHTTRLYGLSTFKDARHAAEGEIYTKLNQKIDEFVQLADYDWTMSEPDGRASGYLMDLINFLRSIFQVFTHLPGKVAQTACMSACQHLSTSLMQMLLDSELKQISMGAVQQFNLDVIQCELFASSEPVPGFQGDTLQLAFIDLRQLLDLFMVWDWSTYLADYGQPASKYLRVNPNTALTLLEKMKDTSKKNNIFAQFRKNDRDKQKLIETVVKQLRSLVNGMSQHM

SEQ ID NO: 20478 - DNA, 350 bp, Homo sapiens
tgccatgtaggcagtgccttttgccttctgccatgattctgaggcctccccagccatgtggaactgaaagaattcatagactctcctcatgtggtccaatggctctcatgccagatgaagggagagaagttaagtagctgaagttatctctctgcccccaccctcccccacccagccatgcacagttggtgtcatcacaaggaggactggcagtggaggagcagggagagccaacggaagcattacttggcatcagaaaaatgatctggtctacagctcccagcgtgagcgacgcagaagacgggtgatttctgcatttccaactgaggtaccgggttcatctcactggg

SEQ ID NO: 20479 - protein, 34 aa, Homo sapiens
MILRPPQPCGTERIHRLSSCGPMALMPDEGREVK

SEQ ID NO: 20480 - DNA, 3996 bp, Homo sapiens
ccggagtcaagacgtgaagggagtgccaaggcggccgggggcggcgagcggggccgcgggcgcgcaccgactcaagagccgactgtcagcctcggcgggccggagttctccggcgctgggacaggggcgctgggacaggggcgctgggggcgagccctggcgggggccaggtccgaggaccctgggcgcggcggccccgccaggaggtccggccgcgagcgtgacctcacggggaggggccagcgcggcggcctgggcgctgagccgagcgccgggagagcagcgcagaagccgagccgcgaggagcgcactccgtggccccgatggagcggtacaaagccctggaacagctgctgacagagttggatgacttcctcaagattcttgaccaggagaacctgagcagcacagcactggtgaagaagagctgcctggcggagctcctccggctttacaccaaaagcagcagctctgatgaggagtacatttatatgaacaaagtgaccatcaacaagcaacagaatgcagagtctcaaggcaaagcgcctgaggagcagggcctgctacccaatggggagcccagccagcactcctcggcccctcagaagagccttccagacctcccgccacccaagatgattccagaacggaaacagcttgccatcccaaagacggagtctccagagggctactatgaagaggctgagccatatgacacatccctcaatgaggacggagaggctgtgagcagctcctacgagtcctacgatgaagaggacggcagcaagggcaagtcggccccttaccagtggccctcgccggaggccggcatcgagctgatgcgtgacgcccgcatctgcgccttcctgtggcgcaagaagtggctgggacagtgggccaagcagctctgtgtcatcaaggacaacaggcttctgtgctacaaatcctccaaggaccacagccctcagctggacgtgaacctactgggcagcagcgtcattcacaaggagaagcaagtgcggaagaaggagcacaagctgaagatcacgccgatgaatgccgatgtgattgtgctgggcctgcagagcaaggaccaggctgagcagtggctcagggtcatccaggaagtgagcggcctgccttccgaaggagcatctgaaggaaaccagtacaccccggatgcccagcgctttaactgccagaaaccagatatagctgagaagtacctgtcggcttcagagtatgggagctccgtggatggccaccctgaggtcccagaaaccaaagacgtcaagaagaaatgttctgctggcctcaaactgagcaacctaatgaatctgggcaggaagaaatccacctcactggagcctgtggagaggtccctcgagacatccagttacctgaacgtgctggtgaacagccagtggaagtctcgctggtgctctgtcagggacaatcacctgcacttctaccaggaccggaaccggagcaaggtggcccagcaacccctcagcctggtgggctgcgaggtggtcccagaccccagccccgaccacctctactccttccgcatcctccacaagggcgaggagctggccaagcttgaggccaagtcttccgaggaaatgggccactggctgggtctcctgctctctgagtcaggctccaagacagacccagaagagttcacctacgactatgtggatgccgatagggtctcctgtattgtgagtgcggccaaaaactctctcttactgatgcagagaaagttctcagagcccaacacttacatcgatggcctgcctagccaggaccgccaggaggagctgtatgacgacgtggacctgtcagagctcacagctgcggtggagcctaccgaggaagccacccctgttgcagatgacccaaatgagagagaatctgaccgagtgtacctggacctcacacctgtcaagtcctttctgcatggccccagcagtgcacaggcccaggcctcctccccgacgttgtcctgcctggacaatgcaactgaggccctcccggcagactcaggcccaggtcccaccccagatgagccctgcataaagtgtccagagaacctgggagaacagcagctggagagtttggagccagaggatccttccctgagaatcaccaccgtcaaaatccagacggaacagcagagaatctccttcccaccgagctgcccggatgccgtggtggccaccccacctggtgccagcccacctgtgaaggacaggttgcgcgtgaccagtgcagagatcaagcttggcaagaatcggacagaagctgaggtgaagcggtacacagaggagaaggagaggcttgaaaagaagaaggaagaaatccgggggcacctggctcagctccggaaagagaaacgggagctaaaggaaaccctactgaaatgcacagacaaggaagtcctggcgagcctggagcagaagctgaaggaaattgacgaggagtgccggggcgaggagagcaggcgcgtggacctggagctcagcatcatggaggtgaaggacaacctgaagaaggctgaggcagggcctgtgacgttaggcaccaccgtggacaccacccacctggagaatgtgagcccccgccccaaagctgtcacacctgcctctgccccagactgtaccccagtcaactctgcaaccacactcaagaacaggcctctctcggtcgtggtcacaggcaaaggcactgtactccagaaagccaaggaatgggagaagaaaggagcaagttagaaaacaagcttcatctaaagactctcatgtcaatgtggaccttggtgacaatcctgctttgttaaagcaaaaactatgcgaaagggtgagtctgtttagaagaaaaagcaaagactgaggtactgtgaatggagagcttcagctaagaggaggctctgtcccttttcagagccaaaggaaataatacaacaaaaaggaggcttctttggagacctaagtctattggatgtaaacaagacgttgtatttagggatgttctgtgtttctttcttttttgaagttgtcatcaattgctttactaagatttttaaatagtgaaaacctcctgtttagactttggtggaagatgaatcaaggaagcagggccctgtcttatgggtcacgtgtctttggtgagtgagaagacctaaactcctggccatcatctcttatccaatacttagcagttggggattaaaccatccttgccttcagttctctccaatattaccaggcccaactcagtcttcagtgattttaaacagcattgacatcatctgtaaaaccatcatctgtaaaaccatctatgacatgagttttgagaaacaataatggggaaaatatttgggaccaagctgaagcactaatcccactaagttaaagacttctttccagtccaaggcaggcctgaatcaactgtctttaaataaaattttaagtgatgctgtattatatataggaaaaaatgcttaaaatcctgtcatttagaacagtgaaaagtatcttttgagattaaagtgactctttactgtaggaaaaatattactctgtgtttacagattcattgctgtggtcaggccatttttaagggaagagttatttaatataaatagtctctgattttaagttctgtttaatgttcattctccttccaagaacaaagtggtgatttttggttagggtgatcgccctcttaaaattggcagtgctgttccttgtgctgcccctgtcttttcctctgatggcatttttttttttttttttttaacacaggttgaaacatttcatctattatctctgcctcatttctggagggttgtgtatcagttctctaacacttgttcctgagaactaaatgtcttttttattcttatttcctctctcataaacatttggtgaccttttaccaagtggtgagttagttaggttttttaaaataaaatgttcattgtatttg

SEQ ID NO: 20481 - protein, 818 aa, Homo sapiens; identical to SEQ ID NO: 2583

SEQ ID NO: 20482 - DNA, 3574 bp, Homo sapiens
ccggagtcaagacgtgaagggagtgccaaggcggccgggggcggcgagcggggccgcgggcgcgcaccgactcaagagccgactgtcagcctcggcgggccggagttctccggcgctgggacaggggcgctgggacaggggcgctgggggcgagccctggcgggggccaggtccgaggaccctgggcgcggcggccccgccaggaggtccggccgcgagcgtgacctcacggggaggggccagcgcggcggcctgggcgctgagccgagcgccgggagagcagcgcagaagccgagccgcgaggagcgcactccgtggccccgatggagcggtacaaagccctggaacagctgctgacagagttggatgacttcctcaagattcttgaccaggagaacctgagcagcacagcactggtgaagaagagctgcctggcggagctcctccggctttacaccaaaagcagcagctctgatgaggagtacatttatatgaacaaagtgaccatcaacaagcaacagaatgcagagtctcaaggcaaagcgcctgaggagcagggcctgctacccaatggggagcccagccagcactcctcggcccctcagaagagccttccagacctcccgccacccaagatgattccagaacggaaacagcttgccatcccaaagacggagtctccagagggctactatgaagaggctgagccatatgacacatccctcaatgaggacggagaggctgtgagcagctcctacgagtcctacgatgaagaggacggcagcaagggcaagtcggccccttaccagtggccctcgccggaggccggcatcgagctgatgcgtgacgcccgcatctgcgccttcctgtggcgcaagaagtggctgggacagtgggccaagcagctctgtgtcatcaaggacaacaggcttctgtgctacaaatcctccaaggaccacagccctcagctggacgtgaacctactgggcagcagcgtcattcacaaggagaagcaagtgcggaagaaggagcacaagctgaagatcacgccgatgaatgccgatgtgattgtgctgggcctgcagagcaaggaccaggctgagcagtggctcagggtcatccaggaagtgagcggcctgccttccgaaggagcatctgaaggaaaccagtacaccccggatgcccagcgctttaactgccagaaaccagatatagctgagaagtacctgtcggcttcagagtatgggagctccgtggatggccaccctgaggtcccagaaaccaaagacgtcaagaagaaatgttctgctggcctcaaactgagcaacctaatgaatctgggcaggaagaaatccacctcactggagcctgtggagaggtccctcgagacatccagttacctgaacgtgctggtgaacagccagtggaagtctcgctggtgctctgtcagggacaatcacctgcacttctaccaggaccggaaccggagcaaggtggcccagcaacccctcagcctggtgggctgcgaggtggtcccagaccccagccccgaccacctctactccttccgcatcctccacaagggcgaggagctggccaagcttgaggccaagtcttccgaggaaatgggccactggctgggtctcctgctctctgagtcaggctccaagacagacccagaagagttcacctacgactatgtggatgccgatagggtctcctgtattgtgagtgcggccaaaaactctctcttactgatgcagagaaagttctcagagcccaacacttacatcgatggcctgcctagccaggaccgccaggaggagctgtatgacgacgtggacctgtcagagctcacagctgcggtggagcctaccgaggaagccacccctgttgcagatgacccaaatgagagagaatctgaccgagtgtacctggacctcacacctgtcaagtcctttctgcatggccccagcagtgcacaggcccaggcctcctccccgacgttgtcctgcctggacaatgcaactgaggccctcccggcagactcaggcccaggtcccaccccagatgagccctgcataaagtgtccagagaacctgggagaacagcagctggagagtttggagccagaggatccttccctgagaatcaccaccgtcaaaatccagacggaacagcagagaatctccttcccaccgagctgcccggatgccgtggtggccaccccacctggtgccagcccacctgtgaaggacaggttgcgcgtgaccagtgcagagatcaagcttggcaagaatcggacagaagctgaggtgaagcggtacacagaggagaaggagaggcttgaaaagaagaaggaagaaatccgggggcacctggctcagctccggaaagagaaacgggagctaaaggaaaccctactgaaatgcacagacaaggaagtcctggcgagcctggagcagaagctgaaggaaattgacgaggagtgccggggcgaggagagcaggcgcgtggacctggagctcagcatcatggaggtgaaggacaacctgaagaaggctgaggcagggcctgtgacgttaggcaccaccgtggacaccacccacctggagaatgtgagcccccgccccaaagctgtcacacctgcctctgccccagactgtaccccagtcaactctgcaaccacactcaagaacaggcctctctcggtcgtggtcacaggcaaaggcactgtactccagaaagccaaggaatgggagaagaaaggagcaagttagaaaacaagcttcatctaaagactctcatgtcaatgtggaccttggtgacaatcctgctttgttaaagcaaaaactatgcgaaagggtgagtctgtttagaagaaaaagcaaagactgaggtactgtgaatggagagcttcagctaagaggaggctctgtcccttttcagagccaaaggaaataatacaacaaaaaggaggcttctttggagacctaagtctattggatgtaaacaagacgttgtatttagggatgttctgtgtttctttcttttttgaagttgtcatcaattgctttactaagatttttaaatagtgaaaacctcctgtttagactttggtggaagatgaatcaaggaagcagggccctgtcttatgggtcacgtgtctttggtgagtgagaagacctaaactcctggccatcatctcttatccaatacttagcagttggggattaaaccatccttgccttcagttctctccaatattaccaggcccaactcagtcttcagtgattttaaacagcattgacatcatctgtaaaaccatcatctgtaaaaccatctatgacatgagttttgagaaacaataatggggaaaatatttgggaccaagctgaagcactaatcccactaagttaaagacttctttccagtccaaggcaggcctgaatcaactgtctttaaataaaattttaagtgatgctgtattatatataggaaaaaatgcttaaaatcctgtcatttagaacagtgaaaagtatcttttgagattaaagtgactctttactgtagg

SEQ ID NO: 20483 - protein, 818 aa, Homo sapiens; identical to SEQ ID NO: 2583

SEQ ID NO: 20484 - DNA, 1800 bp, Homo sapiens
gcatgaagtaaaaggggcctcaatgatgataggaaaatcagttcttttaaaatttcttcaagaaaatccaggctatcacatagtctttctgtgtgacttattaggagataggaagagcattgggaaacttgcacagctagctatgcatctacattttggtttggggttagttatgaaatgttcttaatatgacgtgttcaataacttcacataaacttcctgttctccaaaacctcaaagagatagagttaatgagttgttgtttttttttaaatgggggtagttttctatctgtcatgggctctagcatctactccgctacccaattctgtcatctccaagctgagtttcctcttctgaggcagaggctggagcagttctttttcagttctcatcctctccatcccaatccagtatatcaatcaactctaactcggagacgtctagctggcaatgtttctaaaactttcactggatttctttagacattgaagcaaacatttttttctaagaattgcttctcagatgatgatatcaaatgtatatgcttttgcaagtttgaaaagttcaaattaaccacttttgactaggtaagtctttctaaaaaccatttaaagctaactgggtcttagcatcctcctgtgtatggaagagacaggtgaccgctccaggttgggtgctcacagaacccttttcctgactctcatggaagatggtggaaggaaaatagactgtctcatcaaccctcctgtgtcctctgaagcaatctcagtttttattaaccacctcttctgtgtttctggtagctatttaacctgtatttaatctgtacttcctatgccagcctcaattttatttgatttttacaattattctcttctaaccaatgaagtgtttgtcagtatgccccaaagcttgctcttttgtgctcccttttgaataactttctatccagaaaaagagattatttgggacttgagatatgctttgcatatggattgttatgtttttatttgggcaagtttaatcatggaaaactcaaaaagaaggggggaaatggtcagtttaagccaaaagaaactttctaaacaatgtataggtacacagcaaaattaaacaaatccaacaatttctgaagcttagtgtaattgagtggtggttgttattcaataaaattattcccaaaagtgtttctcctaagagtgcagttcccatgagtcacttcctgaacccattgaccaaaggtggacagagacaatcctgtagaccttgacattcagaaagatgtgagctgcttactgatcatatatgcatacgtttctttacagcagaggaaaccattgtccacaaaactgatgttcttttggggttttatgtacagacttgtccaatcatgtgtgtggttcctgcgagttgctgatgactccgcattgaagctctctgagttctttgattttaagttgggtttatggaattttttcaaatgttggaaggtgtgtggttcttcctgccctccctccccttttggaaatatgaaagcaaatgtttagaagaattccttttgaaaagctgtgtcgtgttccctgtgaaactgagcaggtgtgtgttggcgcgctaagtgccacatgcttgtgtgtagaggaggaggtggccctgccggctccgcgctgctgtgcctgtgatccctacctgctccccgctcctgttgccagcagcactcactgcactcctttgtcatatactctgcatcactgtcatactcacaacttcgtgaataaagttgtgtgctttattcgtaga

SEQ ID NO: 20485 - protein, 98 aa, Homo sapiens
MTCSITSHKLPVLQNLKEIELMSCCFFLNGGSFLSVMGSSIYSATQFCHLQAEFPLLRQRLEQFFFSSHPLHPNPVYQSTLTRRRLAGNVSKTFTGFL

SEQ ID NO: 20486 - DNA, 2902 bp, Homo sapiens
gcctgggtgtcctcatccttgctttactctggaaagtgtggggatggagaggatggtgcatttccagtgcttccttacctgtcaataacaatggtggccacctgggtcccagcacttggctggtggagagatttttttcattatggagctaataaagggtccctacgttttacattgattaatgaattatcacccagacatgtgcagatgaaatgtcaatataagaaaaatcaaggtatttgggaaacatgggcataatcaggtagttttgctaaaattcctcttccttggtctacataaagaagacatgggtctgtcatagaatggggacattagactgaaaactgggacaacccccttccttattttatagagactaggagttaaggggcctgcctaagattgcagtgataaagaactgaaccctaaatcagctcccactaatgaaaccctgctttccttgtatcttttaaactcagttctgcatccaacttgagaagaaaaaaagcttctttccatatcaagtaccatatgagttcatttaaactgcaccttgcagaaatgcattgccagaaagcaccagtagcctcctatctgcaagcagagtagtgctctgctctggggaggggtcattggaaacctggttcctgctaactgccagattgaatgtgtgggctagaatgcctgcacatttagttaaactgggctcagcatgcttgtcctcaaaatgtccatcctggtcacagcacacaagatggctattggtctgcttttaccctaccctgtactatacatgaaaattccagttattaacacactcaaactggtggagcttgttcaccctaggaaggggattgtatatatggcaggcttccctggtgccgatgtaaagggctacatttgggaacatttgacttccttgggactcttaagtgcataatgatggcatgaagtaaaaggggcctcaatgatgataggaaaatcagttcttttaaaatttcttcaagaaaatccaggctatcacatagtctttctgtgtgacttattaggagataggaagagcattgggaaacttgcacagctagctatgcatctacattttggtttggggttagttatgaaatgttcttaatatgacgtgttcaataacttcacataaacttcctgttctccaaaacctcaaagagatagagttaatgagttgttgtttttttttaaatgggggtagttttctatctgtcatgggctctagcatctactccgctacccaattctgtcatctccaagctgagtttcctcttctgaggcagaggctggagcagttctttttcagttctcatcctctccatcccaatccagtatatcaatcaactctaactcggagacgtctagctggcaatgtttctaaaactttcactggatttctttagacattgaagcaaacatttttttctaagaattgcttctcagatgatgatatcaaatgtatatgcttttgcaagtttgaaaagttcaaattaaccacttttgactaggtaagtctttctaaaaaccatttaaagctaactgggtcttagcatcctcctgtgtatggaagagacaggtgaccgctccaggttgggtgctcacagaacccttttcctgactctcatggaagatggtggaaggaaaatagactgtctcatcaaccctcctgtgtcctctgaagcaatctcagtttttattaaccacctcttctgtgtttctggtagctatttaacctgtatttaatctgtacttcctatgccagcctcaattttatttgatttttacaattattctcttctaaccaatgaagtgtttgtcagtatgccccaaagcttgctcttttgtgctcccttttgaataactttctatccagaaaaagagattatttgggacttgagatttgcagtgataccaacttatagcaatgatgtactttaagggaactacccaactatgttgtgatagaagaaagagaaaccttcactttggcatttttttttaatcactgtttatttttctgtttgcggcccaggaagcagtgggaggtggtggcagatatgctttgcatatggattgttatgtttttatttgggcaagtttaatcatggaaaactcaaaaagaaggggggaaatggtcagtttaagccaaaagaaactttctaaacaatgtataggtacacagcaaaattaaacaaatccaacaatttctgaagcttagtgtaattgagtggtggttgttattcaataaaattattcccaaaagtgtttctcctaagagtgcagttcccatgagtcacttcctgaacccattgaccaaaggtggacagagacaatcctgtagaccttgacattcagaaagatgtgagctgcttactgatcatatatgcatacgtttctttacagcagaggaaaccattgtccacaaaactgatgttcttttggggttttatgtacagacttgtccaatcatgtgtgtggttcctgcgagttgctgatgactccgcattgaagctctctgagttctttgattttaagttgggtttatggaattttttcaaatgttggaaggtgtgtggttcttcctgccctccctccccttttggaaatatgaaagcaaatgtttagaagaattccttttgaaaagctgtgtcgtgttccctgtgaaactgagcaggtgtgtgttggcgcgctaagtgccacatgcttgtgtgtagaggaggaggtggccctgccggctccgcgctgctgtgcctgtgatccctacctgctccccgctcctgttgccagcagcactcactgcactcctttgtcatatactctgcatcactgtcatactcacaacttcgtgaataaagttgtgtgctttattcgtaga

SEQ ID NO: 20487 - protein, 98 aa, Homo sapiens; identical to SEQ ID NO: 20485

SEQ ID NO: 20488 - DNA, 833 bp, Homo sapiens
gcactgagccatgattgcatcactgtactccagcctgggcaacagagtgaaaccttgtctcaaaaaagaaaggaaaaaggaaattcacttcaaagacatcaaaataacaactggagatgcccttccatttactaaagtgatctctgaccagtgaacttagactaagttgcaaacccagttctaatggagcagggaggcctaaattcaggccttccttgcattgcacgttgacctggcttgtcacacagggccattttcttgagaaaccagccagtagtgctgagttggtggcaggcatttttgttttctcttgtattgtttacttaaaagtgttaaagaccgttgctgaccttgccagcctaacaaactgaacacagatggactagcccgttaagattcccttgtcttggggctgatgtgagaagttgtctttgctgtggaattaggacctgacatgaaacgcagatctagtggcagagaggaagatgatgaggaacttctgagacgtcggcagcttcaagaagagcaattaatgaagcttaactcaggcctgggacagttgattatgaaagcaaatgtttagaagaattccttttgaaaagctgtgtcgtgttccctgtgaaactgagcaggtgtgtgttggcgcgctaagtgccacatgcttgtgtgtagaggaggaggtggccctgccggctccgcgctgctgtgcctgtgatccctacctgctccccgctcctgttgccagcagcactcactgcactcctttgtcatatactctgcatcactgtcatactcacaacttcgtgaataaagttgtgtgctttattcgtaga

SEQ ID NO: 20489 - protein, 42 aa, Homo sapiens
MKRRSSGREEDDEELLRRRQLQEEQLMKLNSGLGQLIMKANV

SEQ ID NO: 20490 - DNA, 6858 bp, Homo sapiens
gaggagaggaggcgtgagagagcgtgcctgcccgccgcacacggggctggtttccggagtgcgtctctagagggatgcacgttgccttagccgagcttcggagagaagcctgatatgtaacccaggcaggtgggagcctcagtctgtcgggctgaggtctggcatctacaaagcctcttggccgtgttctgaacttgaagcctggaggagttctctgctcagcacagccaaggaacagaattagaagaaaaggaaccctggcctgaggcaggtgacaaacattaccaccccagctgtgcacgatgcagcagatgcaaccagatgttcacagaaggagaggaaatgtatcttcaaggctccaccgtttggcatcccgactgtaagcaatctacgaagaccgaggaaaagctgcggcctaccaggacatcctcggaaagtatttattctaggccaggctccagtattcctggctcaccaggtcatactatctatgcaaaagtagacaatgagatcctggattacaaggatttagcagccattccgaaggtcaaggcaatttatgacattgaacgtccagatcttattacctatgagcctttctacacttcgggctatgatgacaaacaggagagacagagccttggagagtctccgaggactttgtctcctactccatcagcagaagggtaccaggatgttcgggatcggatgatccatcggtccacgagccagggctccatcaactcccctgtgtacagccgccacagctacactccaaccacgtcccgctctccccagcatttccacagacctggcaatgagccgtccagcggccggaactcccctctcccttaccggccagacagccgccctctaactccaacttacgctcaggcccctaaacatttccatgttccagatcaaggaatcaacatttaccgaaagccacccatctacaaacagcatgctgccttggcagcccagagcaagtcctcagaagatatcatcaagttttccaagttcccagcagcccaggcaccagaccccagcgagacaccaaagattgagacggaccactggcctggtcccccctcatttgctgtcgtaggacctgacatgaaacgcagatctagtggcagagaggaagatgatgaggaacttctgagacgtcggcagcttcaagaagagcaattaatgaagcttaactcaggcctgggacagttgatcttgaaagaagagatggagaaagagagccgggaaaggtcatctctgttagccagtcgctacgattctcccatcaactcagcttcacatattccatcatctaaaactgcatctctccctggctatggaagaaatgggcttcaccggcctgtttctaccgacttcgctcagtataacagctatggggatgtcagcgggggagtgcgagttgcagacactcccagatggccacatgcctgcaatgagaatggaccgaggagtgtctatgcccaacatgttggaaccaaagatatttccatatgaaatgctcatggtgaccaacagagggcgaaacaaaatcctcagagaggtggacagaaccaggctggagcgccacttagcccctgaagtgtttcgggaaatctttggaatgtccatacaggagtttgacaggttacctctttggagacgcaacgacatgaagaaaaaagcaaaactcttctaagtcccactcgtgaatggcaattagagaaaggactgacagtggcggtgccccataggatgtcatattgaggcccaaacttgattggagaatttgcaaactaccgtcgctcagcaacaccaaaaagagaaagtctggttaaaacaccatgagtcaaatgtcgggccagccaacagtaacacttgccaagaagcatggcgtagaaatttctatgttccgaaacacagagtagtgtccacatgtgagcttttcacattaccttatgtatacaacaggagctgcgttgttttcttctttttcttttcctttatctgttgtccaacaacagtgctgactgtccggataagagctggcaagtgcccttaggatgccgcatgggaaaaatcggttatcataatttcaaagtataaatatatttattaagtagcgctgcggctaagaaggaagagtgaggggtctgtccatggggtggcagtgatttcacacccgcctttcttgaatggcttcgtgttactcagccgtgccctggcaggaatggaactccatcagggaacagggcagctctgtttgaatggggtgaaaaacagcaaaattaattcttagcaagctccttgttctctactgttcaccgggacctggctggcaaatgacttagctattagtatatttaaaaactgttcaaaagcaaaagagaaggaacaggaatgaaaggaaaccttcccttaactctttctgcttcccatagcaggtctggttcctgctccccgcctaggacaggagctgtctggagctccacctttgcaaagaaaggaaaaacacaaattgcccccagattggcccagtggcatgccattaggtgattttgcataggggccatatcattcatggccaaaaaaaaccaaaaagcaaaaaacaaaaacaagtcccatgtcctactgactctagttcttccagtcgttatcctctgctgtctctctggcatcctatgaatcagatcaagcccatgctgttgttggtttttaaggtttctttcaataataggctaaggaaagacatgtttttctcttttaaatctctgcaactccaaagtagactccttcgaacgtatttaatttggccttttcagctttcttcttgcccagctctgtcgaattcatgggtgtgtgtgcacatgttggtttcactcacccagagtaattttgtgagcatgcatgtgctttttaatttctgcttgaatgtttgtcctgctgtgttgcagcttctaaagacattgtcaccgagtgtgtgtgactcaaagatcaagagtgaggctaaactgcgaccccaacatcacttccttcatggaaaggtgttggcgctgatgtagctcatggaaggatcagactgggaaccacagaggaaggatgaggtgggatgtggaggtcagagcatctcacgagagtccctcaggctctgcaacactagattcgaatatgagcctagggtttccccaacacgtgcgtgcatatgaaaccacatcatgattcccgacgtgagttagatgagggagagtttgtgtaactccacacccaggagggtaagccactttattatcatgctttggggctgtgcttaagaatttaagctctgttttaaagccgaagaagaaaacatttgaatttaccttcatatgccactaagaacaaaagctctgaagttcttcctgctggcaccaaatattaggattacaagctgtctctctgacaccagtggtaaaaaagcaagtagaatagtttctgagtctgtgttgcagcctctgacacgtggctcaccgctgtcatttgggggatggaatgaacagtcactgttctatagcatcctcctgtgctcttacctaaggaatctaaattgtcctagccttccattgctatgcactgaatgaggactactctcgtgtgtgtgtgtgtgtgtgtgtgtgtgtgtgtgtgtgtgtgtgtgtgtgttggatctactaacatgtttagcaaatggctctgacagggtggccatgagcagatgagaccagctcttgcttggttggaagccacactgcagtttgcagtttagcctttggtgtctcagtggcttcttgcttattccatgctttttctatcccatcctctctctgtgccctcctgcaatggcagccttggcacaatgcctgggtgtcctcatccttgctttactctggaaagtgtggggatggagaggatggtgcatttccagtgcttccttacctgtcaataacaatggtggccacctgggtcccagcacttggctggtggagagatttttttcattatggagctaataaagggtccctacgttttacattgattaatgaattatcacccagacatgtgcagatgaaatgtcaatataagaaaaatcaaggtatttgggaaacatgggcataatcaggtagttttgctaaaattcctcttccttggtctacataaagaagacatgggtctgtcatagaatggggacattagactgaaaactgggacaacccccttccttattttatagagactaggagttaaggggcctgcctaagattgcagtgataaagaactgaaccctaaatcagctcccactaatgaaaccctgctttccttgtatcttttaaactcagttctgcatccaacttgagaagaaaaaaagcttctttccatatcaagtaccatatgagttcatttaaactgcaccttgcagaaatgcattgccagaaagcaccagtagcctcctatctgcaagcagagtagtgctctgctctggggaggggtcattggaaaccataatgcagagtgggccccctactccatttcccagcaaaaggctccagctggagggatgggttgtggggcaacctggttcctgctaactgccagattgaatgtgtgggctagaatgcctgcacatttagttaaactgggctcagcatgcttgtcctcaaaatgtccatcctggtcacagcacacaagatggctattggtctgcttttaccctaccctgtactatacatgaaaattccagttattaacacactcaaactggtggagcttgttcaccctaggaaggggattgtatatatggcaggcttccctggtgccgatgtaaagggctacatttgggaacatttgacttccttgggactcttaagtgcataatgatggcatgaagtaaaaggggcctcaatgatgataggaaaatcagttcttttaaaatttcttcaagaaaatccaggctatcacatagtctttctgtgtgacttattaggagataggaagagcattgggaaacttgcacagctagctatgcatctacattttggtttggggttagttatgaaatgttcttaatatgacgtgttcaataacttcacataaacttcctgttctccaaaacctcaaagagatagagttaatgagttgttgtttttttttaaatgggggtagttttctatctgtcatgggctctagcatctactccgctacccaattctgtcatctccaagctgagtttcctcttctgaggcagaggctggagcagttctttttcagttctcatcctctccatcccaatccagtatatcaatcaactctaactcggagacgtctagctggcaatgtttctaaaactttcactggatttctttagacattgaagcaaacatttttttctaagaattgcttctcagatgatgatatcaaatgtatatgcttttgcaagtttgaaaagttcaaattaaccacttttgactaggtaagtctttctaaaaaccatttaaagctaactgggtcttagcatcctcctgtgtatggaagagacaggtgaccgctccaggttgggtgctcacagaacccttttcctgactctcatggaagatggtggaaggaaaatagactgtctcatcaaccctcctgtgtcctctgaagcaatctcagtttttattaaccacctcttctgtgtttctggtagctatttaacctgtatttaatctgtacttcctatgccagcctcaattttatttgatttttacaattattctcttctaaccaatgaagtgtttgtcagtatgccccaaagcttgctcttttgtgctcccttttgaataactttctatccagaaaaagagattatttgggacttgagatttgcagtgataccaacttatagcaatgatgtactttaagggaactacccaactatgttgtgatagaagaaagagaaaccttcactttggcatttttttttaatcactgtttatttttctgtttgcggcccaggaagcagtgggaggtggtggcagatatgctttgcatatggattgttatgtttttatttgggcaagtttaatcatggaaaactcaaaaagaaggggggaaatggtcagtttaagccaaaagaaactttctaaacaatgtataggtacacagcaaaattaaacaaatccaacaatttctgaagcttagtgtaattgagtggtggttgttattcaataaaattattcccaaaagtgtttctcctaagagtgcagttcccatgagtcacttcctgaacccattgaccaaaggtggacagagacaatcctgtagaccttgacattcagaaagatgtgagctgcttactgatcatatatgcatacgtttctttacagcagaggaaaccattgtccacaaaactgatgttcttttggggttttatgtacagacttgtccaatcatgtgtgtggttcctgcgagttgctgatgactccgcattgaagctctctgagttctttgattttaagttgggtttatggaattttttcaaatgttggaaggtgtgtggttcttcctgccctccctccccttttggaaatatgaaagcaaatgtttagaagaattccttttgaaaagctgtgtcgtgttccctgtgaaactgagcaggtgtgtgttggcgcgctaagtgccacatgcttgtgtgtagaggaggaggtggccctgccggctccgcgctgctgtgcctgtgatccctacctgctccccgctcctgttgccagcagcactcactgcactcctttgtcatatactctgcatcactgtcatactcacaacttcgtgaataaagttgtgtgctttattcgtaga

SEQ ID NO: 20491 - protein, 401 aa, Homo sapiens [sequence omitted]

SEQ ID NO: 20492 - DNA, 6842 bp, Homo sapiens
aaagcgaggagaggaggcgtgagagagcgtgcctgcccgccgcacacggggctggtttccggagtgcgtctctagagggatgcacgttgccttagccgagcttcggagagaagcctgatatgtaacccaggcaggtgggagcctcagtctgtcgggctgaggtctggcatctacaaagcctcttggccgtgttctgaacttgaagcctggaggagttctctgctcagcacagccaaggaacagaattagaagaaaaggaaccctggcctgaggcaggtgacaaacattaccaccccagctgtgcacgatgcagcagatgcaaccagatgttcacagaaggagaggaaatgtatcttcaaggctccaccgtttggcatcccgactgtaagcaatctacgaagaccgaggaaaagctgcggctgccaaacattcggcgttcttcatccgatttcttttattccaaaagtctgattcgacgcacaggacggtctccgtctctgcagcctaccaggacatcctcggaaagtatttattctaggccaggctccagtattcctggctcaccaggtcatactatctatgcaaaagtagacaatgagatcctggattacaaggatttagcagccattccgaaggtcaaggcaatttatgacattgaacgtccagatcttattacctatgagcctttctacacttcgggctatgatgacaaacaggagagacagagccttggagagtctccgaggactttgtctcctactccatcagcagaagggtaccaggatgttcgggatcggatgatccatcggtccacgagccagggctccatcaactcccctgtgtacagccgccacagctacactccaaccacgtcccgctctccccagcatttccacagacctgatcaaggaatcaacatttaccgaaagccacccatctacaaacagcatgctgccttggcagcccagagcaagtcctcagaagatatcatcaagttttccaagttcccagcagcccaggcaccagaccccagcgagacaccaaagattgagacggaccactggcctggtcccccctcatttgctgtcgtaggacctgacatgaaacgcagatctagtggcagagaggaagatgatgaggaacttctgagacgtcggcagcttcaagaagagcaattaatgaagcttaactcaggcctgggacagttgatcttgaaagaagagatggagaaagagagccgggaaaggtcatctctgttagccagtcgctacgattctcccatcaactcagcttcacatattccatcatctaaaactgcatctctccctggctatggaagaaatgggcttcaccggcctgtttctaccgacttcgctcagtataacagctatggggatgtcagcgggggagtgcgagttgcagacactcccagatggccacatgcctgcaatgagaatggaccgaggagtgtctatgcccaacatgttggaaccaaagatatttccatatgaaatgctcatggtgaccaacagagggcgaaacaaaatcctcagagaggtggacagaaccaggctggagcgccacttagcccctgaagtgtttcgggaaatctttggaatgtccatacaggagtttgacaggttacctctttggagacgcaacgacatgaagaaaaaagcaaaactcttctaagtcccactcgtgaatggcaattagagaaaggactgacagtggcggtgccccataggatgtcatattgaggcccaaacttgattggagaatttgcaaactaccgtcgctcagcaacaccaaaaagagaaagtctggttaaaacaccatgagtcaaatgtcgggccagccaacagtaacacttgccaagaagcatggcgtagaaatttctatgttccgaaacacagagtagtgtccacatgtgagcttttcacattaccttatgtatacaacaggagctgcgttgttttcttctttttcttttcctttatctgttgtccaacaacagtgctgactgtccggataagagctggcaagtgcccttaggatgccgcatgggaaaaatcggttatcataatttcaaagtataaatatatttattaagtagcgctgcggctaagaaggaagagtgaggggtctgtccatggggtggcagtgatttcacacccgcctttcttgaatggcttcgtgttactcagccgtgccctggcaggaatggaactccatcagggaacagggcagctctgtttgaatggggtgaaaaacagcaaaattaattcttagcaagctccttgttctctactgttcaccgggacctggctggcaaatgacttagctattagtatatttaaaaactgttcaaaagcaaaagagaaggaacaggaatgaaaggaaaccttcccttaactctttctgcttcccatagcaggtctggttcctgctccccgcctaggacaggagctgtctggagctccacctttgcaaagaaaggaaaaacacaaattgcccccagattggcccagtggcatgccattaggtgattttgcataggggccatatcattcatggccaaaaaaaaccaaaaagcaaaaaacaaaaacaagtcccatgtcctactgactctagttcttccagtcgttatcctctgctgtctctctggcatcctatgaatcagatcaagcccatgctgttgttggtttttaaggtttctttcaataataggctaaggaaagacatgtttttctcttttaaatctctgcaactccaaagtagactccttcgaacgtatttaatttggccttttcagctttcttcttgcccagctctgtcgaattcatgggtgtgtgtgcacatgttggtttcactcacccagagtaattttgtgagcatgcatgtgctttttaatttctgcttgaatgtttgtcctgctgtgttgcagcttctaaagacattgtcaccgagtgtgtgtgactcaaagatcaagagtgaggctaaactgcgaccccaacatcacttccttcatggaaaggtgttggcgctgatgtagctcatggaaggatcagactgggaaccacagaggaaggatgaggtgggatgtggaggtcagagcatctcacgagagtccctcaggctctgcaacactagattcgaatatgagcctagggtttccccaacacgtgcgtgcatatgaaaccacatcatgattcccgacgtgagttagatgagggagagtttgtgtaactccacacccaggagggtaagccactttattatcatgctttggggctgtgcttaagaatttaagctctgttttaaagccgaagaagaaaacatttgaatttaccttcatatgccactaagaacaaaagctctgaagttcttcctgctggcaccaaatattaggattacaagctgtctctctgacaccagtggtaaaaaagcaagtagaatagtttctgagtctgtgttgcagcctctgacacgtggctcaccgctgtcatttgggggatggaatgaacagtcactgttctatagcatcctcctgtgctcttacctaaggaatctaaattgtcctagccttccattgctatgcactgaatgaggactactctcgtgtgtgtgtgtgtgtgtgtgtgtgtgtgtgtgtgtgtgtgtgtgtgtgttggatctactaacatgtttagcaaatggctctgacagggtggccatgagcagatgagaccagctcttgcttggttggaagccacactgcagtttgcagtttagcctttggtgtctcagtggcttcttgcttattccatgctttttctatcccatcctctctctgtgccctcctgcaatggcagccttggcacaatgcctgggtgtcctcatccttgctttactctggaaagtgtggggatggagaggatggtgcatttccagtgcttccttacctgtcaataacaatggtggccacctgggtcccagcacttggctggtggagagatttttttcattatggagctaataaagggtccctacgttttacattgattaatgaattatcacccagacatgtgcagatgaaatgtcaatataagaaaaatcaaggtatttgggaaacatgggcataatcaggtagttttgctaaaattcctcttccttggtctacataaagaagacatgggtctgtcatagaatggggacattagactgaaaactgggacaacccccttccttattttatagagactaggagttaaggggcctgcctaagattgcagtgataaagaactgaaccctaaatcagctcccactaatgaaaccctgctttccttgtatcttttaaactcagttctgcatccaacttgagaagaaaaaaagcttctttccatatcaagtaccatatgagttcatttaaactgcaccttgcagaaatgcattgccagaaagcaccagtagcctcctatctgcaagcagagtagtgctctgctctggggaggggtcattggaaaccataatgcagagtgggccccctactccatttcccagcaaaaggctccagctggagggatgggttgtggggcaacctggttcctgctaactgccagattgaatgtgtgggctagaatgcctgcacatttagttaaactgggctcagcatgcttgtcctcaaaatgtccatcctggtcacagcacacaagatggctattggtctgcttttaccctaccctgtactatacatgaaaattccagttattaacacactcaaactggtggagcttgttcaccctaggaaggggattgtatatatggcaggcttccctggtgccgatgtaaagggctacatttgggaacatttgacttccttgggactcttaagtgcataatgatggcatgaagtaaaaggggcctcaatgatgataggaaaatcagttcttttaaaatttcttcaagaaaatccaggctatcacatagtctttctgtgtgacttattaggagataggaagagcattgggaaacttgcacagctagctatgcatctacattttggtttggggttagttatgaaatgttcttaatatgacgtgttcaataacttcacataaacttcctgttctccaaaacctcaaagagatagagttaatgagttgttgtttttttttaaatgggggtagttttctatctgtcatgggctctagcatctactccgctacccaattctgtcatctccaagctgagtttcctcttctgaggcagaggctggagcagttctttttcagttctcatcctctccatcccaatccagtatatcaatcaactctaactcggagacgtctagctggcaatgtttctaaaactttcactggatttctttagacattgaagcaaacatttttttctaagaattgcttctcagatgatgatatcaaatgtatatgcttttgcaagtttgaaaagttcaaattaaccacttttgactaggtaagtctttctaaaaaccatttaaagctaactgggtcttagcatcctcctgtgtatggaagagacaggtgaccgctccaggttgggtgctcacagaacccttttcctgactctcatggaagatggtggaaggaaaatagactgtctcatcaaccctcctgtgtcctctgaagcaatctcagtttttattaaccacctcttctgtgtttctggtagctatttaacctgtatttaatctgtacttcctatgccagcctcaattttatttgatttttacaattattctcttctaaccaatgaagtgtttgtcagtatgccccaaagcttgctcttttgtgctcccttttgaataactttctatccagaaaaagagattatttgggacttgagatttgcagtgataccaacttatagcaatgatgtactttaagggaactacccaactatgttgtgatagaagaaagagaaaccttcactttggcatttttttttaatcactgtttatttttctgtttgcggcccaggaagcagtgggaggtggtggcagatatgctttgcatatggattgttatgtttttatttgggcaagtttaatcatggaaaactcaaaaagaaggggggaaatggtcagtttaagccaaaagaaactttctaaacaatgtataggtacacagcaaaattaaacaaatccaacaatttctgaagcttagtgtaattgagtggtggttgttattcaataaaattattcccaaaagtgtttctcctaagagtgcagttcccatgagtcacttcctgaacccattgaccaaaggtggacagagacaatcctgtagaccttgacattcagaaagatgtgagctgcttactgatcatatatgcatacgtttctttacagcagaggaaaccattgtccacaaaactgatgttcttttggggttttatgtacagacttgtccaatcatgtgtgtggttcctgcgagttgctgatgactccgcattgaagctctctgagttctttgattttaagttgggtttatggaattttttcaaatgttggaaggtgtgtggttcttcctgccctccctccccttttggaaatatgaaagcaaatgtttagaagaattccttttgaaaagctgtgtcgtgttccctgtgaaactgagcaggtgtgtgttggcgcgctaagtgccacatgcttgtgtgtagaggaggaggtggccctgccggctccgcgctgctgtgcctgtgatccctacctgctccccgctcctgttgccagcagcactcactgcactcctttgtcatatactctgcatcactgtcatactcacaacttcgtgaataaagttgtgtgctttattcgtaga

SEQ ID NO: 20493 - protein, 394 aa, Homo sapiens
MFTEGEEMYLQGSTVWHPDCKQSTKTEEKLRLPNIRRSSSDFFYSKSLIRRTGRSPSLQPTRTSSESIYSRPGSSIPGSPGHTIYAKVDNEILDYKDLAAIPKVKAIYDIERPDLITYEPFYTSGYDDKQERQSLGESPRTLSPTPSAEGYQDVRDRMIHRSTSQGSINSPVYSRHSYTPTTSRSPQHFHRPDQGINIYRKPPIYKQHAALAAQSKSSEDIIKFSKFPAAQAPDPSETPKIETDHWPGPPSFAVVGPDMKRRSSGREEDDEELLRRRQLQEEQLMKLNSGLGQLILKEEMEKESRERSSLLASRYDSPINSASHIPSSKTASLPGYGRNGLHRPVSTDFAQYNSYGDVSGGVRVADTPRWPHACNENGPRSVYAQHVGTKDISI

SEQ ID NO: 20494 - DNA, 7177 bp, Homo sapiens
tattactcctaggctatgaagctgtatagcatgttactggacagaattttgtaggcaattgtaacccaatgtgtgtggctgtgacctggcacaagggggcttcttcataaagaacggagagtatctctgcaccctggactaccagcggatgtacgggacacgctgccatggctgtggggagttcgtggagggcgaagtggtgactgctctgggcaagacctaccatcccaattgctttgcttgtactatctgcaagcgcccgtttccacccggagaccgagtcacattcaatgggagagactgcctttgtcaactctgtgcacagccgatgtcgtccagtccgaaagaaaccaccttctccagcaattgtgccggctgcggaagagatatcaagaatgggcaggcgctgctggcgctggataagcagtggcacttggggtgctttaaatgcaagtcctgcgggaaggtcctcaccggggagtacatcagcaaggatggtgctccgtactgtgaaaaggactaccagggactctttggggtgaaatgtgaggcgtgtcaccagtttatcacagggaaagtcctggaggcaggtgacaaacattaccaccccagctgtgcacgatgcagcagatgcaaccagatgttcacagaaggagaggaaatgtatcttcaaggctccaccgtttggcatcccgactgtaagcaatctacgaagaccgaggaaaagctgcggcctaccaggacatcctcggaaagtatttattctaggccaggctccagtattcctggctcaccaggtcatactatctatgcaaaagtagacaatgagatcctggattacaaggatttagcagccattccgaaggtcaaggcaatttatgacattgaacgtccagatcttattacctatgagcctttctacacttcgggctatgatgacaaacaggagagacagagccttggagagtctccgaggactttgtctcctactccatcagcagaagggtaccaggatgttcgggatcggatgatccatcggtccacgagccagggctccatcaactcccctgtgtacagccgccacagctacactccaaccacgtcccgctctccccagcatttccacagacctggcaatgagccgtccagcggccggaactcccctctcccttaccggccagacagccgccctctaactccaacttacgctcaggcccctaaacatttccatgttccagatcaaggaatcaacatttaccgaaagccacccatctacaaacagcatgctgccttggcagcccagagcaagtcctcagaagatatcatcaagttttccaagttcccagcagcccaggcaccagaccccagcgagacaccaaagattgagacggaccactggcctggtcccccctcatttgctgtcgtaggacctgacatgaaacgcagatctagtggcagagaggaagatgatgaggaacttctgagacgtcggcagcttcaagaagagcaattaatgaagcttaactcaggcctgggacagttgatcttgaaagaagagatggagaaagagagccgggaaaggtcatctctgttagccagtcgctacgattctcccatcaactcagcttcacatattccatcatctaaaactgcatctctccctggctatggaagaaatgggcttcaccggcctgtttctaccgacttcgctcagtataacagctatggggatgtcagcgggggagtgcgagttgcagacactcccagatggccacatgcctgcaatgagaatggaccgaggagtgtctatgcccaacatgttggaaccaaagatatttccatatgaaatgctcatggtgaccaacagagggcgaaacaaaatcctcagagaggtggacagaaccaggctggagcgccacttagcccctgaagtgtttcgggaaatctttggaatgtccatacaggagtttgacaggttacctctttggagacgcaacgacatgaagaaaaaagcaaaactcttctaagtcccactcgtgaatggcaattagagaaaggactgacagtggcggtgccccataggatgtcatattgaggcccaaacttgattggagaatttgcaaactaccgtcgctcagcaacaccaaaaagagaaagtctggttaaaacaccatgagtcaaatgtcgggccagccaacagtaacacttgccaagaagcatggcgtagaaatttctatgttccgaaacacagagtagtgtccacatgtgagcttttcacattaccttatgtatacaacaggagctgcgttgttttcttctttttcttttcctttatctgttgtccaacaacagtgctgactgtccggataagagctggcaagtgcccttaggatgccgcatgggaaaaatcggttatcataatttcaaagtataaatatatttattaagtagcgctgcggctaagaaggaagagtgaggggtctgtccatggggtggcagtgatttcacacccgcctttcttgaatggcttcgtgttactcagccgtgccctggcaggaatggaactccatcagggaacagggcagctctgtttgaatggggtgaaaaacagcaaaattaattcttagcaagctccttgttctctactgttcaccgggacctggctggcaaatgacttagctattagtatatttaaaaactgttcaaaagcaaaagagaaggaacaggaatgaaaggaaaccttcccttaactctttctgcttcccatagcaggtctggttcctgctccccgcctaggacaggagctgtctggagctccacctttgcaaagaaaggaaaaacacaaattgcccccagattggcccagtggcatgccattaggtgattttgcataggggccatatcattcatggccaaaaaaaaccaaaaagcaaaaaacaaaaacaagtcccatgtcctactgactctagttcttccagtcgttatcctctgctgtctctctggcatcctatgaatcagatcaagcccatgctgttgttggtttttaaggtttctttcaataataggctaaggaaagacatgtttttctcttttaaatctctgcaactccaaagtagactccttcgaacgtatttaatttggccttttcagctttcttcttgcccagctctgtcgaattcatgggtgtgtgtgcacatgttggtttcactcacccagagtaattttgtgagcatgcatgtgctttttaatttctgcttgaatgtttgtcctgctgtgttgcagcttctaaagacattgtcaccgagtgtgtgtgactcaaagatcaagagtgaggctaaactgcgaccccaacatcacttccttcatggaaaggtgttggcgctgatgtagctcatggaaggatcagactgggaaccacagaggaaggatgaggtgggatgtggaggtcagagcatctcacgagagtccctcaggctctgcaacactagattcgaatatgagcctagggtttccccaacacgtgcgtgcatatgaaaccacatcatgattcccgacgtgagttagatgagggagagtttgtgtaactccacacccaggagggtaagccactttattatcatgctttggggctgtgcttaagaatttaagctctgttttaaagccgaagaagaaaacatttgaatttaccttcatatgccactaagaacaaaagctctgaagttcttcctgctggcaccaaatattaggattacaagctgtctctctgacaccagtggtaaaaaagcaagtagaatagtttctgagtctgtgttgcagcctctgacacgtggctcaccgctgtcatttgggggatggaatgaacagtcactgttctatagcatcctcctgtgctcttacctaaggaatctaaattgtcctagccttccattgctatgcactgaatgaggactactctcgtgtgtgtgtgtgtgtgtgtgtgtgtgtgtgtgtgtgtgtgtgtgtgtgttggatctactaacatgtttagcaaatggctctgacagggtggccatgagcagatgagaccagctcttgcttggttggaagccacactgcagtttgcagtttagcctttggtgtctcagtggcttcttgcttattccatgctttttctatcccatcctctctctgtgccctcctgcaatggcagccttggcacaatgcctgggtgtcctcatccttgctttactctggaaagtgtggggatggagaggatggtgcatttccagtgcttccttacctgtcaataacaatggtggccacctgggtcccagcacttggctggtggagagatttttttcattatggagctaataaagggtccctacgttttacattgattaatgaattatcacccagacatgtgcagatgaaatgtcaatataagaaaaatcaaggtatttgggaaacatgggcataatcaggtagttttgctaaaattcctcttccttggtctacataaagaagacatgggtctgtcatagaatggggacattagactgaaaactgggacaacccccttccttattttatagagactaggagttaaggggcctgcctaagattgcagtgataaagaactgaaccctaaatcagctcccactaatgaaaccctgctttccttgtatcttttaaactcagttctgcatccaacttgagaagaaaaaaagcttctttccatatcaagtaccatatgagttcatttaaactgcaccttgcagaaatgcattgccagaaagcaccagtagcctcctatctgcaagcagagtagtgctctgctctggggaggggtcattggaaaccataatgcagagtgggccccctactccatttcccagcaaaaggctccagctggagggatgggttgtggggcaacctggttcctgctaactgccagattgaatgtgtgggctagaatgcctgcacatttagttaaactgggctcagcatgcttgtcctcaaaatgtccatcctggtcacagcacacaagatggctattggtctgcttttaccctaccctgtactatacatgaaaattccagttattaacacactcaaactggtggagcttgttcaccctaggaaggggattgtatatatggcaggcttccctggtgccgatgtaaagggctacatttgggaacatttgacttccttgggactcttaagtgcataatgatggcatgaagtaaaaggggcctcaatgatgataggaaaatcagttcttttaaaatttcttcaagaaaatccaggctatcacatagtctttctgtgtgacttattaggagataggaagagcattgggaaacttgcacagctagctatgcatctacattttggtttggggttagttatgaaatgttcttaatatgacgtgttcaataacttcacataaacttcctgttctccaaaacctcaaagagatagagttaatgagttgttgtttttttttaaatgggggtagttttctatctgtcatgggctctagcatctactccgctacccaattctgtcatctccaagctgagtttcctcttctgaggcagaggctggagcagttctttttcagttctcatcctctccatcccaatccagtatatcaatcaactctaactcggagacgtctagctggcaatgtttctaaaactttcactggatttctttagacattgaagcaaacatttttttctaagaattgcttctcagatgatgatatcaaatgtatatgcttttgcaagtttgaaaagttcaaattaaccacttttgactaggtaagtctttctaaaaaccatttaaagctaactgggtcttagcatcctcctgtgtatggaagagacaggtgaccgctccaggttgggtgctcacagaacccttttcctgactctcatggaagatggtggaaggaaaatagactgtctcatcaaccctcctgtgtcctctgaagcaatctcagtttttattaaccacctcttctgtgtttctggtagctatttaacctgtatttaatctgtacttcctatgccagcctcaattttatttgatttttacaattattctcttctaaccaatgaagtgtttgtcagtatgccccaaagcttgctcttttgtgctcccttttgaataactttctatccagaaaaagagattatttgggacttgagatttgcagtgataccaacttatagcaatgatgtactttaagggaactacccaactatgttgtgatagaagaaagagaaaccttcactttggcatttttttttaatcactgtttatttttctgtttgcggcccaggaagcagtgggaggtggtggcagatatgctttgcatatggattgttatgtttttatttgggcaagtttaatcatggaaaactcaaaaagaaggggggaaatggtcagtttaagccaaaagaaactttctaaacaatgtataggtacacagcaaaattaaacaaatccaacaatttctgaagcttagtgtaattgagtggtggttgttattcaataaaattattcccaaaagtgtttctcctaagagtgcagttcccatgagtcacttcctgaacccattgaccaaaggtggacagagacaatcctgtagaccttgacattcagaaagatgtgagctgcttactgatcatatatgcatacgtttctttacagcagaggaaaccattgtccacaaaactgatgttcttttggggttttatgtacagacttgtccaatcatgtgtgtggttcctgcgagttgctgatgactccgcattgaagctctctgagttctttgattttaagttgggtttatggaattttttcaaatgttggaaggtgtgtggttcttcctgccctccctccccttttggaaatatgaaagcaaatgtttagaagaattccttttgaaaagctgtgtcgtgttccctgtgaaactgagcaggtgtgtgttggcgcgctaagtgccacatgcttgtgtgtagaggaggaggtggccctgccggctccgcgctgctgtgcctgtgatccctacctgctccccgctcctgttgccagcagcactcactgcactcctttgtcatatactctgcatcactgtcatactcacaacttcgtgaataaagttgtgtgctttattcgtaga

SEQ ID NO: 20495 - protein, 565 aa, Homo sapiens
MYGTRCHGCGEFVEGEVVTALGKTYHPNCFACTICKRPFPPGDRVTFNGRDCLCQLCAQPMSSSPKETTFSSNCAGCGRDIKNGQALLALDKQWHLGCFKCKSCGKVLTGEYISKDGAPYCEKDYQGLFGVKCEACHQFITGKVLEAGDKHYHPSCARCSRCNQMFTEGEEMYLQGSTVWHPDCKQSTKTEEKLRPTRTSSESIYSRPGSSIPGSPGHTIYAKVDNEILDYKDLAAIPKVKAIYDIERPDLITYEPFYTSGYDDKQERQSLGESPRTLSPTPSAEGYQDVRDRMIHRSTSQGSINSPVYSRHSYTPTTSRSPQHFHRPGNEPSSGRNSPLPYRPDSRPLTPTYAQAPKHFHVPDQGINIYRKPPIYKQHAALAAQSKSSEDIIKFSKFPAAQAPDPSETPKIETDHWPGPPSFAVVGPDMKRRSSGREEDDEELLRRRQLQEEQLMKLNSGLGQLILKEEMEKESRERSSLLASRYDSPINSASHIPSSKTASLPGYGRNGLHRPVSTDFAQYNSYGDVSGGVRVADTPRWPHACNENGPRSVYAQHVGTKDISI

SEQ ID NO: 20496 - DNA, 2461 bp, Homo sapiens
agtggcccaccctcaggaccctcaccacccatcagagaagcctgtcattcactgccataaatgtggggagccttgcaagggtgaagtgcttcgggtccagaccaaacatttccacatcaagtgtttcacctgcaaagtgtgtggctgtgacctggcacaagggggcttcttcataaagaacggagagtatctctgcaccctggttcctgctaactgccagattgaatgtgtgggctagaatgcctgcacatttagttaaactgggctcagcatgcttgtcctcaaaatgtccatcctggtcacagcacacaagatggctattggtctgcttttaccctaccctgtactatacatgaaaattccagttattaacacactcaaactggtggagcttgttcaccctaggaaggggattgtatatatggcaggcttccctggtgccgatgtaaagggctacatttgggaacatttgacttccttgggactcttaagtgcataatgatggcatgaagtaaaaggggcctcaatgatgataggaaaatcagttcttttaaaatttcttcaagaaaatccaggctatcacatagtctttctgtgtgacttattaggagataggaagagcattgggaaacttgcacagctagctatgcatctacattttggtttggggttagttatgaaatgttcttaatatgacgtgttcaataacttcacataaacttcctgttctccaaaacctcaaagagatagagttaatgagttgttgtttttttttaaatgggggtagttttctatctgtcatgggctctagcatctactccgctacccaattctgtcatctccaagctgagtttcctcttctgaggcagaggctggagcagttctttttcagttctcatcctctccatcccaatccagtatatcaatcaactctaactcggagacgtctagctggcaatgtttctaaaactttcactggatttctttagacattgaagcaaacatttttttctaagaattgcttctcagatgatgatatcaaatgtatatgcttttgcaagtttgaaaagttcaaattaaccacttttgactaggtaagtctttctaaaaaccatttaaagctaactgggtcttagcatcctcctgtgtatggaagagacaggtgaccgctccaggttgggtgctcacagaacccttttcctgactctcatggaagatggtggaaggaaaatagactgtctcatcaaccctcctgtgtcctctgaagcaatctcagtttttattaaccacctcttctgtgtttctggtagctatttaacctgtatttaatctgtacttcctatgccagcctcaattttatttgatttttacaattattctcttctaaccaatgaagtgtttgtcagtatgccccaaagcttgctcttttgtgctcccttttgaataactttctatccagaaaaagagattatttgggacttgagatttgcagtgataccaacttatagcaatgatgtactttaagggaactacccaactatgttgtgatagaagaaagagaaaccttcactttggcatttttttttaatcactgtttatttttctgtttgcggcccaggaagcagtgggaggtggtggcagatatgctttgcatatggattgttatgtttttatttgggcaagtttaatcatggaaaactcaaaaagaaggggggaaatggtcagtttaagccaaaagaaactttctaaacaatgtataggtacacagcaaaattaaacaaatccaacaatttctgaagcttagtgtaattgagtggtggttgttattcaataaaattattcccaaaagtgtttctcctaagagtgcagttcccatgagtcacttcctgaacccattgaccaaaggtggacagagacaatcctgtagaccttgacattcagaaagatgtgagctgcttactgatcatatatgcatacgtttctttacagcagaggaaaccattgtccacaaaactgatgttcttttggggttttatgtacagacttgtccaatcatgtgtgtggttcctgcgagttgctgatgactccgcattgaagctctctgagttctttgattttaagttgggtttatggaattttttcaaatgttggaaggtgtgtggttcttcctgccctccctccccttttggaaatatgaaagcaaatgtttagaagaattccttttgaaaagctgtgtcgtgttccctgtgaaactgagcaggtgtgtgttggcgcgctaagtgccacatgcttgtgtgtagaggaggaggtggccctgccggctccgcgctgctgtgcctgtgatccctacctgctccccgctcctgttgccagcagcactcactgcactcctttgtcatatactctgcatcactgtcatactcacaacttcgtgaataaagttgtgtgctttattcgtaga

SEQ ID NO: 20497 - protein, 98 aa, Homo sapiens; identical to SEQ ID NO: 20485

SEQ ID NO: 20498 - DNA, 7106 bp, Homo sapiens
ggtctcatgctttcatctcccagtgggtgtgcagacactggagagacccagtggcccaccctcaggaccctcaccacccatcagagaagcctgtcattcactgccataaatgtggggagccttgcaagggtgaagtgcttcgggtccagaccaaacatttccacatcaagtgtttcacctgcaaagtgtgtggctgtgacctggcacaagggggcttcttcataaagaacggagagtatctctgcaccctgacctaccatcccaattgctttgcttgtactatctgcaagcgcccgtttccacccggagaccgagtcacattcaatgggagagactgcctttgtcaactctgtgcacagccgatgtcgtccagtccgaaagaaaccaccttctccagcaattgtgccggctgcggaagagatatcaagaatgggcaggcgctgctggcgctggataagcagtggcacttggggtgctttaaatgcaagtcctgcgggaaggtcctcaccggggagtacatcagcaaggatggtgctccgtactgtgaaaaggactaccagggactctttggggtgaaatgtgaggcgtgtcaccagtttatcacagggaaagtcctggaggcaggtgacaaacattaccaccccagctgtgcacgatgcagcagatgcaaccagatgttcacagaaggagaggaaatgtatcttcaaggctccaccgtttggcatcccgactgtaagcaatctacgaagaccgaggaaaagctgcggcctaccaggacatcctcggaaagtatttattctaggccaggctccagtattcctggctcaccaggtcatactatctatgcaaaagtagacaatgagatcctggattacaaggatttagcagccattccgaaggtcaaggcaatttatgacattgaacgtccagatcttattacctatgagcctttctacacttcgggctatgatgacaaacaggagagacagagccttggagagtctccgaggactttgtctcctactccatcagcagaagggtaccaggatgttcgggatcggatgatccatcggtccacgagccagggctccatcaactcccctgtgtacagccgccacagctacactccaaccacgtcccgctctccccagcatttccacagacctgatcaaggaatcaacatttaccgaaagccacccatctacaaacagcatgctgccttggcagcccagagcaagtcctcagaagatatcatcaagttttccaagttcccagcagcccaggcaccagaccccagcgagacaccaaagattgagacggaccactggcctggtcccccctcatttgctgtcgtaggacctgacatgaaacgcagatctagtggcagagaggaagatgatgaggaacttctgagacgtcggcagcttcaagaagagcaattaatgaagcttaactcaggcctgggacagttgatcttgaaagaagagatggagaaagagagccgggaaaggtcatctctgttagccagtcgctacgattctcccatcaactcagcttcacatattccatcatctaaaactgcatctctccctggctatggaagaaatgggcttcaccggcctgtttctaccgacttcgctcagtataacagctatggggatgtcagcgggggagtgcgagttgcagacactcccagatggccacatgcctgcaatgagaatggaccgaggagtgtctatgcccaacatgttggaaccaaagatatttccatatgaaatgctcatggtgaccaacagagggcgaaacaaaatcctcagagaggtggacagaaccaggctggagcgccacttagcccctgaagtgtttcgggaaatctttggaatgtccatacaggagtttgacaggttacctctttggagacgcaacgacatgaagaaaaaagcaaaactcttctaagtcccactcgtgaatggcaattagagaaaggactgacagtggcggtgccccataggatgtcatattgaggcccaaacttgattggagaatttgcaaactaccgtcgctcagcaacaccaaaaagagaaagtctggttaaaacaccatgagtcaaatgtcgggccagccaacagtaacacttgccaagaagcatggcgtagaaatttctatgttccgaaacacagagtagtgtccacatgtgagcttttcacattaccttatgtatacaacaggagctgcgttgttttcttctttttcttttcctttatctgttgtccaacaacagtgctgactgtccggataagagctggcaagtgcccttaggatgccgcatgggaaaaatcggttatcataatttcaaagtataaatatatttattaagtagcgctgcggctaagaaggaagagtgaggggtctgtccatggggtggcagtgatttcacacccgcctttcttgaatggcttcgtgttactcagccgtgccctggcaggaatggaactccatcagggaacagggcagctctgtttgaatggggtgaaaaacagcaaaattaattcttagcaagctccttgttctctactgttcaccgggacctggctggcaaatgacttagctattagtatatttaaaaactgttcaaaagcaaaagagaaggaacaggaatgaaaggaaaccttcccttaactctttctgcttcccatagcaggtctggttcctgctccccgcctaggacaggagctgtctggagctccacctttgcaaagaaaggaaaaacacaaattgcccccagattggcccagtggcatgccattaggtgattttgcataggggccatatcattcatggccaaaaaaaaccaaaaagcaaaaaacaaaaacaagtcccatgtcctactgactctagttcttccagtcgttatcctctgctgtctctctggcatcctatgaatcagatcaagcccatgctgttgttggtttttaaggtttctttcaataataggctaaggaaagacatgtttttctcttttaaatctctgcaactccaaagtagactccttcgaacgtatttaatttggccttttcagctttcttcttgcccagctctgtcgaattcatgggtgtgtgtgcacatgttggtttcactcacccagagtaattttgtgagcatgcatgtgctttttaatttctgcttgaatgtttgtcctgctgtgttgcagcttctaaagacattgtcaccgagtgtgtgtgactcaaagatcaagagtgaggctaaactgcgaccccaacatcacttccttcatggaaaggtgttggcgctgatgtagctcatggaaggatcagactgggaaccacagaggaaggatgaggtgggatgtggaggtcagagcatctcacgagagtccctcaggctctgcaacactagattcgaatatgagcctagggtttccccaacacgtgcgtgcatatgaaaccacatcatgattcccgacgtgagttagatgagggagagtttgtgtaactccacacccaggagggtaagccactttattatcatgctttggggctgtgcttaagaatttaagctctgttttaaagccgaagaagaaaacatttgaatttaccttcatatgccactaagaacaaaagctctgaagttcttcctgctggcaccaaatattaggattacaagctgtctctctgacaccagtggtaaaaaagcaagtagaatagtttctgagtctgtgttgcagcctctgacacgtggctcaccgctgtcatttgggggatggaatgaacagtcactgttctatagcatcctcctgtgctcttacctaaggaatctaaattgtcctagccttccattgctatgcactgaatgaggactactctcgtgtgtgtgtgtgtgtgtgtgtgtgtgtgtgtgtgtgtgtgtgtgtgtgttggatctactaacatgtttagcaaatggctctgacagggtggccatgagcagatgagaccagctcttgcttggttggaagccacactgcagtttgcagtttagcctttggtgtctcagtggcttcttgcttattccatgctttttctatcccatcctctctctgtgccctcctgcaatggcagccttggcacaatgcctgggtgtcctcatccttgctttactctggaaagtgtggggatggagaggatggtgcatttccagtgcttccttacctgtcaataacaatggtggccacctgggtcccagcacttggctggtggagagatttttttcattatggagctaataaagggtccctacgttttacattgattaatgaattatcacccagacatgtgcagatgaaatgtcaatataagaaaaatcaaggtatttgggaaacatgggcataatcaggtagttttgctaaaattcctcttccttggtctacataaagaagacatgggtctgtcatagaatggggacattagactgaaaactgggacaacccccttccttattttatagagactaggagttaaggggcctgcctaagattgcagtgataaagaactgaaccctaaatcagctcccactaatgaaaccctgctttccttgtatcttttaaactcagttctgcatccaacttgagaagaaaaaaagcttctttccatatcaagtaccatatgagttcatttaaactgcaccttgcagaaatgcattgccagaaagcaccagtagcctcctatctgcaagcagagtagtgctctgctctggggaggggtcattggaaaccataatgcagagtgggccccctactccatttcccagcaaaaggctccagctggagggatgggttgtggggcaacctggttcctgctaactgccagattgaatgtgtgggctagaatgcctgcacatttagttaaactgggctcagcatgcttgtcctcaaaatgtccatcctggtcacagcacacaagatggctattggtctgcttttaccctaccctgtactatacatgaaaattccagttattaacacactcaaactggtggagcttgttcaccctaggaaggggattgtatatatggcaggcttccctggtgccgatgtaaagggctacatttgggaacatttgacttccttgggactcttaagtgcataatgatggcatgaagtaaaaggggcctcaatgatgataggaaaatcagttcttttaaaatttcttcaagaaaatccaggctatcacatagtctttctgtgtgacttattaggagataggaagagcattgggaaacttgcacagctagctatgcatctacattttggtttggggttagttatgaaatgttcttaatatgacgtgttcaataacttcacataaacttcctgttctccaaaacctcaaagagatagagttaatgagttgttgtttttttttaaatgggggtagttttctatctgtcatgggctctagcatctactccgctacccaattctgtcatctccaagctgagtttcctcttctgaggcagaggctggagcagttctttttcagttctcatcctctccatcccaatccagtatatcaatcaactctaactcggagacgtctagctggcaatgtttctaaaactttcactggatttctttagacattgaagcaaacatttttttctaagaattgcttctcagatgatgatatcaaatgtatatgcttttgcaagtttgaaaagttcaaattaaccacttttgactaggtaagtctttctaaaaaccatttaaagctaactgggtcttagcatcctcctgtgtatggaagagacaggtgaccgctccaggttgggtgctcacagaacccttttcctgactctcatggaagatggtggaaggaaaatagactgtctcatcaaccctcctgtgtcctctgaagcaatctcagtttttattaaccacctcttctgtgtttctggtagctatttaacctgtatttaatctgtacttcctatgccagcctcaattttatttgatttttacaattattctcttctaaccaatgaagtgtttgtcagtatgccccaaagcttgctcttttgtgctcccttttgaataactttctatccagaaaaagagattatttgggacttgagatttgcagtgataccaacttatagcaatgatgtactttaagggaactacccaactatgttgtgatagaagaaagagaaaccttcactttggcatttttttttaatcactgtttatttttctgtttgcggcccaggaagcagtgggaggtggtggcagatatgctttgcatatggattgttatgtttttatttgggcaagtttaatcatggaaaactcaaaaagaaggggggaaatggtcagtttaagccaaaagaaactttctaaacaatgtataggtacacagcaaaattaaacaaatccaacaatttctgaagcttagtgtaattgagtggtggttgttattcaataaaattattcccaaaagtgtttctcctaagagtgcagttcccatgagtcacttcctgaacccattgaccaaaggtggacagagacaatcctgtagaccttgacattcagaaagatgtgagctgcttactgatcatatatgcatacgtttctttacagcagaggaaaccattgtccacaaaactgatgttcttttggggttttatgtacagacttgtccaatcatgtgtgtggttcctgcgagttgctgatgactccgcattgaagctctctgagttctttgattttaagttgggtttatggaattttttcaaatgttggaaggtgtgtggttcttcctgccctccctccccttttggaaatatgaaagcaaatgtttagaagaattccttttgaaaagctgtgtcgtgttccctgtgaaactgagcaggtgtgtgttggcgcgctaagtgccacatgcttgtgtgtagaggaggaggtggccctgccggctccgcgctgctgtgcctgtgatccctacctgctccccgctcctgttgccagcagcactcactgcactcctttgtcatatactctgcatcactgtcatactcacaacttcgtgaataaagttgtgtgctttattcgtaga

SEQ ID NO: 20499 - protein, 470 aa, Homo sapiens
MSSSPKETTFSSNCAGCGRDIKNGQALLALDKQWHLGCFKCKSCGKVLTGEYISKDGAPYCEKDYQGLFGVKCEACHQFITGKVLEAGDKHYHPSCARCSRCNQMFTEGEEMYLQGSTVWHPDCKQSTKTEEKLRPTRTSSESIYSRPGSSIPGSPGHTIYAKVDNEILDYKDLAAIPKVKAIYDIERPDLITYEPFYTSGYDDKQERQSLGESPRTLSPTPSAEGYQDVRDRMIHRSTSQGSINSPVYSRHSYTPTTSRSPQHFHRPDQGINIYRKPPIYKQHAALAAQSKSSEDIIKFSKFPAAQAPDPSETPKIETDHWPGPPSFAVVGPDMKRRSSGREEDDEELLRRRQLQEEQLMKLNSGLGQLILKEEMEKESRERSSLLASRYDSPINSASHIPSSKTASLPGYGRNGLHRPVSTDFAQYNSYGDVSGGVRVADTPRWPHACNENGPRSVYAQHVGTKDISI

SEQ ID NO: 20500 - DNA, 7308 bp, Homo sapiens
ggatgctgtgaacacaggtctcatgctttcatctcccagtgggtgtgcagacactggagagacccagtggcccaccctcaggaccctcaccacccatcagagaagcctgtcattcactgccataaatgtggggagccttgcaagggtgaagtgcttcgggtccagaccaaacatttccacatcaagtgtttcacctgcaaagtgtgtggctgtgacctggcacaagggggcttcttcataaagaacggagagtatctctgcaccctggactaccagcggatgtacgggacacgctgccatggctgtggggagttcgtggagggcgaagtggtgactgctctgggcaagacctaccatcccaattgctttgcttgtactatctgcaagcgcccgtttccacccggagaccgagtcacattcaatgggagagactgcctttgtcaactctgtgcacagccgatgtcgtccagtccgaaagaaaccaccttctccagcaattgtgccggctgcggaagagatatcaagaatgggcaggcgctgctggcgctggataagcagtggcacttggggtgctttaaatgcaagtcctgcgggaaggtcctcaccggggagtacatcagcaaggatggtgctccgtactgtgaaaaggactaccagggactctttggggtgaaatgtgaggcgtgtcaccagtttatcacagggaaagtcctggaggcaggtgacaaacattaccaccccagctgtgcacgatgcagcagatgcaaccagatgttcacagaaggagaggaaatgtatcttcaaggctccaccgtttggcatcccgactgtaagcaatctacgaagaccgaggaaaagctgcggcctaccaggacatcctcggaaagtatttattctaggccaggctccagtattcctggctcaccaggtcatactatctatgcaaaagtagacaatgagatcctggattacaaggatttagcagccattccgaaggtcaaggcaatttatgacattgaacgtccagatcttattacctatgagcctttctacacttcgggctatgatgacaaacaggagagacagagccttggagagtctccgaggactttgtctcctactccatcagcagaagggtaccaggatgttcgggatcggatgatccatcggtccacgagccagggctccatcaactcccctgtgtacagccgccacagctacactccaaccacgtcccgctctccccagcatttccacagacctggcaatgagccgtccagcggccggaactcccctctcccttaccggccagacagccgccctctaactccaacttacgctcaggcccctaaacatttccatgttccagatcaaggaatcaacatttaccgaaagccacccatctacaaacagcatgctgccttggcagcccagagcaagtcctcagaagatatcatcaagttttccaagttcccagcagcccaggcaccagaccccagcgagacaccaaagattgagacggaccactggcctggtcccccctcatttgctgtcgtaggacctgacatgaaacgcagatctagtggcagagaggaagatgatgaggaacttctgagacgtcggcagcttcaagaagagcaattaatgaagcttaactcaggcctgggacagttgatcttgaaagaagagatggagaaagagagccgggaaaggtcatctctgttagccagtcgctacgattctcccatcaactcagcttcacatattccatcatctaaaactgcatctctccctggctatggaagaaatgggcttcaccggcctgtttctaccgacttcgctcagtataacagctatggggatgtcagcgggggagtgcgagttgcagacactcccagatggccacatgcctgcaatgagaatggaccgaggagtgtctatgcccaacatgttggaaccaaagatatttccatatgaaatgctcatggtgaccaacagagggcgaaacaaaatcctcagagaggtggacagaaccaggctggagcgccacttagcccctgaagtgtttcgggaaatctttggaatgtccatacaggagtttgacaggttacctctttggagacgcaacgacatgaagaaaaaagcaaaactcttctaagtcccactcgtgaatggcaattagagaaaggactgacagtggcggtgccccataggatgtcatattgaggcccaaacttgattggagaatttgcaaactaccgtcgctcagcaacaccaaaaagagaaagtctggttaaaacaccatgagtcaaatgtcgggccagccaacagtaacacttgccaagaagcatggcgtagaaatttctatgttccgaaacacagagtagtgtccacatgtgagcttttcacattaccttatgtatacaacaggagctgcgttgttttcttctttttcttttcctttatctgttgtccaacaacagtgctgactgtccggataagagctggcaagtgcccttaggatgccgcatgggaaaaatcggttatcataatttcaaagtataaatatatttattaagtagcgctgcggctaagaaggaagagtgaggggtctgtccatggggtggcagtgatttcacacccgcctttcttgaatggcttcgtgttactcagccgtgccctggcaggaatggaactccatcagggaacagggcagctctgtttgaatggggtgaaaaacagcaaaattaattcttagcaagctccttgttctctactgttcaccgggacctggctggcaaatgacttagctattagtatatttaaaaactgttcaaaagcaaaagagaaggaacaggaatgaaaggaaaccttcccttaactctttctgcttcccatagcaggtctggttcctgctccccgcctaggacaggagctgtctggagctccacctttgcaaagaaaggaaaaacacaaattgcccccagattggcccagtggcatgccattaggtgattttgcataggggccatatcattcatggccaaaaaaaaccaaaaagcaaaaaacaaaaacaagtcccatgtcctactgactctagttcttccagtcgttatcctctgctgtctctctggcatcctatgaatcagatcaagcccatgctgttgttggtttttaaggtttctttcaataataggctaaggaaagacatgtttttctcttttaaatctctgcaactccaaagtagactccttcgaacgtatttaatttggccttttcagctttcttcttgcccagctctgtcgaattcatgggtgtgtgtgcacatgttggtttcactcacccagagtaattttgtgagcatgcatgtgctttttaatttctgcttgaatgtttgtcctgctgtgttgcagcttctaaagacattgtcaccgagtgtgtgtgactcaaagatcaagagtgaggctaaactgcgaccccaacatcacttccttcatggaaaggtgttggcgctgatgtagctcatggaaggatcagactgggaaccacagaggaaggatgaggtgggatgtggaggtcagagcatctcacgagagtccctcaggctctgcaacactagattcgaatatgagcctagggtttccccaacacgtgcgtgcatatgaaaccacatcatgattcccgacgtgagttagatgagggagagtttgtgtaactccacacccaggagggtaagccactttattatcatgctttggggctgtgcttaagaatttaagctctgttttaaagccgaagaagaaaacatttgaatttaccttcatatgccactaagaacaaaagctctgaagttcttcctgctggcaccaaatattaggattacaagctgtctctctgacaccagtggtaaaaaagcaagtagaatagtttctgagtctgtgttgcagcctctgacacgtggctcaccgctgtcatttgggggatggaatgaacagtcactgttctatagcatcctcctgtgctcttacctaaggaatctaaattgtcctagccttccattgctatgcactgaatgaggactactctcgtgtgtgtgtgtgtgtgtgtgtgtgtgtgtgtgtgtgtgtgtgtgtgtgttggatctactaacatgtttagcaaatggctctgacagggtggccatgagcagatgagaccagctcttgcttggttggaagccacactgcagtttgcagtttagcctttggtgtctcagtggcttcttgcttattccatgctttttctatcccatcctctctctgtgccctcctgcaatggcagccttggcacaatgcctgggtgtcctcatccttgctttactctggaaagtgtggggatggagaggatggtgcatttccagtgcttccttacctgtcaataacaatggtggccacctgggtcccagcacttggctggtggagagatttttttcattatggagctaataaagggtccctacgttttacattgattaatgaattatcacccagacatgtgcagatgaaatgtcaatataagaaaaatcaaggtatttgggaaacatgggcataatcaggtagttttgctaaaattcctcttccttggtctacataaagaagacatgggtctgtcatagaatggggacattagactgaaaactgggacaacccccttccttattttatagagactaggagttaaggggcctgcctaagattgcagtgataaagaactgaaccctaaatcagctcccactaatgaaaccctgctttccttgtatcttttaaactcagttctgcatccaacttgagaagaaaaaaagcttctttccatatcaagtaccatatgagttcatttaaactgcaccttgcagaaatgcattgccagaaagcaccagtagcctcctatctgcaagcagagtagtgctctgctctggggaggggtcattggaaaccataatgcagagtgggccccctactccatttcccagcaaaaggctccagctggagggatgggttgtggggcaacctggttcctgctaactgccagattgaatgtgtgggctagaatgcctgcacatttagttaaactgggctcagcatgcttgtcctcaaaatgtccatcctggtcacagcacacaagatggctattggtctgcttttaccctaccctgtactatacatgaaaattccagttattaacacactcaaactggtggagcttgttcaccctaggaaggggattgtatatatggcaggcttccctggtgccgatgtaaagggctacatttgggaacatttgacttccttgggactcttaagtgcataatgatggcatgaagtaaaaggggcctcaatgatgataggaaaatcagttcttttaaaatttcttcaagaaaatccaggctatcacatagtctttctgtgtgacttattaggagataggaagagcattgggaaacttgcacagctagctatgcatctacattttggtttggggttagttatgaaatgttcttaatatgacgtgttcaataacttcacataaacttcctgttctccaaaacctcaaagagatagagttaatgagttgttgtttttttttaaatgggggtagttttctatctgtcatgggctctagcatctactccgctacccaattctgtcatctccaagctgagtttcctcttctgaggcagaggctggagcagttctttttcagttctcatcctctccatcccaatccagtatatcaatcaactctaactcggagacgtctagctggcaatgtttctaaaactttcactggatttctttagacattgaagcaaacatttttttctaagaattgcttctcagatgatgatatcaaatgtatatgcttttgcaagtttgaaaagttcaaattaaccacttttgactaggtaagtctttctaaaaaccatttaaagctaactgggtcttagcatcctcctgtgtatggaagagacaggtgaccgctccaggttgggtgctcacagaacccttttcctgactctcatggaagatggtggaaggaaaatagactgtctcatcaaccctcctgtgtcctctgaagcaatctcagtttttattaaccacctcttctgtgtttctggtagctatttaacctgtatttaatctgtacttcctatgccagcctcaattttatttgatttttacaattattctcttctaaccaatgaagtgtttgtcagtatgccccaaagcttgctcttttgtgctcccttttgaataactttctatccagaaaaagagattatttgggacttgagatttgcagtgataccaacttatagcaatgatgtactttaagggaactacccaactatgttgtgatagaagaaagagaaaccttcactttggcatttttttttaatcactgtttatttttctgtttgcggcccaggaagcagtgggaggtggtggcagatatgctttgcatatggattgttatgtttttatttgggcaagtttaatcatggaaaactcaaaaagaaggggggaaatggtcagtttaagccaaaagaaactttctaaacaatgtataggtacacagcaaaattaaacaaatccaacaatttctgaagcttagtgtaattgagtggtggttgttattcaataaaattattcccaaaagtgtttctcctaagagtgcagttcccatgagtcacttcctgaacccattgaccaaaggtggacagagacaatcctgtagaccttgacattcagaaagatgtgagctgcttactgatcatatatgcatacgtttctttacagcagaggaaaccattgtccacaaaactgatgttcttttggggttttatgtacagacttgtccaatcatgtgtgtggttcctgcgagttgctgatgactccgcattgaagctctctgagttctttgattttaagttgggtttatggaattttttcaaatgttggaaggtgtgtggttcttcctgccctccctccccttttggaaatatgaaagcaaatgtttagaagaattccttttgaaaagctgtgtcgtgttccctgtgaaactgagcaggtgtgtgttggcgcgctaagtgccacatgcttgtgtgtagaggaggaggtggccctgccggctccgcgctgctgtgcctgtgatccctacctgctccccgctcctgttgccagcagcactcactgcactcctttgtcatatactctgcatcactgtcatactcacaacttcgtgaataaagttgtgtgctttattcgtaga

SEQ ID NO: 20501 - protein, 565 aa, Homo sapiens; identical to SEQ ID NO: 20495

SEQ ID NO: 20502 - DNA, 7586 bp, Homo sapiens
gagattaggacagtagaattttgcatttgttacagcagcagctgtagcgagtggtttcagccgcagggcagagtccccgagctgggcgcggctgcagctcggcgggcgggcggagaagagcgcgggggcgatagcggggcgggcatgggagcggggcccgccgaggcggggcgggactcgagaccacagccccggacctcacaagcggatgccggggcttctcctggctgccccagcgcccgcggatctgtctgccgaggcgcgcttccactcccagagtttattcctcgttccttcttcagtcctgctcgtcggaggacccggttgccatggtgaaggaaaaagtggcccaccctcaggaccctcaccacccatcagagaagcctgtcattcactgccataaatgtggggagccttgcaagggtgaagtgcttcgggtccagaccaaacatttccacatcaagtgtttcacctgcaaagtgtgtggctgtgacctggcacaagggggcttcttcataaagaacggagagtatctctgcaccctggactaccagcggatgtacgggacacgctgccatggctgtggggagttcgtggagggcgaagtggtgactgctctgggcaagacctaccatcccaattgctttgcttgtactatctgcaagcgcccgtttccacccggagaccgagtcacattcaatgggagagactgcctttgtcaactctgtgcacagccgatgtcgtccagtccgaaagaaaccaccttctccagcaattgtgccggctgcggaagagatatcaagaatgggcaggcgctgctggcgctggataagcagtggcacttggggtgctttaaatgcaagtcctgcgggaaggtcctcaccggggagtacatcagcaaggatggtgctccgtactgtgaaaaggactaccagggactctttggggtgaaatgtgaggcgtgtcaccagtttatcacagggaaagtcctggaggcaggtgacaaacattaccaccccagctgtgcacgatgcagcagatgcaaccagatgttcacagaaggagaggaaatgtatcttcaaggctccaccgtttggcatcccgactgtaagcaatctacgaagaccgaggaaaagctgcggcctaccaggacatcctcggaaagtatttattctaggccaggctccagtattcctggctcaccaggtcatactatctatgcaaaagtagacaatgagatcctggattacaaggatttagcagccattccgaaggtcaaggcaatttatgacattgaacgtccagatcttattacctatgagcctttctacacttcgggctatgatgacaaacaggagagacagagccttggagagtctccgaggactttgtctcctactccatcagcagaagggtaccaggatgttcgggatcggatgatccatcggtccacgagccagggctccatcaactcccctgtgtacagccgccacagctacactccaaccacgtcccgctctccccagcatttccacagacctggcaatgagccgtccagcggccggaactcccctctcccttaccggccagacagccgccctctaactccaacttacgctcaggcccctaaacatttccatgttccagatcaaggaatcaacatttaccgaaagccacccatctacaaacagcatgctgccttggcagcccagagcaagtcctcagaagatatcatcaagttttccaagttcccagcagcccaggcaccagaccccagcgagacaccaaagattgagacggaccactggcctggtcccccctcatttgctgtcgtaggacctgacatgaaacgcagatctagtggcagagaggaagatgatgaggaacttctgagacgtcggcagcttcaagaagagcaattaatgaagcttaactcaggcctgggacagttgatcttgaaagaagagatggagaaagagagccgggaaaggtcatctctgttagccagtcgctacgattctcccatcaactcagcttcacatattccatcatctaaaactgcatctctccctggctatggaagaaatgggcttcaccggcctgtttctaccgacttcgctcagtataacagctatggggatgtcagcgggggagtgcgagttgcagacactcccagatggccacatgcctgcaatgagaatggaccgaggagtgtctatgcccaacatgttggaaccaaagatatttccatatgaaatgctcatggtgaccaacagagggcgaaacaaaatcctcagagaggtggacagaaccaggctggagcgccacttagcccctgaagtgtttcgggaaatctttggaatgtccatacaggagtttgacaggttacctctttggagacgcaacgacatgaagaaaaaagcaaaactcttctaagtcccactcgtgaatggcaattagagaaaggactgacagtggcggtgccccataggatgtcatattgaggcccaaacttgattggagaatttgcaaactaccgtcgctcagcaacaccaaaaagagaaagtctggttaaaacaccatgagtcaaatgtcgggccagccaacagtaacacttgccaagaagcatggcgtagaaatttctatgttccgaaacacagagtagtgtccacatgtgagcttttcacattaccttatgtatacaacaggagctgcgttgttttcttctttttcttttcctttatctgttgtccaacaacagtgctgactgtccggataagagctggcaagtgcccttaggatgccgcatgggaaaaatcggttatcataatttcaaagtataaatatatttattaagtagcgctgcggctaagaaggaagagtgaggggtctgtccatggggtggcagtgatttcacacccgcctttcttgaatggcttcgtgttactcagccgtgccctggcaggaatggaactccatcagggaacagggcagctctgtttgaatggggtgaaaaacagcaaaattaattcttagcaagctccttgttctctactgttcaccgggacctggctggcaaatgacttagctattagtatatttaaaaactgttcaaaagcaaaagagaaggaacaggaatgaaaggaaaccttcccttaactctttctgcttcccatagcaggtctggttcctgctccccgcctaggacaggagctgtctggagctccacctttgcaaagaaaggaaaaacacaaattgcccccagattggcccagtggcatgccattaggtgattttgcataggggccatatcattcatggccaaaaaaaaccaaaaagcaaaaaacaaaaacaagtcccatgtcctactgactctagttcttccagtcgttatcctctgctgtctctctggcatcctatgaatcagatcaagcccatgctgttgttggtttttaaggtttctttcaataataggctaaggaaagacatgtttttctcttttaaatctctgcaactccaaagtagactccttcgaacgtatttaatttggccttttcagctttcttcttgcccagctctgtcgaattcatgggtgtgtgtgcacatgttggtttcactcacccagagtaattttgtgagcatgcatgtgctttttaatttctgcttgaatgtttgtcctgctgtgttgcagcttctaaagacattgtcaccgagtgtgtgtgactcaaagatcaagagtgaggctaaactgcgaccccaacatcacttccttcatggaaaggtgttggcgctgatgtagctcatggaaggatcagactgggaaccacagaggaaggatgaggtgggatgtggaggtcagagcatctcacgagagtccctcaggctctgcaacactagattcgaatatgagcctagggtttccccaacacgtgcgtgcatatgaaaccacatcatgattcccgacgtgagttagatgagggagagtttgtgtaactccacacccaggagggtaagccactttattatcatgctttggggctgtgcttaagaatttaagctctgttttaaagccgaagaagaaaacatttgaatttaccttcatatgccactaagaacaaaagctctgaagttcttcctgctggcaccaaatattaggattacaagctgtctctctgacaccagtggtaaaaaagcaagtagaatagtttctgagtctgtgttgcagcctctgacacgtggctcaccgctgtcatttgggggatggaatgaacagtcactgttctatagcatcctcctgtgctcttacctaaggaatctaaattgtcctagccttccattgctatgcactgaatgaggactactctcgtgtgtgtgtgtgtgtgtgtgtgtgtgtgtgtgtgtgtgtgtgtgtgtgttggatctactaacatgtttagcaaatggctctgacagggtggccatgagcagatgagaccagctcttgcttggttggaagccacactgcagtttgcagtttagcctttggtgtctcagtggcttcttgcttattccatgctttttctatcccatcctctctctgtgccctcctgcaatggcagccttggcacaatgcctgggtgtcctcatccttgctttactctggaaagtgtggggatggagaggatggtgcatttccagtgcttccttacctgtcaataacaatggtggccacctgggtcccagcacttggctggtggagagatttttttcattatggagctaataaagggtccctacgttttacattgattaatgaattatcacccagacatgtgcagatgaaatgtcaatataagaaaaatcaaggtatttgggaaacatgggcataatcaggtagttttgctaaaattcctcttccttggtctacataaagaagacatgggtctgtcatagaatggggacattagactgaaaactgggacaacccccttccttattttatagagactaggagttaaggggcctgcctaagattgcagtgataaagaactgaaccctaaatcagctcccactaatgaaaccctgctttccttgtatcttttaaactcagttctgcatccaacttgagaagaaaaaaagcttctttccatatcaagtaccatatgagttcatttaaactgcaccttgcagaaatgcattgccagaaagcaccagtagcctcctatctgcaagcagagtagtgctctgctctggggaggggtcattggaaaccataatgcagagtgggccccctactccatttcccagcaaaaggctccagctggagggatgggttgtggggcaacctggttcctgctaactgccagattgaatgtgtgggctagaatgcctgcacatttagttaaactgggctcagcatgcttgtcctcaaaatgtccatcctggtcacagcacacaagatggctattggtctgcttttaccctaccctgtactatacatgaaaattccagttattaacacactcaaactggtggagcttgttcaccctaggaaggggattgtatatatggcaggcttccctggtgccgatgtaaagggctacatttgggaacatttgacttccttgggactcttaagtgcataatgatggcatgaagtaaaaggggcctcaatgatgataggaaaatcagttcttttaaaatttcttcaagaaaatccaggctatcacatagtctttctgtgtgacttattaggagataggaagagcattgggaaacttgcacagctagctatgcatctacattttggtttggggttagttatgaaatgttcttaatatgacgtgttcaataacttcacataaacttcctgttctccaaaacctcaaagagatagagttaatgagttgttgtttttttttaaatgggggtagttttctatctgtcatgggctctagcatctactccgctacccaattctgtcatctccaagctgagtttcctcttctgaggcagaggctggagcagttctttttcagttctcatcctctccatcccaatccagtatatcaatcaactctaactcggagacgtctagctggcaatgtttctaaaactttcactggatttctttagacattgaagcaaacatttttttctaagaattgcttctcagatgatgatatcaaatgtatatgcttttgcaagtttgaaaagttcaaattaaccacttttgactaggtaagtctttctaaaaaccatttaaagctaactgggtcttagcatcctcctgtgtatggaagagacaggtgaccgctccaggttgggtgctcacagaacccttttcctgactctcatggaagatggtggaaggaaaatagactgtctcatcaaccctcctgtgtcctctgaagcaatctcagtttttattaaccacctcttctgtgtttctggtagctatttaacctgtatttaatctgtacttcctatgccagcctcaattttatttgatttttacaattattctcttctaaccaatgaagtgtttgtcagtatgccccaaagcttgctcttttgtgctcccttttgaataactttctatccagaaaaagagattatttgggacttgagatttgcagtgataccaacttatagcaatgatgtactttaagggaactacccaactatgttgtgatagaagaaagagaaaccttcactttggcatttttttttaatcactgtttatttttctgtttgcggcccaggaagcagtgggaggtggtggcagatatgctttgcatatggattgttatgtttttatttgggcaagtttaatcatggaaaactcaaaaagaaggggggaaatggtcagtttaagccaaaagaaactttctaaacaatgtataggtacacagcaaaattaaacaaatccaacaatttctgaagcttagtgtaattgagtggtggttgttattcaataaaattattcccaaaagtgtttctcctaagagtgcagttcccatgagtcacttcctgaacccattgaccaaaggtggacagagacaatcctgtagaccttgacattcagaaagatgtgagctgcttactgatcatatatgcatacgtttctttacagcagaggaaaccattgtccacaaaactgatgttcttttggggttttatgtacagacttgtccaatcatgtgtgtggttcctgcgagttgctgatgactccgcattgaagctctctgagttctttgattttaagttgggtttatggaattttttcaaatgttggaaggtgtgtggttcttcctgccctccctccccttttggaaatatgaaagcaaatgtttagaagaattccttttgaaaagctgtgtcgtgttccctgtgaaactgagcaggtgtgtgttggcgcgctaagtgccacatgcttgtgtgtagaggaggaggtggccctgccggctccgcgctgctgtgcctgtgatccctacctgctccccgctcctgttgccagcagcactcactgcactcctttgtcatatactctgcatcactgtcatactcacaacttcgtgaataaagttgtgtgctttattcgtaga

SEQ ID NO: 20503 - protein, 641 aa, Homo sapiens
MVKEKVAHPQDPHHPSEKPVIHCHKCGEPCKGEVLRVQTKHFHIKCFTCKVCGCDLAQGGFFIKNGEYLCTLDYQRMYGTRCHGCGEFVEGEVVTALGKTYHPNCFACTICKRPFPPGDRVTFNGRDCLCQLCAQPMSSSPKETTFSSNCAGCGRDIKNGQALLALDKQWHLGCFKCKSCGKVLTGEYISKDGAPYCEKDYQGLFGVKCEACHQFITGKVLEAGDKHYHPSCARCSRCNQMFTEGEEMYLQGSTVWHPDCKQSTKTEEKLRPTRTSSESIYSRPGSSIPGSPGHTIYAKVDNEILDYKDLAAIPKVKAIYDIERPDLITYEPFYTSGYDDKQERQSLGESPRTLSPTPSAEGYQDVRDRMIHRSTSQGSINSPVYSRHSYTPTTSRSPQHFHRPGNEPSSGRNSPLPYRPDSRPLTPTYAQAPKHFHVPDQGINIYRKPPIYKQHAALAAQSKSSEDIIKFSKFPAAQAPDPSETPKIETDHWPGPPSFAVVGPDMKRRSSGREEDDEELLRRRQLQEEQLMKLNSGLGQLILKEEMEKESRERSSLLASRYDSPINSASHIPSSKTASLPGYGRNGLHRPVSTDFAQYNSYGDVSGGVRVADTPRWPHACNENGPRSVYAQHVGTKDISI

SEQ ID NO: 20504 - DNA, 7599 bp, Homo sapiens
gggcagtgagaaaaggagacagtaaggagccaggggaacagagagaattgtggggcagcaccgctccttgggtccccactccccatttctcattgcttggaaatccatgccaagatgcctgccttccttggtctaaagtgtctggggaaattgtgcagctctgagaaaagcaaagtcacctcatctgagagaaccagtgccaggggctcgaacagaaagagactgattgttgaggaccggagggtctctgggacctccttcaccgctcataggcgtgccactatcactcatttgctgtatctctgtcccaaggactactgcccacgtgggcgtgtatgtaacagcgttgatccttttgtggcccaccctcaggaccctcaccacccatcagagaagcctgtcattcactgccataaatgtggggagccttgcaagggtgaagtgcttcgggtccagaccaaacatttccacatcaagtgtttcacctgcaaagtgtgtggctgtgacctggcacaagggggcttcttcataaagaacggagagtatctctgcaccctggactaccagcggatgtacgggacacgctgccatggctgtggggagttcgtggagggcgaagtggtgactgctctgggcaagacctaccatcccaattgctttgcttgtactatctgcaagcgcccgtttccacccggagaccgagtcacattcaatgggagagactgcctttgtcaactctgtgcacagccgatgtcgtccagtccgaaagaaaccaccttctccagcaattgtgccggctgcggaagagatatcaagaatgggcaggcgctgctggcgctggataagcagtggcacttggggtgctttaaatgcaagtcctgcgggaaggtcctcaccggggagtacatcagcaaggatggtgctccgtactgtgaaaaggactaccagggactctttggggtgaaatgtgaggcgtgtcaccagtttatcacagggaaagtcctggaggcaggtgacaaacattaccaccccagctgtgcacgatgcagcagatgcaaccagatgttcacagaaggagaggaaatgtatcttcaaggctccaccgtttggcatcccgactgtaagcaatctacgaagaccgaggaaaagctgcggcctaccaggacatcctcggaaagtatttattctaggccaggctccagtattcctggctcaccaggtcatactatctatgcaaaagtagacaatgagatcctggattacaaggatttagcagccattccgaaggtcaaggcaatttatgacattgaacgtccagatcttattacctatgagcctttctacacttcgggctatgatgacaaacaggagagacagagccttggagagtctccgaggactttgtctcctactccatcagcagaagggtaccaggatgttcgggatcggatgatccatcggtccacgagccagggctccatcaactcccctgtgtacagccgccacagctacactccaaccacgtcccgctctccccagcatttccacagacctggcaatgagccgtccagcggccggaactcccctctcccttaccggccagacagccgccctctaactccaacttacgctcaggcccctaaacatttccatgttccagatcaaggaatcaacatttaccgaaagccacccatctacaaacagcatgctgccttggcagcccagagcaagtcctcagaagatatcatcaagttttccaagttcccagcagcccaggcaccagaccccagcgagacaccaaagattgagacggaccactggcctggtcccccctcatttgctgtcgtaggacctgacatgaaacgcagatctagtggcagagaggaagatgatgaggaacttctgagacgtcggcagcttcaagaagagcaattaatgaagcttaactcaggcctgggacagttgatcttgaaagaagagatggagaaagagagccgggaaaggtcatctctgttagccagtcgctacgattctcccatcaactcagcttcacatattccatcatctaaaactgcatctctccctggctatggaagaaatgggcttcaccggcctgtttctaccgacttcgctcagtataacagctatggggatgtcagcgggggagtgcgagttgcagacactcccagatggccacatgcctgcaatgagaatggaccgaggagtgtctatgcccaacatgttggaaccaaagatatttccatatgaaatgctcatggtgaccaacagagggcgaaacaaaatcctcagagaggtggacagaaccaggctggagcgccacttagcccctgaagtgtttcgggaaatctttggaatgtccatacaggagtttgacaggttacctctttggagacgcaacgacatgaagaaaaaagcaaaactcttctaagtcccactcgtgaatggcaattagagaaaggactgacagtggcggtgccccataggatgtcatattgaggcccaaacttgattggagaatttgcaaactaccgtcgctcagcaacaccaaaaagagaaagtctggttaaaacaccatgagtcaaatgtcgggccagccaacagtaacacttgccaagaagcatggcgtagaaatttctatgttccgaaacacagagtagtgtccacatgtgagcttttcacattaccttatgtatacaacaggagctgcgttgttttcttctttttcttttcctttatctgttgtccaacaacagtgctgactgtccggataagagctggcaagtgcccttaggatgccgcatgggaaaaatcggttatcataatttcaaagtataaatatatttattaagtagcgctgcggctaagaaggaagagtgaggggtctgtccatggggtggcagtgatttcacacccgcctttcttgaatggcttcgtgttactcagccgtgccctggcaggaatggaactccatcagggaacagggcagctctgtttgaatggggtgaaaaacagcaaaattaattcttagcaagctccttgttctctactgttcaccgggacctggctggcaaatgacttagctattagtatatttaaaaactgttcaaaagcaaaagagaaggaacaggaatgaaaggaaaccttcccttaactctttctgcttcccatagcaggtctggttcctgctccccgcctaggacaggagctgtctggagctccacctttgcaaagaaaggaaaaacacaaattgcccccagattggcccagtggcatgccattaggtgattttgcataggggccatatcattcatggccaaaaaaaaccaaaaagcaaaaaacaaaaacaagtcccatgtcctactgactctagttcttccagtcgttatcctctgctgtctctctggcatcctatgaatcagatcaagcccatgctgttgttggtttttaaggtttctttcaataataggctaaggaaagacatgtttttctcttttaaatctctgcaactccaaagtagactccttcgaacgtatttaatttggccttttcagctttcttcttgcccagctctgtcgaattcatgggtgtgtgtgcacatgttggtttcactcacccagagtaattttgtgagcatgcatgtgctttttaatttctgcttgaatgtttgtcctgctgtgttgcagcttctaaagacattgtcaccgagtgtgtgtgactcaaagatcaagagtgaggctaaactgcgaccccaacatcacttccttcatggaaaggtgttggcgctgatgtagctcatggaaggatcagactgggaaccacagaggaaggatgaggtgggatgtggaggtcagagcatctcacgagagtccctcaggctctgcaacactagattcgaatatgagcctagggtttccccaacacgtgcgtgcatatgaaaccacatcatgattcccgacgtgagttagatgagggagagtttgtgtaactccacacccaggagggtaagccactttattatcatgctttggggctgtgcttaagaatttaagctctgttttaaagccgaagaagaaaacatttgaatttaccttcatatgccactaagaacaaaagctctgaagttcttcctgctggcaccaaatattaggattacaagctgtctctctgacaccagtggtaaaaaagcaagtagaatagtttctgagtctgtgttgcagcctctgacacgtggctcaccgctgtcatttgggggatggaatgaacagtcactgttctatagcatcctcctgtgctcttacctaaggaatctaaattgtcctagccttccattgctatgcactgaatgaggactactctcgtgtgtgtgtgtgtgtgtgtgtgtgtgtgtgtgtgtgtgtgtgtgtgtgttggatctactaacatgtttagcaaatggctctgacagggtggccatgagcagatgagaccagctcttgcttggttggaagccacactgcagtttgcagtttagcctttggtgtctcagtggcttcttgcttattccatgctttttctatcccatcctctctctgtgccctcctgcaatggcagccttggcacaatgcctgggtgtcctcatccttgctttactctggaaagtgtggggatggagaggatggtgcatttccagtgcttccttacctgtcaataacaatggtggccacctgggtcccagcacttggctggtggagagatttttttcattatggagctaataaagggtccctacgttttacattgattaatgaattatcacccagacatgtgcagatgaaatgtcaatataagaaaaatcaaggtatttgggaaacatgggcataatcaggtagttttgctaaaattcctcttccttggtctacataaagaagacatgggtctgtcatagaatggggacattagactgaaaactgggacaacccccttccttattttatagagactaggagttaaggggcctgcctaagattgcagtgataaagaactgaaccctaaatcagctcccactaatgaaaccctgctttccttgtatcttttaaactcagttctgcatccaacttgagaagaaaaaaagcttctttccatatcaagtaccatatgagttcatttaaactgcaccttgcagaaatgcattgccagaaagcaccagtagcctcctatctgcaagcagagtagtgctctgctctggggaggggtcattggaaaccataatgcagagtgggccccctactccatttcccagcaaaaggctccagctggagggatgggttgtggggcaacctggttcctgctaactgccagattgaatgtgtgggctagaatgcctgcacatttagttaaactgggctcagcatgcttgtcctcaaaatgtccatcctggtcacagcacacaagatggctattggtctgcttttaccctaccctgtactatacatgaaaattccagttattaacacactcaaactggtggagcttgttcaccctaggaaggggattgtatatatggcaggcttccctggtgccgatgtaaagggctacatttgggaacatttgacttccttgggactcttaagtgcataatgatggcatgaagtaaaaggggcctcaatgatgataggaaaatcagttcttttaaaatttcttcaagaaaatccaggctatcacatagtctttctgtgtgacttattaggagataggaagagcattgggaaacttgcacagctagctatgcatctacattttggtttggggttagttatgaaatgttcttaatatgacgtgttcaataacttcacataaacttcctgttctccaaaacctcaaagagatagagttaatgagttgttgtttttttttaaatgggggtagttttctatctgtcatgggctctagcatctactccgctacccaattctgtcatctccaagctgagtttcctcttctgaggcagaggctggagcagttctttttcagttctcatcctctccatcccaatccagtatatcaatcaactctaactcggagacgtctagctggcaatgtttctaaaactttcactggatttctttagacattgaagcaaacatttttttctaagaattgcttctcagatgatgatatcaaatgtatatgcttttgcaagtttgaaaagttcaaattaaccacttttgactaggtaagtctttctaaaaaccatttaaagctaactgggtcttagcatcctcctgtgtatggaagagacaggtgaccgctccaggttgggtgctcacagaacccttttcctgactctcatggaagatggtggaaggaaaatagactgtctcatcaaccctcctgtgtcctctgaagcaatctcagtttttattaaccacctcttctgtgtttctggtagctatttaacctgtatttaatctgtacttcctatgccagcctcaattttatttgatttttacaattattctcttctaaccaatgaagtgtttgtcagtatgccccaaagcttgctcttttgtgctcccttttgaataactttctatccagaaaaagagattatttgggacttgagatttgcagtgataccaacttatagcaatgatgtactttaagggaactacccaactatgttgtgatagaagaaagagaaaccttcactttggcatttttttttaatcactgtttatttttctgtttgcggcccaggaagcagtgggaggtggtggcagatatgctttgcatatggattgttatgtttttatttgggcaagtttaatcatggaaaactcaaaaagaaggggggaaatggtcagtttaagccaaaagaaactttctaaacaatgtataggtacacagcaaaattaaacaaatccaacaatttctgaagcttagtgtaattgagtggtggttgttattcaataaaattattcccaaaagtgtttctcctaagagtgcagttcccatgagtcacttcctgaacccattgaccaaaggtggacagagacaatcctgtagaccttgacattcagaaagatgtgagctgcttactgatcatatatgcatacgtttctttacagcagaggaaaccattgtccacaaaactgatgttcttttggggttttatgtacagacttgtccaatcatgtgtgtggttcctgcgagttgctgatgactccgcattgaagctctctgagttctttgattttaagttgggtttatggaattttttcaaatgttggaaggtgtgtggttcttcctgccctccctccccttttggaaatatgaaagcaaatgtttagaagaattccttttgaaaagctgtgtcgtgttccctgtgaaactgagcaggtgtgtgttggcgcgctaagtgccacatgcttgtgtgtagaggaggaggtggccctgccggctccgcgctgctgtgcctgtgatccctacctgctccccgctcctgttgccagcagcactcactgcactcctttgtcatatactctgcatcactgtcatactcacaacttcgtgaataaagttgtgtgctttattcgtaga

SEQ ID NO: 20505 - protein, 717 aa, Homo sapiens [sequence omitted]

SEQ ID NO: 20506 - DNA, 7607 bp, Homo sapiens
gtcattgagctgatgtgcttttgcaaggggtctctttagaagtggtaggggcagggtcgagagaagaaggggatgcagaatctgtacatgaggaaggagccagagtcactcaggaaactcctcattcttcctgcgctggctgtggcacacccaccggtggcacacccctccctcgggtccagttcagcccacagactcctgggaggagagccagggccccagcctctcctttgaggagtgttgcagcctttctgtgtgccagatgcctagtgaagaaaagctgaaaccctggagctttgtgcatgttaatgaccttggaaatgactgagctcacggaccctcatcacaccatgggagactacaaagtggcccaccctcaggaccctcaccacccatcagagaagcctgtcattcactgccataaatgtggggagccttgcaagggtgaagtgcttcgggtccagaccaaacatttccacatcaagtgtttcacctgcaaagtgtgtggctgtgacctggcacaagggggcttcttcataaagaacggagagtatctctgcaccctggactaccagcggatgtacgggacacgctgccatggctgtggggagttcgtggagggcgaagtggtgactgctctgggcaagacctaccatcccaattgctttgcttgtactatctgcaagcgcccgtttccacccggagaccgagtcacattcaatgggagagactgcctttgtcaactctgtgcacagccgatgtcgtccagtccgaaagaaaccaccttctccagcaattgtgccggctgcggaagagatatcaagaatgggcaggcgctgctggcgctggataagcagtggcacttggggtgctttaaatgcaagtcctgcgggaaggtcctcaccggggagtacatcagcaaggatggtgctccgtactgtgaaaaggactaccagggactctttggggtgaaatgtgaggcgtgtcaccagtttatcacagggaaagtcctggaggcaggtgacaaacattaccaccccagctgtgcacgatgcagcagatgcaaccagatgttcacagaaggagaggaaatgtatcttcaaggctccaccgtttggcatcccgactgtaagcaatctacgaagaccgaggaaaagctgcggcctaccaggacatcctcggaaagtatttattctaggccaggctccagtattcctggctcaccaggtcatactatctatgcaaaagtagacaatgagatcctggattacaaggatttagcagccattccgaaggtcaaggcaatttatgacattgaacgtccagatcttattacctatgagcctttctacacttcgggctatgatgacaaacaggagagacagagccttggagagtctccgaggactttgtctcctactccatcagcagaagggtaccaggatgttcgggatcggatgatccatcggtccacgagccagggctccatcaactcccctgtgtacagccgccacagctacactccaaccacgtcccgctctccccagcatttccacagacctggcaatgagccgtccagcggccggaactcccctctcccttaccggccagacagccgccctctaactccaacttacgctcaggcccctaaacatttccatgttccagatcaaggaatcaacatttaccgaaagccacccatctacaaacagcatgctgccttggcagcccagagcaagtcctcagaagatatcatcaagttttccaagttcccagcagcccaggcaccagaccccagcgagacaccaaagattgagacggaccactggcctggtcccccctcatttgctgtcgtaggacctgacatgaaacgcagatctagtggcagagaggaagatgatgaggaacttctgagacgtcggcagcttcaagaagagcaattaatgaagcttaactcaggcctgggacagttgatcttgaaagaagagatggagaaagagagccgggaaaggtcatctctgttagccagtcgctacgattctcccatcaactcagcttcacatattccatcatctaaaactgcatctctccctggctatggaagaaatgggcttcaccggcctgtttctaccgacttcgctcagtataacagctatggggatgtcagcgggggagtgcgagttgcagacactcccagatggccacatgcctgcaatgagaatggaccgaggagtgtctatgcccaacatgttggaaccaaagatatttccatatgaaatgctcatggtgaccaacagagggcgaaacaaaatcctcagagaggtggacagaaccaggctggagcgccacttagcccctgaagtgtttcgggaaatctttggaatgtccatacaggagtttgacaggttacctctttggagacgcaacgacatgaagaaaaaagcaaaactcttctaagtcccactcgtgaatggcaattagagaaaggactgacagtggcggtgccccataggatgtcatattgaggcccaaacttgattggagaatttgcaaactaccgtcgctcagcaacaccaaaaagagaaagtctggttaaaacaccatgagtcaaatgtcgggccagccaacagtaacacttgccaagaagcatggcgtagaaatttctatgttccgaaacacagagtagtgtccacatgtgagcttttcacattaccttatgtatacaacaggagctgcgttgttttcttctttttcttttcctttatctgttgtccaacaacagtgctgactgtccggataagagctggcaagtgcccttaggatgccgcatgggaaaaatcggttatcataatttcaaagtataaatatatttattaagtagcgctgcggctaagaaggaagagtgaggggtctgtccatggggtggcagtgatttcacacccgcctttcttgaatggcttcgtgttactcagccgtgccctggcaggaatggaactccatcagggaacagggcagctctgtttgaatggggtgaaaaacagcaaaattaattcttagcaagctccttgttctctactgttcaccgggacctggctggcaaatgacttagctattagtatatttaaaaactgttcaaaagcaaaagagaaggaacaggaatgaaaggaaaccttcccttaactctttctgcttcccatagcaggtctggttcctgctccccgcctaggacaggagctgtctggagctccacctttgcaaagaaaggaaaaacacaaattgcccccagattggcccagtggcatgccattaggtgattttgcataggggccatatcattcatggccaaaaaaaaccaaaaagcaaaaaacaaaaacaagtcccatgtcctactgactctagttcttccagtcgttatcctctgctgtctctctggcatcctatgaatcagatcaagcccatgctgttgttggtttttaaggtttctttcaataataggctaaggaaagacatgtttttctcttttaaatctctgcaactccaaagtagactccttcgaacgtatttaatttggccttttcagctttcttcttgcccagctctgtcgaattcatgggtgtgtgtgcacatgttggtttcactcacccagagtaattttgtgagcatgcatgtgctttttaatttctgcttgaatgtttgtcctgctgtgttgcagcttctaaagacattgtcaccgagtgtgtgtgactcaaagatcaagagtgaggctaaactgcgaccccaacatcacttccttcatggaaaggtgttggcgctgatgtagctcatggaaggatcagactgggaaccacagaggaaggatgaggtgggatgtggaggtcagagcatctcacgagagtccctcaggctctgcaacactagattcgaatatgagcctagggtttccccaacacgtgcgtgcatatgaaaccacatcatgattcccgacgtgagttagatgagggagagtttgtgtaactccacacccaggagggtaagccactttattatcatgctttggggctgtgcttaagaatttaagctctgttttaaagccgaagaagaaaacatttgaatttaccttcatatgccactaagaacaaaagctctgaagttcttcctgctggcaccaaatattaggattacaagctgtctctctgacaccagtggtaaaaaagcaagtagaatagtttctgagtctgtgttgcagcctctgacacgtggctcaccgctgtcatttgggggatggaatgaacagtcactgttctatagcatcctcctgtgctcttacctaaggaatctaaattgtcctagccttccattgctatgcactgaatgaggactactctcgtgtgtgtgtgtgtgtgtgtgtgtgtgtgtgtgtgtgtgtgtgtgtgtgttggatctactaacatgtttagcaaatggctctgacagggtggccatgagcagatgagaccagctcttgcttggttggaagccacactgcagtttgcagtttagcctttggtgtctcagtggcttcttgcttattccatgctttttctatcccatcctctctctgtgccctcctgcaatggcagccttggcacaatgcctgggtgtcctcatccttgctttactctggaaagtgtggggatggagaggatggtgcatttccagtgcttccttacctgtcaataacaatggtggccacctgggtcccagcacttggctggtggagagatttttttcattatggagctaataaagggtccctacgttttacattgattaatgaattatcacccagacatgtgcagatgaaatgtcaatataagaaaaatcaaggtatttgggaaacatgggcataatcaggtagttttgctaaaattcctcttccttggtctacataaagaagacatgggtctgtcatagaatggggacattagactgaaaactgggacaacccccttccttattttatagagactaggagttaaggggcctgcctaagattgcagtgataaagaactgaaccctaaatcagctcccactaatgaaaccctgctttccttgtatcttttaaactcagttctgcatccaacttgagaagaaaaaaagcttctttccatatcaagtaccatatgagttcatttaaactgcaccttgcagaaatgcattgccagaaagcaccagtagcctcctatctgcaagcagagtagtgctctgctctggggaggggtcattggaaaccataatgcagagtgggccccctactccatttcccagcaaaaggctccagctggagggatgggttgtggggcaacctggttcctgctaactgccagattgaatgtgtgggctagaatgcctgcacatttagttaaactgggctcagcatgcttgtcctcaaaatgtccatcctggtcacagcacacaagatggctattggtctgcttttaccctaccctgtactatacatgaaaattccagttattaacacactcaaactggtggagcttgttcaccctaggaaggggattgtatatatggcaggcttccctggtgccgatgtaaagggctacatttgggaacatttgacttccttgggactcttaagtgcataatgatggcatgaagtaaaaggggcctcaatgatgataggaaaatcagttcttttaaaatttcttcaagaaaatccaggctatcacatagtctttctgtgtgacttattaggagataggaagagcattgggaaacttgcacagctagctatgcatctacattttggtttggggttagttatgaaatgttcttaatatgacgtgttcaataacttcacataaacttcctgttctccaaaacctcaaagagatagagttaatgagttgttgtttttttttaaatgggggtagttttctatctgtcatgggctctagcatctactccgctacccaattctgtcatctccaagctgagtttcctcttctgaggcagaggctggagcagttctttttcagttctcatcctctccatcccaatccagtatatcaatcaactctaactcggagacgtctagctggcaatgtttctaaaactttcactggatttctttagacattgaagcaaacatttttttctaagaattgcttctcagatgatgatatcaaatgtatatgcttttgcaagtttgaaaagttcaaattaaccacttttgactaggtaagtctttctaaaaaccatttaaagctaactgggtcttagcatcctcctgtgtatggaagagacaggtgaccgctccaggttgggtgctcacagaacccttttcctgactctcatggaagatggtggaaggaaaatagactgtctcatcaaccctcctgtgtcctctgaagcaatctcagtttttattaaccacctcttctgtgtttctggtagctatttaacctgtatttaatctgtacttcctatgccagcctcaattttatttgatttttacaattattctcttctaaccaatgaagtgtttgtcagtatgccccaaagcttgctcttttgtgctcccttttgaataactttctatccagaaaaagagattatttgggacttgagatttgcagtgataccaacttatagcaatgatgtactttaagggaactacccaactatgttgtgatagaagaaagagaaaccttcactttggcatttttttttaatcactgtttatttttctgtttgcggcccaggaagcagtgggaggtggtggcagatatgctttgcatatggattgttatgtttttatttgggcaagtttaatcatggaaaactcaaaaagaaggggggaaatggtcagtttaagccaaaagaaactttctaaacaatgtataggtacacagcaaaattaaacaaatccaacaatttctgaagcttagtgtaattgagtggtggttgttattcaataaaattattcccaaaagtgtttctcctaagagtgcagttcccatgagtcacttcctgaacccattgaccaaaggtggacagagacaatcctgtagaccttgacattcagaaagatgtgagctgcttactgatcatatatgcatacgtttctttacagcagaggaaaccattgtccacaaaactgatgttcttttggggttttatgtacagacttgtccaatcatgtgtgtggttcctgcgagttgctgatgactccgcattgaagctctctgagttctttgattttaagttgggtttatggaattttttcaaatgttggaaggtgtgtggttcttcctgccctccctccccttttggaaatatgaaagcaaatgtttagaagaattccttttgaaaagctgtgtcgtgttccctgtgaaactgagcaggtgtgtgttggcgcgctaagtgccacatgcttgtgtgtagaggaggaggtggccctgccggctccgcgctgctgtgcctgtgatccctacctgctccccgctcctgttgccagcagcactcactgcactcctttgtcatatactctgcatcactgtcatactcacaacttcgtgaataaagttgtgtgctttattcgtaga

SEQ ID NO: 20507 - protein, 657 aa, Homo sapiens
MLMTLEMTELTDPHHTMGDYKVAHPQDPHHPSEKPVIHCHKCGEPCKGEVLRVQTKHFHIKCFTCKVCGCDLAQGGFFIKNGEYLCTLDYQRMYGTRCHGCGEFVEGEVVTALGKTYHPNCFACTICKRPFPPGDRVTFNGRDCLCQLCAQPMSSSPKETTFSSNCAGCGRDIKNGQALLALDKQWHLGCFKCKSCGKVLTGEYISKDGAPYCEKDYQGLFGVKCEACHQFITGKVLEAGDKHYHPSCARCSRCNQMFTEGEEMYLQGSTVWHPDCKQSTKTEEKLRPTRTSSESIYSRPGSSIPGSPGHTIYAKVDNEILDYKDLAAIPKVKAIYDIERPDLITYEPFYTSGYDDKQERQSLGESPRTLSPTPSAEGYQDVRDRMIHRSTSQGSINSPVYSRHSYTPTTSRSPQHFHRPGNEPSSGRNSPLPYRPDSRPLTPTYAQAPKHFHVPDQGINIYRKPPIYKQHAALAAQSKSSEDIIKFSKFPAAQAPDPSETPKIETDHWPGPPSFAVVGPDMKRRSSGREEDDEELLRRRQLQEEQLMKLNSGLGQLILKEEMEKESRERSSLLASRYDSPINSASHIPSSKTASLPGYGRNGLHRPVSTDFAQYNSYGDVSGGVRVADTPRWPHACNENGPRSVYAQHVGTKDISI

SEQ ID NO: 20508 - DNA, 8039 bp, Homo sapiens
ataccaggagtttgtcagggaactgtttccaaagccataatgaataatcaggctgttagtaaaagaagcctctccaagttatagcattttttaaaaattctagtagtgaagaaaataattaaaagcccatctggttgagatagtaattcattaaggaaaaagaggaggcagaaggctggggaataatcgatccttttctttctttatttcatgtgtttcagttattgtgaaatgatagtgatcaaaatctggattctggattgtgcagaatgcaggaaaatcctaggaacattcttggcgtgttctaatagtggcttcccagaaacgagtgttttcagtgggtgtggcgtcattgagctgatgtgcttttgcaaggggtctctttagaagtggtaggggcagggtcgagagaagaaggggatgcagaatctgtacatgaggaaggagccagagtcactcaggaaactcctcattcttcctgcgctggctgtggcacacccaccggtggcacacccctccctcgggtccagttcagcccacagactcctgggaggagagccagggccccagcctctcctttgaggagtgttgcagcctttctgtgtgccagatgcctagtgaagaaaagctgaaaccctggagctttgtgcatgttaatgaccttggaaatgactgagctcacggaccctcatcacaccatgggagactacaaagtggcccaccctcaggaccctcaccacccatcagagaagcctgtcattcactgccataaatgtggggagccttgcaagggtgaagtgcttcgggtccagaccaaacatttccacatcaagtgtttcacctgcaaagtgtgtggctgtgacctggcacaagggggcttcttcataaagaacggagagtatctctgcaccctggactaccagcggatgtacgggacacgctgccatggctgtggggagttcgtggagggcgaagtggtgactgctctgggcaagacctaccatcccaattgctttgcttgtactatctgcaagcgcccgtttccacccggagaccgagtcacattcaatgggagagactgcctttgtcaactctgtgcacagccgatgtcgtccagtccgaaagaaaccaccttctccagcaattgtgccggctgcggaagagatatcaagaatgggcaggcgctgctggcgctggataagcagtggcacttggggtgctttaaatgcaagtcctgcgggaaggtcctcaccggggagtacatcagcaaggatggtgctccgtactgtgaaaaggactaccagggactctttggggtgaaatgtgaggcgtgtcaccagtttatcacagggaaagtcctggaggcaggtgacaaacattaccaccccagctgtgcacgatgcagcagatgcaaccagatgttcacagaaggagaggaaatgtatcttcaaggctccaccgtttggcatcccgactgtaagcaatctacgaagaccgaggaaaagctgcggctgccaaacattcggcgttcttcatccgatttcttttattccaaaagtctgattcgacgcacaggacggtctccgtctctgcagcctaccaggacatcctcggaaagtatttattctaggccaggctccagtattcctggctcaccaggtcatactatctatgcaaaagtagacaatgagatcctggattacaaggatttagcagccattccgaaggtcaaggcaatttatgacattgaacgtccagatcttattacctatgagcctttctacacttcgggctatgatgacaaacaggagagacagagccttggagagtctccgaggactttgtctcctactccatcagcagaagggtaccaggatgttcgggatcggatgatccatcggtccacgagccagggctccatcaactcccctgtgtacagccgccacagctacactccaaccacgtcccgctctccccagcatttccacagacctggcaatgagccgtccagcggccggaactcccctctcccttaccggccagacagccgccctctaactccaacttacgctcaggcccctaaacatttccatgttccagatcaaggaatcaacatttaccgaaagccacccatctacaaacagcatgctgccttggcagcccagagcaagtcctcagaagatatcatcaagttttccaagttcccagcagcccaggcaccagaccccagcgagacaccaaagattgagacggaccactggcctggtcccccctcatttgctgtcgtaggacctgacatgaaacgcagatctagtggcagagaggaagatgatgaggaacttctgagacgtcggcagcttcaagaagagcaattaatgaagcttaactcaggcctgggacagttgatcttgaaagaagagatggagaaagagagccgggaaaggtcatctctgttagccagtcgctacgattctcccatcaactcagcttcacatattccatcatctaaaactgcatctctccctggctatggaagaaatgggcttcaccggcctgtttctaccgacttcgctcagtataacagctatggggatgtcagcgggggagtgcgagttgcagacactcccagatggccacatgcctgcaatgagaatggaccgaggagtgtctatgcccaacatgttggaaccaaagatatttccatatgaaatgctcatggtgaccaacagagggcgaaacaaaatcctcagagaggtggacagaaccaggctggagcgccacttagcccctgaagtgtttcgggaaatctttggaatgtccatacaggagtttgacaggttacctctttggagacgcaacgacatgaagaaaaaagcaaaactcttctaagtcccactcgtgaatggcaattagagaaaggactgacagtggcggtgccccataggatgtcatattgaggcccaaacttgattggagaatttgcaaactaccgtcgctcagcaacaccaaaaagagaaagtctggttaaaacaccatgagtcaaatgtcgggccagccaacagtaacacttgccaagaagcatggcgtagaaatttctatgttccgaaacacagagtagtgtccacatgtgagcttttcacattaccttatgtatacaacaggagctgcgttgttttcttctttttcttttcctttatctgttgtccaacaacagtgctgactgtccggataagagctggcaagtgcccttaggatgccgcatgggaaaaatcggttatcataatttcaaagtataaatatatttattaagtagcgctgcggctaagaaggaagagtgaggggtctgtccatggggtggcagtgatttcacacccgcctttcttgaatggcttcgtgttactcagccgtgccctggcaggaatggaactccatcagggaacagggcagctctgtttgaatggggtgaaaaacagcaaaattaattcttagcaagctccttgttctctactgttcaccgggacctggctggcaaatgacttagctattagtatatttaaaaactgttcaaaagcaaaagagaaggaacaggaatgaaaggaaaccttcccttaactctttctgcttcccatagcaggtctggttcctgctccccgcctaggacaggagctgtctggagctccacctttgcaaagaaaggaaaaacacaaattgcccccagattggcccagtggcatgccattaggtgattttgcataggggccatatcattcatggccaaaaaaaaccaaaaagcaaaaaacaaaaacaagtcccatgtcctactgactctagttcttccagtcgttatcctctgctgtctctctggcatcctatgaatcagatcaagcccatgctgttgttggtttttaaggtttctttcaataataggctaaggaaagacatgtttttctcttttaaatctctgcaactccaaagtagactccttcgaacgtatttaatttggccttttcagctttcttcttgcccagctctgtcgaattcatgggtgtgtgtgcacatgttggtttcactcacccagagtaattttgtgagcatgcatgtgctttttaatttctgcttgaatgtttgtcctgctgtgttgcagcttctaaagacattgtcaccgagtgtgtgtgactcaaagatcaagagtgaggctaaactgcgaccccaacatcacttccttcatggaaaggtgttggcgctgatgtagctcatggaaggatcagactgggaaccacagaggaaggatgaggtgggatgtggaggtcagagcatctcacgagagtccctcaggctctgcaacactagattcgaatatgagcctagggtttccccaacacgtgcgtgcatatgaaaccacatcatgattcccgacgtgagttagatgagggagagtttgtgtaactccacacccaggagggtaagccactttattatcatgctttggggctgtgcttaagaatttaagctctgttttaaagccgaagaagaaaacatttgaatttaccttcatatgccactaagaacaaaagctctgaagttcttcctgctggcaccaaatattaggattacaagctgtctctctgacaccagtggtaaaaaagcaagtagaatagtttctgagtctgtgttgcagcctctgacacgtggctcaccgctgtcatttgggggatggaatgaacagtcactgttctatagcatcctcctgtgctcttacctaaggaatctaaattgtcctagccttccattgctatgcactgaatgaggactactctcgtgtgtgtgtgtgtgtgtgtgtgtgtgtgtgtgtgtgtgtgtgtgtgtgttggatctactaacatgtttagcaaatggctctgacagggtggccatgagcagatgagaccagctcttgcttggttggaagccacactgcagtttgcagtttagcctttggtgtctcagtggcttcttgcttattccatgctttttctatcccatcctctctctgtgccctcctgcaatggcagccttggcacaatgcctgggtgtcctcatccttgctttactctggaaagtgtggggatggagaggatggtgcatttccagtgcttccttacctgtcaataacaatggtggccacctgggtcccagcacttggctggtggagagatttttttcattatggagctaataaagggtccctacgttttacattgattaatgaattatcacccagacatgtgcagatgaaatgtcaatataagaaaaatcaaggtatttgggaaacatgggcataatcaggtagttttgctaaaattcctcttccttggtctacataaagaagacatgggtctgtcatagaatggggacattagactgaaaactgggacaacccccttccttattttatagagactaggagttaaggggcctgcctaagattgcagtgataaagaactgaaccctaaatcagctcccactaatgaaaccctgctttccttgtatcttttaaactcagttctgcatccaacttgagaagaaaaaaagcttctttccatatcaagtaccatatgagttcatttaaactgcaccttgcagaaatgcattgccagaaagcaccagtagcctcctatctgcaagcagagtagtgctctgctctggggaggggtcattggaaaccataatgcagagtgggccccctactccatttcccagcaaaaggctccagctggagggatgggttgtggggcaacctggttcctgctaactgccagattgaatgtgtgggctagaatgcctgcacatttagttaaactgggctcagcatgcttgtcctcaaaatgtccatcctggtcacagcacacaagatggctattggtctgcttttaccctaccctgtactatacatgaaaattccagttattaacacactcaaactggtggagcttgttcaccctaggaaggggattgtatatatggcaggcttccctggtgccgatgtaaagggctacatttgggaacatttgacttccttgggactcttaagtgcataatgatggcatgaagtaaaaggggcctcaatgatgataggaaaatcagttcttttaaaatttcttcaagaaaatccaggctatcacatagtctttctgtgtgacttattaggagataggaagagcattgggaaacttgcacagctagctatgcatctacattttggtttggggttagttatgaaatgttcttaatatgacgtgttcaataacttcacataaacttcctgttctccaaaacctcaaagagatagagttaatgagttgttgtttttttttaaatgggggtagttttctatctgtcatgggctctagcatctactccgctacccaattctgtcatctccaagctgagtttcctcttctgaggcagaggctggagcagttctttttcagttctcatcctctccatcccaatccagtatatcaatcaactctaactcggagacgtctagctggcaatgtttctaaaactttcactggatttctttagacattgaagcaaacatttttttctaagaattgcttctcagatgatgatatcaaatgtatatgcttttgcaagtttgaaaagttcaaattaaccacttttgactaggtaagtctttctaaaaaccatttaaagctaactgggtcttagcatcctcctgtgtatggaagagacaggtgaccgctccaggttgggtgctcacagaacccttttcctgactctcatggaagatggtggaaggaaaatagactgtctcatcaaccctcctgtgtcctctgaagcaatctcagtttttattaaccacctcttctgtgtttctggtagctatttaacctgtatttaatctgtacttcctatgccagcctcaattttatttgatttttacaattattctcttctaaccaatgaagtgtttgtcagtatgccccaaagcttgctcttttgtgctcccttttgaataactttctatccagaaaaagagattatttgggacttgagatttgcagtgataccaacttatagcaatgatgtactttaagggaactacccaactatgttgtgatagaagaaagagaaaccttcactttggcatttttttttaatcactgtttatttttctgtttgcggcccaggaagcagtgggaggtggtggcagatatgctttgcatatggattgttatgtttttatttgggcaagtttaatcatggaaaactcaaaaagaaggggggaaatggtcagtttaagccaaaagaaactttctaaacaatgtataggtacacagcaaaattaaacaaatccaacaatttctgaagcttagtgtaattgagtggtggttgttattcaataaaattattcccaaaagtgtttctcctaagagtgcagttcccatgagtcacttcctgaacccattgaccaaaggtggacagagacaatcctgtagaccttgacattcagaaagatgtgagctgcttactgatcatatatgcatacgtttctttacagcagaggaaaccattgtccacaaaactgatgttcttttggggttttatgtacagacttgtccaatcatgtgtgtggttcctgcgagttgctgatgactccgcattgaagctctctgagttctttgattttaagttgggtttatggaattttttcaaatgttggaaggtgtgtggttcttcctgccctccctccccttttggaaatatgaaagcaaatgtttagaagaattccttttgaaaagctgtgtcgtgttccctgtgaaactgagcaggtgtgtgttggcgcgctaagtgccacatgcttgtgtgtagaggaggaggtggccctgccggctccgcgctgctgtgcctgtgatccctacctgctccccgctcctgttgccagcagcactcactgcactcctttgtcatatactctgcatcactgtcatactcacaacttcgtgaataaagttgtgtgctttattcgtaga

SEQ ID NO: 20509 - protein, 685 aa, Homo sapiens
MLMTLEMTELTDPHHTMGDYKVAHPQDPHHPSEKPVIHCHKCGEPCKGEVLRVQTKHFHIKCFTCKVCGCDLAQGGFFIKNGEYLCTLDYQRMYGTRCHGCGEFVEGEVVTALGKTYHPNCFACTICKRPFPPGDRVTFNGRDCLCQLCAQPMSSSPKETTFSSNCAGCGRDIKNGQALLALDKQWHLGCFKCKSCGKVLTGEYISKDGAPYCEKDYQGLFGVKCEACHQFITGKVLEAGDKHYHPSCARCSRCNQMFTEGEEMYLQGSTVWHPDCKQSTKTEEKLRLPNIRRSSSDFFYSKSLIRRTGRSPSLQPTRTSSESIYSRPGSSIPGSPGHTIYAKVDNEILDYKDLAAIPKVKAIYDIERPDLITYEPFYTSGYDDKQERQSLGESPRTLSPTPSAEGYQDVRDRMIHRSTSQGSINSPVYSRHSYTPTTSRSPQHFHRPGNEPSSGRNSPLPYRPDSRPLTPTYAQAPKHFHVPDQGINIYRKPPIYKQHAALAAQSKSSEDIIKFSKFPAAQAPDPSETPKIETDHWPGPPSFAVVGPDMKRRSSGREEDDEELLRRRQLQEEQLMKLNSGLGQLILKEEMEKESRERSSLLASRYDSPINSASHIPSSKTASLPGYGRNGLHRPVSTDFAQYNSYGDVSGGVRVADTPRWPHACNENGPRSVYAQHVGTKDISI

SEQ ID NO: 20510 - DNA, 762 bp, Homo sapiens
ctgtttatttttctgtttgcggcccaggaagcagtgggaggtggtggcagatatgctttgcatatggattgttatgtttttatttgggcaagtttaatcatggaaaactcaaaaagaaggggggaaatggtcagtttaagccaaaagaaactttctaaacaatgtataggtacacagcaaaattaaacaaatccaacaatttctgaagcttagtgtaattgagtggtggttgttattcaataaaattattcccaaaagtgtttctcctaagagtgcagttcccatgagtcacttcctgaacccattgaccaaaggtggacagagacaatcctgtagaccttgacattcagaaagatgtgagctgcttactgatcatatatgcatacgtttctttacagcagaggaaaccattgtccacaaaactgatgttcttttggggttttatgtacagacttgtccaatcatgtgtgtggttcctgcgagttgctgatgactccgcattgaagctctctgagttctttgattttaagttgggtttatggaattttttcaaatgttggaaggtgtgtgttggcgcgctaagtgccacatgcttgtgtgtagaggaggaggtggccctgccggctccgcgctgctgtgcctgtgatccctacctgctccccgctcctgttgccagcagcactcactgcactcctttgtcatatactctgcatcactgtcatactcacaacttcgtgaataaagttgtgtgctttattcgta

SEQ ID NO: 20511 - protein, 111 aa, Homo sapiens
MFFWGFMYRLVQSCVWFLRVADDSALKLSEFFDFKLGLWNFFKCWKVCVGALSATCLCVEEEVALPAPRCCACDPYLLPAPVASSTHCTPLSYTLHHCHTHNFVNKVVCFI

SEQ ID NO: 20512 - DNA, 1280 bp, Homo sapiens
aatgaaaggaaaccttcccttaactctttctgcttcccatagcaggtctggttcctgctccccgcctaggacaggagctgtctggagctccacctttgcaaagaaaggaaaaacacaaattgcccccagattggcccagtggcatgccattaggtgattttgcataggggccatatcattcatggccaaaaaaaaccaaaaagcaaaaaacaaaaacaagtcccatgtcctactgactctagttcttccagtcgttatcctctgctgtctctctggcatcctatgaatcagatcaagcccatgctgttgttggtttttaaggtttctttcaataataggctaaggaaagacatgtttttctcttttaaatctctgcaactccaaagtagactccttcgaacgtatttaatttggccttttcagctttcttcttgcccagctctgtcgaattcatgggtgtgtgtgcacatgttggtttcactcacccagagtaattttgtgagcatgcatgtgctttttaatttctgcttgaatgtttgtcctgctgtgttgcagcttctaaagacattgtcaccgagtgtgtgtgactcaaagatcaagagtgaggctaaactgcgaccccaacatcacttccttcatggaaaggtgttggcgctgatgtagctcatggaaggatcagactgggaaccacagaggaaggatgaggtgggatgtggaggtcagagcatctcacgagagtccctcaggctctgcaacactagattcgaatatgagcctagggtttccccaacacgtgcgtgcatatgaaaccacatcatgattcccgacgtgagttagatgagggagagtttgtgtaactccacacccaggagggtaagccactttattatcatgctttggggctgtgcttaagaatttaagctctgttttaaagccgaagaagaaaacatttgaatttaccttcatatgccactaagaacaaaagctctgaagttcttcctgctggcaccaaatattaggattacaagctgtctctctgacaccagtggtaaaaaagcaagtagaatagtttctgagtctgtgttgcagcctctgacacgtggctcaccgctgtcatttgggggatggaatgaacagtcactgttctatagcatcctcctgtgctcttacctaaggaatctaaattgtcctagccttccattgctatgcatcctttgtcatatactctgcatcactgtcatactcacaacttcgtgaataaagttgtgtgctttattcgt

SEQ ID NO: 20513 - protein, 96 aa, Homo sapiens [sequence omitted]

SEQ ID NO: 20514 - DNA, 2237 bp, Homo sapiens
gcctgggtgtcctcatccttgctttactctggaaagtgtggggatggagaggatggtgcatttccagtgcttccttacctgtcaataacaatggtggccacctgggtcccagcacttggctggtggagagatttttttcattatggagctaataaagggtccctacgttttacattgattaatgaattatcacccagacatgtgcagatgaaatgtcaatataagaaaaatcaaggtatttgggaaacatgggcataatcaggtagttttgctaaaattcctcttccttggtctacataaagaagacatgggtctgtcatagaatggggacattagactgaaaactgggacaacccccttccttattttatagagactaggagttaaggggcctgcctaagattgcagtgataaagaactgaaccctaaatcagctcccactaatgaaaccctgctttccttgtatcttttaaactcagttctgcatccaacttgagaagaaaaaaagcttctttccatatcaagtaccatatgagttcatttaaactgcaccttgcagaaatgcattgccagaaagcaccagtagcctcctatctgcaagcagagtagtgctctgctctggggaggggtcattggaaacctggttcctgctaactgccagattgaatgtgtgggctagaatgcctgcacatttagttaaactgggctcagcatgcttgtcctcaaaatgtccatcctggtcacagcacacaagatggctattggtctgcttttaccctaccctgtactatacatgaaaattccagttattaacacactcaaactggtggagcttgttcaccctaggaaggggattgtatatatggcaggcttccctggtgccgatgtaaagggctacatttgggaacatttgacttccttgggactcttaagtgcataatgatggcatgaagtaaaaggggcctcaatgatgataggaaaatcagttcttttaaaatttcttcaagaaaatccaggctatcacatagtctttctgtgtgacttattaggagataggaagagcattgggaaacttgcacagctagctatgcatctacattttggtttggggttagttatgaaatgttcttaatatgacgtgttcaataacttcacataaacttcctgttctccaaaacctcaaagagatagagttaatgagttgttgtttttttttaaatgggggtagttttctatctgtcatgggctctagcatctactccgctacccaattctgtcatctccaagctgagtttcctcttctgaggcagaggctggagcagttctttttcagttctcatcctctccatcccaatccagtatatcaatcaactctaactcggagacgtctagctggcaatgtttctaaaactttcactggatttctttagacattgaagcaaacatttttttctaagaattgcttctcagatgatgatatcaaatgtatatgcttttgcaagtttgaaaagttcaaattaaccacttttgactaggtaagtctttctaaaaaccatttaaagctaactgggtcttagcatcctcctgtgtatggaagagacaggtgaccgctccaggttgggtgctcacagaacccttttcctgactctcatggaagatggtggaaggaaaatagactgtctcatcaaccctcctgtgtcctctgaagcaatctcagtttttattaaccacctcttctgtgtttctggtagctatttaacctgtatttaatctgtacttcctatgccagcctcaattttatttgatttttacaattattctcttctaaccaatgaagtgtttgtcagtatgccccaaagcttgctcttttgtgctcccttttgaataactttctatccagaaaaagagattatttgggacttgagatttgcagtgataccaacttatagcaatgatgtactttaagggaactacccaactatgttgtgatagaagaaagagaaaccttcactttggcatttttttttaatcactgtttatttttctgtttgcggcccaggaagcagtgggaggtggtggcagatatgctttgcatatggattgttatgtttttatttgggcaagtttaatcatggaaaactcaaaaagaaggggggaaatggtcagtttaagccaaaagaaactttctaaacaatgtataggtacacagcaaaattaaacaaatccaacaatttctg

SEQ ID NO: 20515 - protein, 98 aa, Homo sapiens; identical to SEQ ID NO: 20485

SEQ ID NO: 20516 - DNA, 6177 bp, Homo sapiens
aaagcgaggagaggaggcgtgagagagcgtgcctgcccgccgcacacggggctggtttccggagtgcgtctctagagggatgcacgttgccttagccgagcttcggagagaagcctgatatgtaacccaggcaggtgggagcctcagtctgtcgggctgaggtctggcatctacaaagcctcttggccgtgttctgaacttgaagcctggaggagttctctgctcagcacagccaaggaacagaattagaagaaaaggaaccctggcctgaggcaggtgacaaacattaccaccccagctgtgcacgatgcagcagatgcaaccagatgttcacagaaggagaggaaatgtatcttcaaggctccaccgtttggcatcccgactgtaagcaatctacgaagaccgaggaaaagctgcggctgccaaacattcggcgttcttcatccgatttcttttattccaaaagtctgattcgacgcacaggacggtctccgtctctgcagcctaccaggacatcctcggaaagtatttattctaggccaggctccagtattcctggctcaccaggtcatactatctatgcaaaagtagacaatgagatcctggattacaaggatttagcagccattccgaaggtcaaggcaatttatgacattgaacgtccagatcttattacctatgagcctttctacacttcgggctatgatgacaaacaggagagacagagccttggagagtctccgaggactttgtctcctactccatcagcagaagggtaccaggatgttcgggatcggatgatccatcggtccacgagccagggctccatcaactcccctgtgtacagccgccacagctacactccaaccacgtcccgctctccccagcatttccacagacctgatcaaggaatcaacatttaccgaaagccacccatctacaaacagcatgctgccttggcagcccagagcaagtcctcagaagatatcatcaagttttccaagttcccagcagcccaggcaccagaccccagcgagacaccaaagattgagacggaccactggcctggtcccccctcatttgctgtcgtaggacctgacatgaaacgcagatctagtggcagagaggaagatgatgaggaacttctgagacgtcggcagcttcaagaagagcaattaatgaagcttaactcaggcctgggacagttgatcttgaaagaagagatggagaaagagagccgggaaaggtcatctctgttagccagtcgctacgattctcccatcaactcagcttcacatattccatcatctaaaactgcatctctccctggctatggaagaaatgggcttcaccggcctgtttctaccgacttcgctcagtataacagctatggggatgtcagcgggggagtgcgagttgcagacactcccagatggccacatgcctgcaatgagaatggaccgaggagtgtctatgcccaacatgttggaaccaaagatatttccatatgaaatgctcatggtgaccaacagagggcgaaacaaaatcctcagagaggtggacagaaccaggctggagcgccacttagcccctgaagtgtttcgggaaatctttggaatgtccatacaggagtttgacaggttacctctttggagacgcaacgacatgaagaaaaaagcaaaactcttctaagtcccactcgtgaatggcaattagagaaaggactgacagtggcggtgccccataggatgtcatattgaggcccaaacttgattggagaatttgcaaactaccgtcgctcagcaacaccaaaaagagaaagtctggttaaaacaccatgagtcaaatgtcgggccagccaacagtaacacttgccaagaagcatggcgtagaaatttctatgttccgaaacacagagtagtgtccacatgtgagcttttcacattaccttatgtatacaacaggagctgcgttgttttcttctttttcttttcctttatctgttgtccaacaacagtgctgactgtccggataagagctggcaagtgcccttaggatgccgcatgggaaaaatcggttatcataatttcaaagtataaatatatttattaagtagcgctgcggctaagaaggaagagtgaggggtctgtccatggggtggcagtgatttcacacccgcctttcttgaatggcttcgtgttactcagccgtgccctggcaggaatggaactccatcagggaacagggcagctctgtttgaatggggtgaaaaacagcaaaattaattcttagcaagctccttgttctctactgttcaccgggacctggctggcaaatgacttagctattagtatatttaaaaactgttcaaaagcaaaagagaaggaacaggaatgaaaggaaaccttcccttaactctttctgcttcccatagcaggtctggttcctgctccccgcctaggacaggagctgtctggagctccacctttgcaaagaaaggaaaaacacaaattgcccccagattggcccagtggcatgccattaggtgattttgcataggggccatatcattcatggccaaaaaaaaccaaaaagcaaaaaacaaaaacaagtcccatgtcctactgactctagttcttccagtcgttatcctctgctgtctctctggcatcctatgaatcagatcaagcccatgctgttgttggtttttaaggtttctttcaataataggctaaggaaagacatgtttttctcttttaaatctctgcaactccaaagtagactccttcgaacgtatttaatttggccttttcagctttcttcttgcccagctctgtcgaattcatgggtgtgtgtgcacatgttggtttcactcacccagagtaattttgtgagcatgcatgtgctttttaatttctgcttgaatgtttgtcctgctgtgttgcagcttctaaagacattgtcaccgagtgtgtgtgactcaaagatcaagagtgaggctaaactgcgaccccaacatcacttccttcatggaaaggtgttggcgctgatgtagctcatggaaggatcagactgggaaccacagaggaaggatgaggtgggatgtggaggtcagagcatctcacgagagtccctcaggctctgcaacactagattcgaatatgagcctagggtttccccaacacgtgcgtgcatatgaaaccacatcatgattcccgacgtgagttagatgagggagagtttgtgtaactccacacccaggagggtaagccactttattatcatgctttggggctgtgcttaagaatttaagctctgttttaaagccgaagaagaaaacatttgaatttaccttcatatgccactaagaacaaaagctctgaagttcttcctgctggcaccaaatattaggattacaagctgtctctctgacaccagtggtaaaaaagcaagtagaatagtttctgagtctgtgttgcagcctctgacacgtggctcaccgctgtcatttgggggatggaatgaacagtcactgttctatagcatcctcctgtgctcttacctaaggaatctaaattgtcctagccttccattgctatgcactgaatgaggactactctcgtgtgtgtgtgtgtgtgtgtgtgtgtgtgtgtgtgtgtgtgtgtgtgtgttggatctactaacatgtttagcaaatggctctgacagggtggccatgagcagatgagaccagctcttgcttggttggaagccacactgcagtttgcagtttagcctttggtgtctcagtggcttcttgcttattccatgctttttctatcccatcctctctctgtgccctcctgcaatggcagccttggcacaatgcctgggtgtcctcatccttgctttactctggaaagtgtggggatggagaggatggtgcatttccagtgcttccttacctgtcaataacaatggtggccacctgggtcccagcacttggctggtggagagatttttttcattatggagctaataaagggtccctacgttttacattgattaatgaattatcacccagacatgtgcagatgaaatgtcaatataagaaaaatcaaggtatttgggaaacatgggcataatcaggtagttttgctaaaattcctcttccttggtctacataaagaagacatgggtctgtcatagaatggggacattagactgaaaactgggacaacccccttccttattttatagagactaggagttaaggggcctgcctaagattgcagtgataaagaactgaaccctaaatcagctcccactaatgaaaccctgctttccttgtatcttttaaactcagttctgcatccaacttgagaagaaaaaaagcttctttccatatcaagtaccatatgagttcatttaaactgcaccttgcagaaatgcattgccagaaagcaccagtagcctcctatctgcaagcagagtagtgctctgctctggggaggggtcattggaaaccataatgcagagtgggccccctactccatttcccagcaaaaggctccagctggagggatgggttgtggggcaacctggttcctgctaactgccagattgaatgtgtgggctagaatgcctgcacatttagttaaactgggctcagcatgcttgtcctcaaaatgtccatcctggtcacagcacacaagatggctattggtctgcttttaccctaccctgtactatacatgaaaattccagttattaacacactcaaactggtggagcttgttcaccctaggaaggggattgtatatatggcaggcttccctggtgccgatgtaaagggctacatttgggaacatttgacttccttgggactcttaagtgcataatgatggcatgaagtaaaaggggcctcaatgatgataggaaaatcagttcttttaaaatttcttcaagaaaatccaggctatcacatagtctttctgtgtgacttattaggagataggaagagcattgggaaacttgcacagctagctatgcatctacattttggtttggggttagttatgaaatgttcttaatatgacgtgttcaataacttcacataaacttcctgttctccaaaacctcaaagagatagagttaatgagttgttgtttttttttaaatgggggtagttttctatctgtcatgggctctagcatctactccgctacccaattctgtcatctccaagctgagtttcctcttctgaggcagaggctggagcagttctttttcagttctcatcctctccatcccaatccagtatatcaatcaactctaactcggagacgtctagctggcaatgtttctaaaactttcactggatttctttagacattgaagcaaacatttttttctaagaattgcttctcagatgatgatatcaaatgtatatgcttttgcaagtttgaaaagttcaaattaaccacttttgactaggtaagtctttctaaaaaccatttaaagctaactgggtcttagcatcctcctgtgtatggaagagacaggtgaccgctccaggttgggtgctcacagaacccttttcctgactctcatggaagatggtggaaggaaaatagactgtctcatcaaccctcctgtgtcctctgaagcaatctcagtttttattaaccacctcttctgtgtttctggtagctatttaacctgtatttaatctgtacttcctatgccagcctcaattttatttgatttttacaattattctcttctaaccaatgaagtgtttgtcagtatgccccaaagcttgctcttttgtgctcccttttgaataactttctatccagaaaaagagattatttgggacttgagatttgcagtgataccaacttatagcaatgatgtactttaagggaactacccaactatgttgtgatagaagaaagagaaaccttcactttggcatttttttttaatcactgtttatttttctgtttgcggcccaggaagcagtgggaggtggtggcagatatgctttgcatatggattgttatgtttttatttgggcaagtttaatcatggaaaactcaaaaagaaggggggaaatggtcagtttaagccaaaagaaactttctaaacaatgtataggtacacagcaaaattaaacaaatccaacaatttctg

SEQ ID NO: 20517 - protein, 394 aa, Homo sapiens; identical to SEQ ID NO: 20493

SEQ ID NO: 20518 - DNA, 1796 bp, Homo sapiens
agtggcccaccctcaggaccctcaccacccatcagagaagcctgtcattcactgccataaatgtggggagccttgcaagggtgaagtgcttcgggtccagaccaaacatttccacatcaagtgtttcacctgcaaagtgtgtggctgtgacctggcacaagggggcttcttcataaagaacggagagtatctctgcaccctggttcctgctaactgccagattgaatgtgtgggctagaatgcctgcacatttagttaaactgggctcagcatgcttgtcctcaaaatgtccatcctggtcacagcacacaagatggctattggtctgcttttaccctaccctgtactatacatgaaaattccagttattaacacactcaaactggtggagcttgttcaccctaggaaggggattgtatatatggcaggcttccctggtgccgatgtaaagggctacatttgggaacatttgacttccttgggactcttaagtgcataatgatggcatgaagtaaaaggggcctcaatgatgataggaaaatcagttcttttaaaatttcttcaagaaaatccaggctatcacatagtctttctgtgtgacttattaggagataggaagagcattgggaaacttgcacagctagctatgcatctacattttggtttggggttagttatgaaatgttcttaatatgacgtgttcaataacttcacataaacttcctgttctccaaaacctcaaagagatagagttaatgagttgttgtttttttttaaatgggggtagttttctatctgtcatgggctctagcatctactccgctacccaattctgtcatctccaagctgagtttcctcttctgaggcagaggctggagcagttctttttcagttctcatcctctccatcccaatccagtatatcaatcaactctaactcggagacgtctagctggcaatgtttctaaaactttcactggatttctttagacattgaagcaaacatttttttctaagaattgcttctcagatgatgatatcaaatgtatatgcttttgcaagtttgaaaagttcaaattaaccacttttgactaggtaagtctttctaaaaaccatttaaagctaactgggtcttagcatcctcctgtgtatggaagagacaggtgaccgctccaggttgggtgctcacagaacccttttcctgactctcatggaagatggtggaaggaaaatagactgtctcatcaaccctcctgtgtcctctgaagcaatctcagtttttattaaccacctcttctgtgtttctggtagctatttaacctgtatttaatctgtacttcctatgccagcctcaattttatttgatttttacaattattctcttctaaccaatgaagtgtttgtcagtatgccccaaagcttgctcttttgtgctcccttttgaataactttctatccagaaaaagagattatttgggacttgagatttgcagtgataccaacttatagcaatgatgtactttaagggaactacccaactatgttgtgatagaagaaagagaaaccttcactttggcatttttttttaatcactgtttatttttctgtttgcggcccaggaagcagtgggaggtggtggcagatatgctttgcatatggattgttatgtttttatttgggcaagtttaatcatggaaaactcaaaaagaaggggggaaatggtcagtttaagccaaaagaaactttctaaacaatgtataggtacacagcaaaattaaacaaatccaacaatttctg

SEQ ID NO: 20519 - protein, 98 aa, Homo sapiens; identical to SEQ ID NO: 20485

SEQ ID NO: 20520 - DNA, 6441 bp, Homo sapiens
ggtctcatgctttcatctcccagtgggtgtgcagacactggagagacccagtggcccaccctcaggaccctcaccacccatcagagaagcctgtcattcactgccataaatgtggggagccttgcaagggtgaagtgcttcgggtccagaccaaacatttccacatcaagtgtttcacctgcaaagtgtgtggctgtgacctggcacaagggggcttcttcataaagaacggagagtatctctgcaccctgacctaccatcccaattgctttgcttgtactatctgcaagcgcccgtttccacccggagaccgagtcacattcaatgggagagactgcctttgtcaactctgtgcacagccgatgtcgtccagtccgaaagaaaccaccttctccagcaattgtgccggctgcggaagagatatcaagaatgggcaggcgctgctggcgctggataagcagtggcacttggggtgctttaaatgcaagtcctgcgggaaggtcctcaccggggagtacatcagcaaggatggtgctccgtactgtgaaaaggactaccagggactctttggggtgaaatgtgaggcgtgtcaccagtttatcacagggaaagtcctggaggcaggtgacaaacattaccaccccagctgtgcacgatgcagcagatgcaaccagatgttcacagaaggagaggaaatgtatcttcaaggctccaccgtttggcatcccgactgtaagcaatctacgaagaccgaggaaaagctgcggcctaccaggacatcctcggaaagtatttattctaggccaggctccagtattcctggctcaccaggtcatactatctatgcaaaagtagacaatgagatcctggattacaaggatttagcagccattccgaaggtcaaggcaatttatgacattgaacgtccagatcttattacctatgagcctttctacacttcgggctatgatgacaaacaggagagacagagccttggagagtctccgaggactttgtctcctactccatcagcagaagggtaccaggatgttcgggatcggatgatccatcggtccacgagccagggctccatcaactcccctgtgtacagccgccacagctacactccaaccacgtcccgctctccccagcatttccacagacctgatcaaggaatcaacatttaccgaaagccacccatctacaaacagcatgctgccttggcagcccagagcaagtcctcagaagatatcatcaagttttccaagttcccagcagcccaggcaccagaccccagcgagacaccaaagattgagacggaccactggcctggtcccccctcatttgctgtcgtaggacctgacatgaaacgcagatctagtggcagagaggaagatgatgaggaacttctgagacgtcggcagcttcaagaagagcaattaatgaagcttaactcaggcctgggacagttgatcttgaaagaagagatggagaaagagagccgggaaaggtcatctctgttagccagtcgctacgattctcccatcaactcagcttcacatattccatcatctaaaactgcatctctccctggctatggaagaaatgggcttcaccggcctgtttctaccgacttcgctcagtataacagctatggggatgtcagcgggggagtgcgagttgcagacactcccagatggccacatgcctgcaatgagaatggaccgaggagtgtctatgcccaacatgttggaaccaaagatatttccatatgaaatgctcatggtgaccaacagagggcgaaacaaaatcctcagagaggtggacagaaccaggctggagcgccacttagcccctgaagtgtttcgggaaatctttggaatgtccatacaggagtttgacaggttacctctttggagacgcaacgacatgaagaaaaaagcaaaactcttctaagtcccactcgtgaatggcaattagagaaaggactgacagtggcggtgccccataggatgtcatattgaggcccaaacttgattggagaatttgcaaactaccgtcgctcagcaacaccaaaaagagaaagtctggttaaaacaccatgagtcaaatgtcgggccagccaacagtaacacttgccaagaagcatggcgtagaaatttctatgttccgaaacacagagtagtgtccacatgtgagcttttcacattaccttatgtatacaacaggagctgcgttgttttcttctttttcttttcctttatctgttgtccaacaacagtgctgactgtccggataagagctggcaagtgcccttaggatgccgcatgggaaaaatcggttatcataatttcaaagtataaatatatttattaagtagcgctgcggctaagaaggaagagtgaggggtctgtccatggggtggcagtgatttcacacccgcctttcttgaatggcttcgtgttactcagccgtgccctggcaggaatggaactccatcagggaacagggcagctctgtttgaatggggtgaaaaacagcaaaattaattcttagcaagctccttgttctctactgttcaccgggacctggctggcaaatgacttagctattagtatatttaaaaactgttcaaaagcaaaagagaaggaacaggaatgaaaggaaaccttcccttaactctttctgcttcccatagcaggtctggttcctgctccccgcctaggacaggagctgtctggagctccacctttgcaaagaaaggaaaaacacaaattgcccccagattggcccagtggcatgccattaggtgattttgcataggggccatatcattcatggccaaaaaaaaccaaaaagcaaaaaacaaaaacaagtcccatgtcctactgactctagttcttccagtcgttatcctctgctgtctctctggcatcctatgaatcagatcaagcccatgctgttgttggtttttaaggtttctttcaataataggctaaggaaagacatgtttttctcttttaaatctctgcaactccaaagtagactccttcgaacgtatttaatttggccttttcagctttcttcttgcccagctctgtcgaattcatgggtgtgtgtgcacatgttggtttcactcacccagagtaattttgtgagcatgcatgtgctttttaatttctgcttgaatgtttgtcctgctgtgttgcagcttctaaagacattgtcaccgagtgtgtgtgactcaaagatcaagagtgaggctaaactgcgaccccaacatcacttccttcatggaaaggtgttggcgctgatgtagctcatggaaggatcagactgggaaccacagaggaaggatgaggtgggatgtggaggtcagagcatctcacgagagtccctcaggctctgcaacactagattcgaatatgagcctagggtttccccaacacgtgcgtgcatatgaaaccacatcatgattcccgacgtgagttagatgagggagagtttgtgtaactccacacccaggagggtaagccactttattatcatgctttggggctgtgcttaagaatttaagctctgttttaaagccgaagaagaaaacatttgaatttaccttcatatgccactaagaacaaaagctctgaagttcttcctgctggcaccaaatattaggattacaagctgtctctctgacaccagtggtaaaaaagcaagtagaatagtttctgagtctgtgttgcagcctctgacacgtggctcaccgctgtcatttgggggatggaatgaacagtcactgttctatagcatcctcctgtgctcttacctaaggaatctaaattgtcctagccttccattgctatgcactgaatgaggactactctcgtgtgtgtgtgtgtgtgtgtgtgtgtgtgtgtgtgtgtgtgtgtgtgtgttggatctactaacatgtttagcaaatggctctgacagggtggccatgagcagatgagaccagctcttgcttggttggaagccacactgcagtttgcagtttagcctttggtgtctcagtggcttcttgcttattccatgctttttctatcccatcctctctctgtgccctcctgcaatggcagccttggcacaatgcctgggtgtcctcatccttgctttactctggaaagtgtggggatggagaggatggtgcatttccagtgcttccttacctgtcaataacaatggtggccacctgggtcccagcacttggctggtggagagatttttttcattatggagctaataaagggtccctacgttttacattgattaatgaattatcacccagacatgtgcagatgaaatgtcaatataagaaaaatcaaggtatttgggaaacatgggcataatcaggtagttttgctaaaattcctcttccttggtctacataaagaagacatgggtctgtcatagaatggggacattagactgaaaactgggacaacccccttccttattttatagagactaggagttaaggggcctgcctaagattgcagtgataaagaactgaaccctaaatcagctcccactaatgaaaccctgctttccttgtatcttttaaactcagttctgcatccaacttgagaagaaaaaaagcttctttccatatcaagtaccatatgagttcatttaaactgcaccttgcagaaatgcattgccagaaagcaccagtagcctcctatctgcaagcagagtagtgctctgctctggggaggggtcattggaaaccataatgcagagtgggccccctactccatttcccagcaaaaggctccagctggagggatgggttgtggggcaacctggttcctgctaactgccagattgaatgtgtgggctagaatgcctgcacatttagttaaactgggctcagcatgcttgtcctcaaaatgtccatcctggtcacagcacacaagatggctattggtctgcttttaccctaccctgtactatacatgaaaattccagttattaacacactcaaactggtggagcttgttcaccctaggaaggggattgtatatatggcaggcttccctggtgccgatgtaaagggctacatttgggaacatttgacttccttgggactcttaagtgcataatgatggcatgaagtaaaaggggcctcaatgatgataggaaaatcagttcttttaaaatttcttcaagaaaatccaggctatcacatagtctttctgtgtgacttattaggagataggaagagcattgggaaacttgcacagctagctatgcatctacattttggtttggggttagttatgaaatgttcttaatatgacgtgttcaataacttcacataaacttcctgttctccaaaacctcaaagagatagagttaatgagttgttgtttttttttaaatgggggtagttttctatctgtcatgggctctagcatctactccgctacccaattctgtcatctccaagctgagtttcctcttctgaggcagaggctggagcagttctttttcagttctcatcctctccatcccaatccagtatatcaatcaactctaactcggagacgtctagctggcaatgtttctaaaactttcactggatttctttagacattgaagcaaacatttttttctaagaattgcttctcagatgatgatatcaaatgtatatgcttttgcaagtttgaaaagttcaaattaaccacttttgactaggtaagtctttctaaaaaccatttaaagctaactgggtcttagcatcctcctgtgtatggaagagacaggtgaccgctccaggttgggtgctcacagaacccttttcctgactctcatggaagatggtggaaggaaaatagactgtctcatcaaccctcctgtgtcctctgaagcaatctcagtttttattaaccacctcttctgtgtttctggtagctatttaacctgtatttaatctgtacttcctatgccagcctcaattttatttgatttttacaattattctcttctaaccaatgaagtgtttgtcagtatgccccaaagcttgctcttttgtgctcccttttgaataactttctatccagaaaaagagattatttgggacttgagatttgcagtgataccaacttatagcaatgatgtactttaagggaactacccaactatgttgtgatagaagaaagagaaaccttcactttggcatttttttttaatcactgtttatttttctgtttgcggcccaggaagcagtgggaggtggtggcagatatgctttgcatatggattgttatgtttttatttgggcaagtttaatcatggaaaactcaaaaagaaggggggaaatggtcagtttaagccaaaagaaactttctaaacaatgtataggtacacagcaaaattaaacaaatccaacaatttctg

SEQ ID NO: 20521 - protein, 470 aa, Homo sapiens; identical to SEQ ID NO: 20499

SEQ ID NO: 20522 - DNA, 6934 bp, Homo sapiens
gggcagtgagaaaaggagacagtaaggagccaggggaacagagagaattgtggggcagcaccgctccttgggtccccactccccatttctcattgcttggaaatccatgccaagatgcctgccttccttggtctaaagtgtctggggaaattgtgcagctctgagaaaagcaaagtcacctcatctgagagaaccagtgccaggggctcgaacagaaagagactgattgttgaggaccggagggtctctgggacctccttcaccgctcataggcgtgccactatcactcatttgctgtatctctgtcccaaggactactgcccacgtgggcgtgtatgtaacagcgttgatccttttgtggcccaccctcaggaccctcaccacccatcagagaagcctgtcattcactgccataaatgtggggagccttgcaagggtgaagtgcttcgggtccagaccaaacatttccacatcaagtgtttcacctgcaaagtgtgtggctgtgacctggcacaagggggcttcttcataaagaacggagagtatctctgcaccctggactaccagcggatgtacgggacacgctgccatggctgtggggagttcgtggagggcgaagtggtgactgctctgggcaagacctaccatcccaattgctttgcttgtactatctgcaagcgcccgtttccacccggagaccgagtcacattcaatgggagagactgcctttgtcaactctgtgcacagccgatgtcgtccagtccgaaagaaaccaccttctccagcaattgtgccggctgcggaagagatatcaagaatgggcaggcgctgctggcgctggataagcagtggcacttggggtgctttaaatgcaagtcctgcgggaaggtcctcaccggggagtacatcagcaaggatggtgctccgtactgtgaaaaggactaccagggactctttggggtgaaatgtgaggcgtgtcaccagtttatcacagggaaagtcctggaggcaggtgacaaacattaccaccccagctgtgcacgatgcagcagatgcaaccagatgttcacagaaggagaggaaatgtatcttcaaggctccaccgtttggcatcccgactgtaagcaatctacgaagaccgaggaaaagctgcggcctaccaggacatcctcggaaagtatttattctaggccaggctccagtattcctggctcaccaggtcatactatctatgcaaaagtagacaatgagatcctggattacaaggatttagcagccattccgaaggtcaaggcaatttatgacattgaacgtccagatcttattacctatgagcctttctacacttcgggctatgatgacaaacaggagagacagagccttggagagtctccgaggactttgtctcctactccatcagcagaagggtaccaggatgttcgggatcggatgatccatcggtccacgagccagggctccatcaactcccctgtgtacagccgccacagctacactccaaccacgtcccgctctccccagcatttccacagacctggcaatgagccgtccagcggccggaactcccctctcccttaccggccagacagccgccctctaactccaacttacgctcaggcccctaaacatttccatgttccagatcaaggaatcaacatttaccgaaagccacccatctacaaacagcatgctgccttggcagcccagagcaagtcctcagaagatatcatcaagttttccaagttcccagcagcccaggcaccagaccccagcgagacaccaaagattgagacggaccactggcctggtcccccctcatttgctgtcgtaggacctgacatgaaacgcagatctagtggcagagaggaagatgatgaggaacttctgagacgtcggcagcttcaagaagagcaattaatgaagcttaactcaggcctgggacagttgatcttgaaagaagagatggagaaagagagccgggaaaggtcatctctgttagccagtcgctacgattctcccatcaactcagcttcacatattccatcatctaaaactgcatctctccctggctatggaagaaatgggcttcaccggcctgtttctaccgacttcgctcagtataacagctatggggatgtcagcgggggagtgcgagttgcagacactcccagatggccacatgcctgcaatgagaatggaccgaggagtgtctatgcccaacatgttggaaccaaagatatttccatatgaaatgctcatggtgaccaacagagggcgaaacaaaatcctcagagaggtggacagaaccaggctggagcgccacttagcccctgaagtgtttcgggaaatctttggaatgtccatacaggagtttgacaggttacctctttggagacgcaacgacatgaagaaaaaagcaaaactcttctaagtcccactcgtgaatggcaattagagaaaggactgacagtggcggtgccccataggatgtcatattgaggcccaaacttgattggagaatttgcaaactaccgtcgctcagcaacaccaaaaagagaaagtctggttaaaacaccatgagtcaaatgtcgggccagccaacagtaacacttgccaagaagcatggcgtagaaatttctatgttccgaaacacagagtagtgtccacatgtgagcttttcacattaccttatgtatacaacaggagctgcgttgttttcttctttttcttttcctttatctgttgtccaacaacagtgctgactgtccggataagagctggcaagtgcccttaggatgccgcatgggaaaaatcggttatcataatttcaaagtataaatatatttattaagtagcgctgcggctaagaaggaagagtgaggggtctgtccatggggtggcagtgatttcacacccgcctttcttgaatggcttcgtgttactcagccgtgccctggcaggaatggaactccatcagggaacagggcagctctgtttgaatggggtgaaaaacagcaaaattaattcttagcaagctccttgttctctactgttcaccgggacctggctggcaaatgacttagctattagtatatttaaaaactgttcaaaagcaaaagagaaggaacaggaatgaaaggaaaccttcccttaactctttctgcttcccatagcaggtctggttcctgctccccgcctaggacaggagctgtctggagctccacctttgcaaagaaaggaaaaacacaaattgcccccagattggcccagtggcatgccattaggtgattttgcataggggccatatcattcatggccaaaaaaaaccaaaaagcaaaaaacaaaaacaagtcccatgtcctactgactctagttcttccagtcgttatcctctgctgtctctctggcatcctatgaatcagatcaagcccatgctgttgttggtttttaaggtttctttcaataataggctaaggaaagacatgtttttctcttttaaatctctgcaactccaaagtagactccttcgaacgtatttaatttggccttttcagctttcttcttgcccagctctgtcgaattcatgggtgtgtgtgcacatgttggtttcactcacccagagtaattttgtgagcatgcatgtgctttttaatttctgcttgaatgtttgtcctgctgtgttgcagcttctaaagacattgtcaccgagtgtgtgtgactcaaagatcaagagtgaggctaaactgcgaccccaacatcacttccttcatggaaaggtgttggcgctgatgtagctcatggaaggatcagactgggaaccacagaggaaggatgaggtgggatgtggaggtcagagcatctcacgagagtccctcaggctctgcaacactagattcgaatatgagcctagggtttccccaacacgtgcgtgcatatgaaaccacatcatgattcccgacgtgagttagatgagggagagtttgtgtaactccacacccaggagggtaagccactttattatcatgctttggggctgtgcttaagaatttaagctctgttttaaagccgaagaagaaaacatttgaatttaccttcatatgccactaagaacaaaagctctgaagttcttcctgctggcaccaaatattaggattacaagctgtctctctgacaccagtggtaaaaaagcaagtagaatagtttctgagtctgtgttgcagcctctgacacgtggctcaccgctgtcatttgggggatggaatgaacagtcactgttctatagcatcctcctgtgctcttacctaaggaatctaaattgtcctagccttccattgctatgcactgaatgaggactactctcgtgtgtgtgtgtgtgtgtgtgtgtgtgtgtgtgtgtgtgtgtgtgtgtgttggatctactaacatgtttagcaaatggctctgacagggtggccatgagcagatgagaccagctcttgcttggttggaagccacactgcagtttgcagtttagcctttggtgtctcagtggcttcttgcttattccatgctttttctatcccatcctctctctgtgccctcctgcaatggcagccttggcacaatgcctgggtgtcctcatccttgctttactctggaaagtgtggggatggagaggatggtgcatttccagtgcttccttacctgtcaataacaatggtggccacctgggtcccagcacttggctggtggagagatttttttcattatggagctaataaagggtccctacgttttacattgattaatgaattatcacccagacatgtgcagatgaaatgtcaatataagaaaaatcaaggtatttgggaaacatgggcataatcaggtagttttgctaaaattcctcttccttggtctacataaagaagacatgggtctgtcatagaatggggacattagactgaaaactgggacaacccccttccttattttatagagactaggagttaaggggcctgcctaagattgcagtgataaagaactgaaccctaaatcagctcccactaatgaaaccctgctttccttgtatcttttaaactcagttctgcatccaacttgagaagaaaaaaagcttctttccatatcaagtaccatatgagttcatttaaactgcaccttgcagaaatgcattgccagaaagcaccagtagcctcctatctgcaagcagagtagtgctctgctctggggaggggtcattggaaaccataatgcagagtgggccccctactccatttcccagcaaaaggctccagctggagggatgggttgtggggcaacctggttcctgctaactgccagattgaatgtgtgggctagaatgcctgcacatttagttaaactgggctcagcatgcttgtcctcaaaatgtccatcctggtcacagcacacaagatggctattggtctgcttttaccctaccctgtactatacatgaaaattccagttattaacacactcaaactggtggagcttgttcaccctaggaaggggattgtatatatggcaggcttccctggtgccgatgtaaagggctacatttgggaacatttgacttccttgggactcttaagtgcataatgatggcatgaagtaaaaggggcctcaatgatgataggaaaatcagttcttttaaaatttcttcaagaaaatccaggctatcacatagtctttctgtgtgacttattaggagataggaagagcattgggaaacttgcacagctagctatgcatctacattttggtttggggttagttatgaaatgttcttaatatgacgtgttcaataacttcacataaacttcctgttctccaaaacctcaaagagatagagttaatgagttgttgtttttttttaaatgggggtagttttctatctgtcatgggctctagcatctactccgctacccaattctgtcatctccaagctgagtttcctcttctgaggcagaggctggagcagttctttttcagttctcatcctctccatcccaatccagtatatcaatcaactctaactcggagacgtctagctggcaatgtttctaaaactttcactggatttctttagacattgaagcaaacatttttttctaagaattgcttctcagatgatgatatcaaatgtatatgcttttgcaagtttgaaaagttcaaattaaccacttttgactaggtaagtctttctaaaaaccatttaaagctaactgggtcttagcatcctcctgtgtatggaagagacaggtgaccgctccaggttgggtgctcacagaacccttttcctgactctcatggaagatggtggaaggaaaatagactgtctcatcaaccctcctgtgtcctctgaagcaatctcagtttttattaaccacctcttctgtgtttctggtagctatttaacctgtatttaatctgtacttcctatgccagcctcaattttatttgatttttacaattattctcttctaaccaatgaagtgtttgtcagtatgccccaaagcttgctcttttgtgctcccttttgaataactttctatccagaaaaagagattatttgggacttgagatttgcagtgataccaacttatagcaatgatgtactttaagggaactacccaactatgttgtgatagaagaaagagaaaccttcactttggcatttttttttaatcactgtttatttttctgtttgcggcccaggaagcagtgggaggtggtggcagatatgctttgcatatggattgttatgtttttatttgggcaagtttaatcatggaaaactcaaaaagaaggggggaaatggtcagtttaagccaaaagaaactttctaaacaatgtataggtacacagcaaaattaaacaaatccaacaatttctg

SEQ ID NO: 20523 - protein, 717 aa, Homo sapiens [sequence omitted]

SEQ ID NO: 20524 - DNA, 7374 bp, Homo sapiens
ataccaggagtttgtcagggaactgtttccaaagccataatgaataatcaggctgttagtaaaagaagcctctccaagttatagcattttttaaaaattctagtagtgaagaaaataattaaaagcccatctggttgagatagtaattcattaaggaaaaagaggaggcagaaggctggggaataatcgatccttttctttctttatttcatgtgtttcagttattgtgaaatgatagtgatcaaaatctggattctggattgtgcagaatgcaggaaaatcctaggaacattcttggcgtgttctaatagtggcttcccagaaacgagtgttttcagtgggtgtggcgtcattgagctgatgtgcttttgcaaggggtctctttagaagtggtaggggcagggtcgagagaagaaggggatgcagaatctgtacatgaggaaggagccagagtcactcaggaaactcctcattcttcctgcgctggctgtggcacacccaccggtggcacacccctccctcgggtccagttcagcccacagactcctgggaggagagccagggccccagcctctcctttgaggagtgttgcagcctttctgtgtgccagatgcctagtgaagaaaagctgaaaccctggagctttgtgcatgttaatgaccttggaaatgactgagctcacggaccctcatcacaccatgggagactacaaagtggcccaccctcaggaccctcaccacccatcagagaagcctgtcattcactgccataaatgtggggagccttgcaagggtgaagtgcttcgggtccagaccaaacatttccacatcaagtgtttcacctgcaaagtgtgtggctgtgacctggcacaagggggcttcttcataaagaacggagagtatctctgcaccctggactaccagcggatgtacgggacacgctgccatggctgtggggagttcgtggagggcgaagtggtgactgctctgggcaagacctaccatcccaattgctttgcttgtactatctgcaagcgcccgtttccacccggagaccgagtcacattcaatgggagagactgcctttgtcaactctgtgcacagccgatgtcgtccagtccgaaagaaaccaccttctccagcaattgtgccggctgcggaagagatatcaagaatgggcaggcgctgctggcgctggataagcagtggcacttggggtgctttaaatgcaagtcctgcgggaaggtcctcaccggggagtacatcagcaaggatggtgctccgtactgtgaaaaggactaccagggactctttggggtgaaatgtgaggcgtgtcaccagtttatcacagggaaagtcctggaggcaggtgacaaacattaccaccccagctgtgcacgatgcagcagatgcaaccagatgttcacagaaggagaggaaatgtatcttcaaggctccaccgtttggcatcccgactgtaagcaatctacgaagaccgaggaaaagctgcggctgccaaacattcggcgttcttcatccgatttcttttattccaaaagtctgattcgacgcacaggacggtctccgtctctgcagcctaccaggacatcctcggaaagtatttattctaggccaggctccagtattcctggctcaccaggtcatactatctatgcaaaagtagacaatgagatcctggattacaaggatttagcagccattccgaaggtcaaggcaatttatgacattgaacgtccagatcttattacctatgagcctttctacacttcgggctatgatgacaaacaggagagacagagccttggagagtctccgaggactttgtctcctactccatcagcagaagggtaccaggatgttcgggatcggatgatccatcggtccacgagccagggctccatcaactcccctgtgtacagccgccacagctacactccaaccacgtcccgctctccccagcatttccacagacctggcaatgagccgtccagcggccggaactcccctctcccttaccggccagacagccgccctctaactccaacttacgctcaggcccctaaacatttccatgttccagatcaaggaatcaacatttaccgaaagccacccatctacaaacagcatgctgccttggcagcccagagcaagtcctcagaagatatcatcaagttttccaagttcccagcagcccaggcaccagaccccagcgagacaccaaagattgagacggaccactggcctggtcccccctcatttgctgtcgtaggacctgacatgaaacgcagatctagtggcagagaggaagatgatgaggaacttctgagacgtcggcagcttcaagaagagcaattaatgaagcttaactcaggcctgggacagttgatcttgaaagaagagatggagaaagagagccgggaaaggtcatctctgttagccagtcgctacgattctcccatcaactcagcttcacatattccatcatctaaaactgcatctctccctggctatggaagaaatgggcttcaccggcctgtttctaccgacttcgctcagtataacagctatggggatgtcagcgggggagtgcgagttgcagacactcccagatggccacatgcctgcaatgagaatggaccgaggagtgtctatgcccaacatgttggaaccaaagatatttccatatgaaatgctcatggtgaccaacagagggcgaaacaaaatcctcagagaggtggacagaaccaggctggagcgccacttagcccctgaagtgtttcgggaaatctttggaatgtccatacaggagtttgacaggttacctctttggagacgcaacgacatgaagaaaaaagcaaaactcttctaagtcccactcgtgaatggcaattagagaaaggactgacagtggcggtgccccataggatgtcatattgaggcccaaacttgattggagaatttgcaaactaccgtcgctcagcaacaccaaaaagagaaagtctggttaaaacaccatgagtcaaatgtcgggccagccaacagtaacacttgccaagaagcatggcgtagaaatttctatgttccgaaacacagagtagtgtccacatgtgagcttttcacattaccttatgtatacaacaggagctgcgttgttttcttctttttcttttcctttatctgttgtccaacaacagtgctgactgtccggataagagctggcaagtgcccttaggatgccgcatgggaaaaatcggttatcataatttcaaagtataaatatatttattaagtagcgctgcggctaagaaggaagagtgaggggtctgtccatggggtggcagtgatttcacacccgcctttcttgaatggcttcgtgttactcagccgtgccctggcaggaatggaactccatcagggaacagggcagctctgtttgaatggggtgaaaaacagcaaaattaattcttagcaagctccttgttctctactgttcaccgggacctggctggcaaatgacttagctattagtatatttaaaaactgttcaaaagcaaaagagaaggaacaggaatgaaaggaaaccttcccttaactctttctgcttcccatagcaggtctggttcctgctccccgcctaggacaggagctgtctggagctccacctttgcaaagaaaggaaaaacacaaattgcccccagattggcccagtggcatgccattaggtgattttgcataggggccatatcattcatggccaaaaaaaaccaaaaagcaaaaaacaaaaacaagtcccatgtcctactgactctagttcttccagtcgttatcctctgctgtctctctggcatcctatgaatcagatcaagcccatgctgttgttggtttttaaggtttctttcaataataggctaaggaaagacatgtttttctcttttaaatctctgcaactccaaagtagactccttcgaacgtatttaatttggccttttcagctttcttcttgcccagctctgtcgaattcatgggtgtgtgtgcacatgttggtttcactcacccagagtaattttgtgagcatgcatgtgctttttaatttctgcttgaatgtttgtcctgctgtgttgcagcttctaaagacattgtcaccgagtgtgtgtgactcaaagatcaagagtgaggctaaactgcgaccccaacatcacttccttcatggaaaggtgttggcgctgatgtagctcatggaaggatcagactgggaaccacagaggaaggatgaggtgggatgtggaggtcagagcatctcacgagagtccctcaggctctgcaacactagattcgaatatgagcctagggtttccccaacacgtgcgtgcatatgaaaccacatcatgattcccgacgtgagttagatgagggagagtttgtgtaactccacacccaggagggtaagccactttattatcatgctttggggctgtgcttaagaatttaagctctgttttaaagccgaagaagaaaacatttgaatttaccttcatatgccactaagaacaaaagctctgaagttcttcctgctggcaccaaatattaggattacaagctgtctctctgacaccagtggtaaaaaagcaagtagaatagtttctgagtctgtgttgcagcctctgacacgtggctcaccgctgtcatttgggggatggaatgaacagtcactgttctatagcatcctcctgtgctcttacctaaggaatctaaattgtcctagccttccattgctatgcactgaatgaggactactctcgtgtgtgtgtgtgtgtgtgtgtgtgtgtgtgtgtgtgtgtgtgtgtgtgttggatctactaacatgtttagcaaatggctctgacagggtggccatgagcagatgagaccagctcttgcttggttggaagccacactgcagtttgcagtttagcctttggtgtctcagtggcttcttgcttattccatgctttttctatcccatcctctctctgtgccctcctgcaatggcagccttggcacaatgcctgggtgtcctcatccttgctttactctggaaagtgtggggatggagaggatggtgcatttccagtgcttccttacctgtcaataacaatggtggccacctgggtcccagcacttggctggtggagagatttttttcattatggagctaataaagggtccctacgttttacattgattaatgaattatcacccagacatgtgcagatgaaatgtcaatataagaaaaatcaaggtatttgggaaacatgggcataatcaggtagttttgctaaaattcctcttccttggtctacataaagaagacatgggtctgtcatagaatggggacattagactgaaaactgggacaacccccttccttattttatagagactaggagttaaggggcctgcctaagattgcagtgataaagaactgaaccctaaatcagctcccactaatgaaaccctgctttccttgtatcttttaaactcagttctgcatccaacttgagaagaaaaaaagcttctttccatatcaagtaccatatgagttcatttaaactgcaccttgcagaaatgcattgccagaaagcaccagtagcctcctatctgcaagcagagtagtgctctgctctggggaggggtcattggaaaccataatgcagagtgggccccctactccatttcccagcaaaaggctccagctggagggatgggttgtggggcaacctggttcctgctaactgccagattgaatgtgtgggctagaatgcctgcacatttagttaaactgggctcagcatgcttgtcctcaaaatgtccatcctggtcacagcacacaagatggctattggtctgcttttaccctaccctgtactatacatgaaaattccagttattaacacactcaaactggtggagcttgttcaccctaggaaggggattgtatatatggcaggcttccctggtgccgatgtaaagggctacatttgggaacatttgacttccttgggactcttaagtgcataatgatggcatgaagtaaaaggggcctcaatgatgataggaaaatcagttcttttaaaatttcttcaagaaaatccaggctatcacatagtctttctgtgtgacttattaggagataggaagagcattgggaaacttgcacagctagctatgcatctacattttggtttggggttagttatgaaatgttcttaatatgacgtgttcaataacttcacataaacttcctgttctccaaaacctcaaagagatagagttaatgagttgttgtttttttttaaatgggggtagttttctatctgtcatgggctctagcatctactccgctacccaattctgtcatctccaagctgagtttcctcttctgaggcagaggctggagcagttctttttcagttctcatcctctccatcccaatccagtatatcaatcaactctaactcggagacgtctagctggcaatgtttctaaaactttcactggatttctttagacattgaagcaaacatttttttctaagaattgcttctcagatgatgatatcaaatgtatatgcttttgcaagtttgaaaagttcaaattaaccacttttgactaggtaagtctttctaaaaaccatttaaagctaactgggtcttagcatcctcctgtgtatggaagagacaggtgaccgctccaggttgggtgctcacagaacccttttcctgactctcatggaagatggtggaaggaaaatagactgtctcatcaaccctcctgtgtcctctgaagcaatctcagtttttattaaccacctcttctgtgtttctggtagctatttaacctgtatttaatctgtacttcctatgccagcctcaattttatttgatttttacaattattctcttctaaccaatgaagtgtttgtcagtatgccccaaagcttgctcttttgtgctcccttttgaataactttctatccagaaaaagagattatttgggacttgagatttgcagtgataccaacttatagcaatgatgtactttaagggaactacccaactatgttgtgatagaagaaagagaaaccttcactttggcatttttttttaatcactgtttatttttctgtttgcggcccaggaagcagtgggaggtggtggcagatatgctttgcatatggattgttatgtttttatttgggcaagtttaatcatggaaaactcaaaaagaaggggggaaatggtcagtttaagccaaaagaaactttctaaacaatgtataggtacacagcaaaattaaacaaatccaacaatttctg

SEQ ID NO: 20525 - protein, 685 aa, Homo sapiens; identical to SEQ ID NO: 20509

SEQ ID NO: 20526 - DNA, 2324 bp, Homo sapiens
gaggagaggaggcgtgagagagcgtgcctgcccgccgcacacggggctggtttccggagtgcgtctctagagggatgcacgttgccttagccgagcttcggagagaagcctgatatgtaacccaggcaggtgggagcctcagtctgtcgggctgaggtctggcatctacaaagcctcttggccgtgttctgaacttgaagcctggaggagttctctgctcagcacagccaaggaacagaattagaagaaaaggaaccctggcctgaggcaggtgacaaacattaccaccccagctgtgcacgatgcagcagatgcaaccagatgttcacagaaggagaggaaatgtatcttcaaggctccaccgtttggcatcccgactgtaagcaatctacgaagaccgaggaaaagctgcgggcaaaagtagacaatgagatcctggattacaaggatttagcagccattccgaaggtcaaggcaatttatgacattgaacgtccagatcttattacctatgagcctttctacacttcgggctatgatgacaaacaggagagacagagccttggagagtctccgaggactttgtctcctactccatcagcagaagggtaccaggatgttcgggatcggatgatccatcggtccacgagccagggctccatcaactcccctgtgtacagccgccacagctacactccaaccacgtcccgctctccccagcatttccacagacctgatcaaggaatcaacatttaccgaaagccacccatctacaaacagcatgctgccttggcagcccagagcaagtcctcagaagatatcatcaagttttccaagttcccagcagcccaggcaccagaccccagcgagacaccaaagattgagacggaccactggcctggtcccccctcatttgctgtcgtaggacctgacatgaaacgcagatctagtggcagagaggaagatgatgaggaacttctgagacgtcggcagcttcaagaagagcaattaatgaagcttaactcaggcctgggacagttgatcttgaaagaagagatggagaaagagagccgggaaaggtcatctctgttagccagtcgctacgattctcccatcaactcagcttcacatattccatcatctaaaactgcatctctccctggctatggaagaaatgggcttcaccggcctgtttctaccgacttcgctcagtataacagctatggggatgtcagcgggggagtgcgagttgcagacactcccagatggccacatgcctgcaatgagaatggaccgaggagtgtctatgcccaacatgttggaaccaaagatatttccatatgaaatgctcatggtgaccaacagagggcgaaacaaaatcctcagagaggtggacagaaccaggctggagcgccacttagcccctgaagtgtttcgggaaatctttggaatgtccatacaggagtttgacaggttacctctttggagacgcaacgacatgaagaaaaaagcaaaactcttctaagtcccactcgtgaatggcaattagagaaaggactgacagtggcggtgccccataggatgtcatattgaggcccaaacttgattggagaatttgcaaactaccgtcgctcagcaacaccaaaaagagaaagtctggttaaaacaccatgagtcaaatgtcgggccagccaacagtaacacttgccaagaagcatggcgtagaaatttctatgttccgaaacacagagtagtgtccacatgtgagcttttcacattaccttatgtatacaacaggagctgcgttgttttcttctttttcttttcctttatctgttgtccaacaacagtgctgactgtccggataagagctggcaagtgcccttaggatgccgcatgggaaaaatcggttatcataatttcaaagtataaatatatttattaagtagcgctgcggctaagaaggaagagtgaggggtctgtccatggggtggcagtgatttcacacccgcctttcttgaatggcttcgtgttactcagccgtgccctggcaggaatggaactccatcagggaacagggcagctctgtttgaatggggtgaaaaacagcaaaattaattcttagcaagctccttgttctctactgttcaccgggacctggctggcaaatgacttagctattagtatatttaaaaactgttcaaaagcaaaagagaaggaacaggaatgaaaggaaaccttcccttaactctttctgcttcccatagcaggtctggttcctgctccccgcctaggacaggagctgtctggagctccacctttgc

SEQ ID NO: 20527 - protein, 340 aa, Homo sapiens
MFTEGEEMYLQGSTVWHPDCKQSTKTEEKLRAKVDNEILDYKDLAAIPKVKAIYDIERPDLITYEPFYTSGYDDKQERQSLGESPRTLSPTPSAEGYQDVRDRMIHRSTSQGSINSPVYSRHSYTPTTSRSPQHFHRPDQGINIYRKPPIYKQHAALAAQSKSSEDIIKFSKFPAAQAPDPSETPKIETDHWPGPPSFAVVGPDMKRRSSGREEDDEELLRRRQLQEEQLMKLNSGLGQLILKEEMEKESRERSSLLASRYDSPINSASHIPSSKTASLPGYGRNGLHRPVSTDFAQYNSYGDVSGGVRVADTPRWPHACNENGPRSVYAQHVGTKDISI

SEQ ID NO: 20528 - DNA, 245 bp, Homo sapiens
gctattatattcattttattcatgcccaggacgtgagtcccgatttaagcctttgtccatttgggtaataagaaatcctttatgtgggattacaggcgtgagctatcatgctcagccgacagattattttaaattataagtgctaattagtattttgggggaaaatttttatttataaaatgtcaagattatactttagagaatgtttataaaatcataaagaaattatgctgtttttttttctt

SEQ ID NO: 20529 - protein, 45 aa, Homo sapiens
LLYSFYSCPGRESRFKPLSIWVIRNPLCGITGVSYHAQPTDYFKL

SEQ ID NO: 20530 - DNA, 800 bp, Homo sapiens
caaagagttaacaaacattgtgactttaaattctcttttatttttctagtctccgaggactttgtctcctactccatcagcagaagggtaccaggatgttcgggatcggatgatccatcggtccacgagccagggctccatcaactcccctgtgtacagccgccacagctacactccaaccacgtcccgctctccccagcatttccacagacctggtaagggtgactgttcctggattcactctatataacaaactatgtttctgtgattttttcccctactattgatagcacattgaaaaatcaacgactaaacatttccatccctctcccagagcaaaatgaaaactggtatccaactatattttatgctctatcttttcttgaaacatcagtcatcctaagcctgtgttcattttgatttattaaataattatattttgacagcgagctactggaagcaaggggtttttttaaaaatttttttacgattaacaaaaatctcttcactttgagacttaaaatggagatctcccaaagaaaatattttgatgtgctttttaggcataccaacatcatctaaaattcagtattagccatttttaacagctggattatgtttcccttatctaggtgttagtaagcatgcttggttaagcactttctagaaagaggactcagggctgttcttgatcacttttaagatcgttccaaccctaagattttcagtcattcttaggaaacataaaatcatttccaaccctaagattttccctcagacttggaaaacaaaatcatttc

SEQ ID NO: 20531 - protein, 46 aa, Homo sapiens
MIHRSTSQGSINSPVYSRHSYTPTTSRSPQHFHRPGKGDCSWIHSI

SEQ ID NO: 20532 - DNA, 2353 bp, Homo sapiens
gtggaataacatgttcttttaaacgtagagtttaaacattgagttgcatcattgtgaggaaaaccacttagtattttatagtgaggtgactttacaagtaaagatcttcaagaagatttttatgtgatttaaaaaatcagcttagatgcttggaatttggattgttgcattcttgttctttggcacatcaagaggaaaagaagtttgctatgaaaggttagggtgtttcaaagatggtttaccatggaccaggactttctcaacagagttggtaggtttaccctggtctccagagaagataaacactcgtttcctgctctacactatacacaatcccaatgcctatcaggagatcagtgcggttaattcttcaactatccaagcctcatattttggaacagacaagatcacccgtatcaacatagctggatggaaaacagatggcaaatggcagagagacatgtgcaatgtgttgctacagctggaagatataaattgcattaatttagattggatcaacggttcacgggaatacatccatgctgtaaacaatctccgtgttgttggtgctgaggtggcttattttattgatgttctcatgaaaaaatttgaatattccccttctaaagtgcacttgattggccacagcttgggagcacacctggctggggaagctgggtcaaggataccaggccttggaagaataactgggttggacccagctgggccatttttccacaacactccaaaggaagtcaggctagacccctcggatgccaactttgttgacgttattcatacaaatgcagctcgcatcctctttgagcttggtgttggaaccattgatgcttgtggtcatcttgacttttacccaaatggagggaagcacatgccaggatgtgaagacttaattacacctttactgaaatttaacttcaatgcttacaaaaaagaaatggcttccttctttgactgtaaccatgcccgaagttatcaattttatgctgaaagcattcttaatcctgatgcatttattgcttatccttgtagatcctacacatcttttaaagcaggaaattgcttcttttgttccaaagaaggttgcccaacaatgggtcattttgctgatagatttcacttcaaaaatatgaagactaatggatcacattattttttaaacacagggtccctttccccatttgcccgttggaggcacaaattgtctgttaaactcagtggaagcgaagtcactcaaggaactgtctttcttcgtgtaggcggggcagttaggaaaactggggagtttgccattgtcagtggaaaacttgagccaggcatgacttacacaaaattaatcgatgcagatgttaacgttggaaacattacaagtgttcagttcatctggaaaaaacatttgtttgaagattctcagaataagttgggagcagaaatggtgataaatacatctgggaaatatggatataaatctaccttctgtagccaagacattatgggacctaatattctccagaacctgaaaccatgctaatctcagatacagtcttgatggatttctttagtaggagcaatgaagaaaagtgtctccttccacctggcatccagaccaaatttgacccttgtaaatgacttagtcatttacaagggtcttactcagagtcaagtacgggtttgctttttttctgtgtagaatgttcatctaactgcaccttaaaaacacactgaaccctgggacaaaagataattactatgatctgtaggaatctggatatcattgacaaaatagagctgttttggaattttcctgaataagaggaggtgatgcaaatgtatgttgagtgtataaactcactggacaaaagtaagcctctggcttgctgagtttttgaagtatattttcaggtataataatcattgttctaaaattatataaaactatttgttatgttgttaaatcttgctgagacaaattatgactatagtgcatgatatatagtagattataaccttgtgggttgatgtgtctatctagtaataataaaaactaatgagatggcactagtatttccaaggtgttccttggtgttcagggtgtgcacaagagagattttggagcttatctgttatgtgttcatcagttagcaatgggacctgaagttcaacaacccagggtatagcccccttcctccaaagtccctgccacaggagaattactcctctccctgggtcttgaatgctctatggtgaatttgtatttagcctcaaggcagcatttcatttgtaaagcacttgggtaaccctttgttcttgcaataacaatattataatatttaaa

SEQ ID NO: 20533 - protein, 467 aa, Homo sapiens
MLGIWIVAFLFFGTSRGKEVCYERLGCFKDGLPWTRTFSTELVGLPWSPEKINTRFLLYTIHNPNAYQEISAVNSSTIQASYFGTDKITRINIAGWKTDGKWQRDMCNVLLQLEDINCINLDWINGSREYIHAVNNLRVVGAEVAYFIDVLMKKFEYSPSKVHLIGHSLGAHLAGEAGSRIPGLGRITGLDPAGPFFHNTPKEVRLDPSDANFVDVIHTNAARILFELGVGTIDACGHLDFYPNGGKHMPGCEDLITPLLKFNFNAYKKEMASFFDCNHARSYQFYAESILNPDAFIAYPCRSYTSFKAGNCFFCSKEGCPTMGHFADRFHFKNMKTNGSHYFLNTGSLSPFARWRHKLSVKLSGSEVTQGTVFLRVGGAVRKTGEFAIVSGKLEPGMTYTKLIDADVNVGNITSVQFIWKKHLFEDSQNKLGAEMVINTSGKYGYKSTFCSQDIMGPNILQNLKPC

SEQ ID NO: 20534 - DNA, 598 bp, Homo sapiens
caacagagttggtaggtttaccctggtctccagagaagataaacactcgtttcctgctctacactatacacaatcccaatgcctatcagcaaatcccacatctggtttgggccctatcagcagagaacactataatcagaacatcgcttgagagcccagtggttaagcacctaacttcaaaggccatgtggatttgaactctggctccaggattcattagctgcagtactttttggagatcagtgcggttaattcttcaactatccaagcctcatattttggaacagacaagatcacccgtatcaacatagctggatggaaaacagatggcaaatggcagagagacatgtgcaatgtatgacatgaataagctcctttttacactagcatgcgagctttatgtttaacatgaatgtactttgcaaggtattgatgtatattcatggaaatcttccattcagttatccacaattatccgtgttctggggcctcaaattagttatccatttcccatttatttttattataaattgcacagattacaagggaagcaaatttgtataatcactcttgaataaattcttctcttgacaggaga

SEQ ID NO: 20535 - protein, 54 aa, Homo sapiens
MFNMNVLCKVLMYIHGNLPFSYPQLSVFWGLKLVIHFPFIFIINCTDYKGSKFV

SEQ ID NO: 20536 - DNA, 579 bp, Homo sapiens
gcgtgtggaacctgacggaactgccacgatgctgccactttggactctttcactgctgctgggagcagtagcaggaaaagaagtttgctacgaaagactcggctgcttcagtgatgactccccatggtcaggaattacggaaagacccctccatatattgccttggtctccaaaagatgtcaacacccgcttcctcctatatactaatgagaacccaaacaactttcaagaagttgccgcagattcatcaagcatcagtggctccaatttcaaaacaaatagaaaaactcgctttattattcatggattcatagacaagggagaagaaaactggctggccaatgtgtgcaagaatctgttcaaggtggaaagtgtgaactgtatctgtgtggactggaaaggtggctcccgaactggatacacacaagcctcgcagaacatcaggatcgtgggagcagaagtggcatattttgttgaatttcttcaggtaattactcccggattgcataaaagcctgtacacatggttttccagattatctttccaaaaaaaaaaaaaaaagcctgtagatttaatcat

SEQ ID NO: 20537 - protein, 182 aa, Homo sapiens
MLPLWTLSLLLGAVAGKEVCYERLGCFSDDSPWSGITERPLHILPWSPKDVNTRFLLYTNENPNNFQEVAADSSSISGSNFKTNRKTRFIIHGFIDKGEENWLANVCKNLFKVESVNCICVDWKGGSRTGYTQASQNIRIVGAEVAYFVEFLQVITPGLHKSLYTWFSRLSFQKKKKKPVDL

SEQ ID NO: 20538 - DNA, 1488 bp, Homo sapiens
gcgtgtggaacctgacggaactgccacgatgctgccactttggactctttcactgctgctgggagcagtagcaggaaaagaagtttgctacgaaagactcggctgcttcagtgatgactccccatggtcaggaattacggaaagacccctccatatattgccttggtctccaaaagatgtcaacacccgcttcctcctatatactaatgagaacccaaacaactttcaagaagttgccgcagattcatcaagcatcagtggctccaatttcaaaacaaatagaaaaactcgctttattattcatggattcatagacaagggagaagaaaactggctggccaatgtgtgcaagaatctgttcaaggtggaaagtgtgaactgtatctgtgtggactggaaaggtggctcccgaactggatacacacaagcctcgcagaacatcaggatcgtgggagcagaagtggcatattttgttgaatttcttcagtcggcgttcggttactcaccttccaatgtgcatgtcattggccacagcctgggtgcccacgctgctggggaggctggaaggagaaccaatgggaccattggacgcatcacagggttggacccagcagaaccttgctttcagggcacacctgaattagtccgattggaccccagcgatgccaaatttgtggatgtaattcacacggatggtgcccccatagtccccaatttggggtttggaatgagccaagtcgtgggccacctagatttctttccaaatggaggagtggaaatgcctggatgtaaaaagaacattctctctcagattgtggacatagacggaatctgggaagggactcgagactttgcggcctgtaatcacttaagaagctacaaatattacactgatagcatcgtcaaccctgatggctttgctggattcccctgtgcctcttacaacgtcttcactgcaaacaagtgtttcccttgtccaagtggaggctgcccacagatgggtcactatgctgatagatatcctgggaaaacaaatgatgtgggccagaaattttatctagacactggtgatgccagtaattttgcacgttggaggtataaggtatctgtcacactgtctggaaaaaaggttacaggacacatactagtttctttgttcggaaataaaggaaactctaagcagtatgaaattttcaagggcactctcaaaccagatagtactcattccaatgaatttgactcagatgtggatgttggggacttgcagatggttaaatttatttggtataacaatgtgatcaacccaactttacctagagtgggagcatccaagattatagtggagacaaatgttggaaaacagttcaacttctgtagtccagaaaccgtcagggaggaagttctgctcaccctcacaccgtgttaggagactactgttatttgaccaatgaattgacttctaataaaatctagtggtgatgcattaca

SEQ ID NO: 20539 - protein, 465 aa, Homo sapiens; identical to SEQ ID NO: 2597

SEQ ID NO: 20540 - DNA, 502 bp, Homo sapiens
gtgtggaacctgacggaactgccacgatgctgccactttggactctttcactgctgctgggagcagtagcaggaaaagaagtttgctacgaaagactcggctgcttcagtgatgactccccatggtcaggaattacggaaagacccctccatatattgccttggtctccaaaagatgtcaacacccgcttcctcctatatactaatgagaacccaaacaactttcaagaagttgccgcagattcatcaagcatcagtggctccaatttcaaaacaaatagaaaaactcgctttattattcatggattcatagacaagggagaagaaaactggctggccaatgtgtgcaaggtgagatgtggtcatctctcaaggaaagatcgtttccaaagtggtaattaacaaacggtaaggcactggccccgaccaatgaggacagtgcttggaggtcttggaggatattcagacccctgctgggcctggagttcctaggggaggtcaag

SEQ ID NO: 20541 - protein, 124 aa, Homo sapiens
MLPLWTLSLLLGAVAGKEVCYERLGCFSDDSPWSGITERPLHILPWSPKDVNTRFLLYTNENPNNFQEVAADSSSISGSNFKTNRKTRFIIHGFIDKGEENWLANVCKVRCGHLSRKDRFQSGN

SEQ ID NO: 20542 - DNA, 572 bp, Homo sapiens
gatgctgccactttggactctttcactgctgctgggagcagtagcaggaaaagaagtttgctacgaaagactcggctgcttcagtgatgactccccatggtcaggaattacggaaagacccctccatatattgccttggtctccaaaagatgtcaacacccgcttcctcctatatactaatgagaacccaaacaactttcaagaagttgccgcagattcatcaagcatcagtggctccaatttcaaaacaaatagaaaaactcgctttattcttaaatccttaggggcactctcaaaccagatagtactcattccaatgaatttgactcagatgtggatgttggggacttgcagatggttaaatttatttggtataacaatgtgatcaacccaactttacctagagtgggagcatccaagattatagtggagacaaatgttggaaaacagttcaacttctgtagtccagaaaccgtcagggaggaagttctgctcaccctcacaccgtgttaggagactactgttatttgaccaatgaattgacttctaataaaatctagtggtgatgcatt

SEQ ID NO: 20543 - protein, 127 aa, Homo sapiens
MLPLWTLSLLLGAVAGKEVCYERLGCFSDDSPWSGITERPLHILPWSPKDVNTRFLLYTNENPNNFQEVAADSSSISGSNFKTNRKTRFILKSLGALSNQIVLIPMNLTQMWMLGTCRWLNLFGITM

SEQ ID NO: 20544 - DNA, 513 bp, Homo sapiens
gggcacactgctgtatttagagatgacgtcttgggcttgtctattcttctggctctagcaatgccctcagagagctttggccatttcttcccggctggcttaggcaacacctggattttgttgaatgccaaccctgggactgtgataagcccataatatggtccattgagccaggagtccaccacttgccttcactgtagagtagccctgcccctcacagtgggaattgggacacttgtcctgccaacttggttcctccctctccatctctttttcccagaagtccttggtccagaaataaggggtattttcctatacgaatatgtcttctccaggtatcagcctcacagtaagccttaggctagctggggcattttctcttcacatagagaaaattccgggatctgaatccttcagggcttgatatgctaaacatgagctaaaacaattgaaaaaagccgggcgcggtggctcatgcctcagcctcccaagtagctgggactacaggcgccc

SEQ ID NO: 20545 - protein, 33 aa, Homo sapiens
MSSPGISLTVSLRLAGAFSLHIEKIPGSESFRA

SEQ ID NO: 20546 - DNA, 1848 bp, Homo sapiens
gaagctactgtgagggctgttgaatttttctccaaagctcagatgcccagtattcctagtcttcgaaagagagagaggaagattgagagagagagagagagagagagagagagaagaagttttcttaatcagagatttctctttactttcaactaattgcagatgctgatcttctggacaatcacacttttcctgctgggagcagccaaaggaaaagaagtttgctatgaggacctcgggtgcttttctgacactgagccctggggcgggacagcaatcaggcccctgaaaattctcccctggagccctgagaagatcggcacccgcttcctgctgtacaccaatgaaaacccaaacaactttcaaattctcctcctctctgatccatcaacaattgaggcatcaaattttcaaatggacagaaagacccggttcatcatccatggcttcatagacaaaggagatgagagctgggtgacagacatgtgcaagaaactgttcgaggtggaggaggtgaactgcatctgcgtggactggaagaagggctcccaagccacctacacacaggctgccaacaacgtgcgagtggtgggcgcccaggtggcccagatgctcgacatcctcttggtgagtcagctggctggcctatgtgaggagggaagcagtgcctgctggtctctgtttggtagagatgcagctgagagttatggattaaagaaggacaaagaattgatatccagaccttacttctaaaactctgaaatttgccttcataatgacacgccagtggaagcaaaaataagaatcgctaacacttagaaagtggttttttaaaaatcatcttcaatttacagataaagaaactgaggcccagaaagtttaactagtttgctcccaaagtcataaagcaaatgaatagaagacctgccttttgatccagaccatctagcttcagaattcacccacaacaccaggtgggctctgtttcgcgtgaaacacagcatggccagagagagccacagagagccaacggacagtacgtgcaattggcatgtaccagctctactggcctggtggtatgggtcctattgatgttggggaattccttctgccacaatcatttcacttatttcttcctatactgtttcattatagctaactccttcagtctttaattctttaagttgctaatcctttgtgactattttctataccaggtaatgactacagccatttctgtcttatagttaaagggtctacaaaagaatcaacttctgcactcctgcagaaatcaaaacccatggtatttgtgcaagaagtatgatagaccaataaatgaagtgcctttgggtgaacgtctctgagatcaacatgtgcaaatacctcatagctctatttgatttgcttgttcaccagtacttttggagcagaatgtcaggagtatgtgaggaagtaaagaagacacatgagatcccagaccatcaaggagcttgcagtgaaaacttgcaatgccagtagagtgcgatctattagtgggttctgatggggagagtaggagctttacaggaacacatagaaggcagctaatccacactgatggggtggggaaagggcttaaggaggtctcccaaggaagagacgtctaaattgacagctgaaggctagtctgttgatgttagctggcaagtgcttgggggatagacaacaacaagaagagaagaacaaaccaggcccagaggtgagaggctatgatgtattcgagggtctgaaagttcaacaaagggtttggctgaagagtctagaaaaatagatgatgagttaggaaagctcggaggccttcagaatgag

SEQ ID NO: 20547 - protein, 196 aa, Homo sapiens
MLIFWTITLFLLGAAKGKEVCYEDLGCFSDTEPWGGTAIRPLKILPWSPEKIGTRFLLYTNENPNNFQILLLSDPSTIEASNFQMDRKTRFIIHGFIDKGDESWVTDMCKKLFEVEEVNCICVDWKKGSQATYTQAANNVRVVGAQVAQMLDILLVSQLAGLCEEGSSACWSLFGRDAAESYGLKKDKELISRPYF

SEQ ID NO: 20548 - DNA, 1101 bp, Homo sapiens
ttgaatttttctccaaagctcagatgcccagtattcctagtcttcgaaagagagagaggaagattgagagagagagagagagagagagagagagaagaagttttcttaatcagagatttctctttactttcaactaattgcagatgctgatcttctggacaatcacacttttcctgctgggagcagccaaaggaaaagaagtttgctatgaggacctcgggtgcttttctgacactgagccctggggcgggacagcaatcaggcccctgaaaattctcccctggagccctgagaagatcggcacccgcttcctgctgtacaccaatgaaaacccaaacaactttcaaattctcctcctctctgatccatcaacaattgaggcatcaaattttcaaatggacagaaagacccggttcatcatccatggcttcatagacaaaggagatgagagctgggtgacagacatgtgcaaggtaggagccagctctgatccctgtggccagctgaggccaacacttctgctaacatctctgcatcactttatgcactcaagaaatctttacatattaggtaactttatgcaattaaaatgcttctcttcacaaaaattaaaatgcctttccatgtttccgcactacatctgcacactgaagcaaccacatttgctgttagaaaagtactcctactacctaatttctggttaaaccaaggcctgatgttttctgcttccatttgtagtgagggtactttgtatcctataagcgagggactataggggtttctttgttcaaatttttcccacatccctgagaggctgacatgtgttgctgtgaccacttaattgatcccagcactttgggaggccaaggtggatggatcacctgaggtcaggagttcgagaccagcctggcgaacatggtgaaaccctatctctactaatgatacaaaaatcagcctgttgtggtggcaggctcttgtagtcccagctacttgggaggctgaggcaggaaaattgcttgaacccaggaggcaaaggttgcaatgagccaatattgtgccactacactccagcctgggcaacagagtgagactccatctcaa

SEQ ID NO: 20549 - protein, 186 aa, Homo sapiens
MLIFWTITLFLLGAAKGKEVCYEDLGCFSDTEPWGGTAIRPLKILPWSPEKIGTRFLLYTNENPNNFQILLLSDPSTIEASNFQMDRKTRFIIHGFIDKGDESWVTDMCKVGASSDPCGQLRPTLLLTSLHHFMHSRNLYILGNFMQLKCFSSQKLKCLSMFPHYICTLKQPHLLLEKYSYYLISG

SEQ ID NO: 20550 - DNA, 995 bp, Homo sapiens
gatccggtgggagggaacatctggaacattagacaggatgctgatcttctggacaatcacacttttcctgctgggagcagccaaaggaaaagaagtttgctatgaggacctcgggtgcttttctgacactgagccctggggcgggacagcaatcaggcccctgaaaattctcccctggagccctgagaagatcggcacccgcttcctgctgtacaccaatgaaaacccaaacaactttcaaattctcctcctctctgatccatcaacaattgaggcatcaaattttcaaatggacagaaagacccggttcatcatccatggcttcatagacaaaggagatgagagctgggtgacagacatgtgcaaggtaggagccagctctgatccctgtggccagctgaggccaacacttctgctaacatctctgcatcactttatgcactcaagaaatctttacatattaggtaactttatgcaattaaaatgcttctcttcacaaaaattaaaatgcctttccatgtttccgcactacatctgcacactgaagcaaccacatttgctgttagaaaagtactcctactacctaatttctggttaaaccaaggcctgatgttttctgcttccatttgtagtgagggtactttgtatcctataagcgagggactataggggtttctttgttcaaatttttcccacatccctgagaggctgacatgtgttgctgtgaccacttaattgatcccagcactttgggaggccaaggtggatggatcacctgaggtcaggagttcgagaccagcctggcgaacatggtgaaaccctatctctactaatgatacaaaaatcagcctgttgtggtggcaggctcttgtagtcccagctacttgggaggctgaggcaggaaaattgcttgaacccaggaggcaaaggttgcaatgagccaatattgtgccactacactccagcctgggcaacagagtgagactccatctcaa

SEQ ID NO: 20551 - protein, 186 aa, Homo sapiens; identical to SEQ ID NO: 20549

SEQ ID NO: 20552 - DNA, 2137 bp, Homo sapiens
gatccggtgggagggaacatctggaacattagacaggatgctgatcttctggacaatcacacttttcctgctgggagcagccaaaggaaaagaagtttgctatgaggacctcgggtgcttttctgacactgagccctggggcgggacagcaatcaggcccctgaaaattctcccctggagccctgagaagatcggcacccgcttcctgctgtacaccaatgaaaacccaaacaactttcaaattctcctcctctctgatccatcaacaattgaggcatcaaattttcaaatggacagaaagacccggttcatcatccatggcttcatagacaaaggagatgagagctgggtgacagacatgtgcaagcagcctggggcatcgccaagagcctgaaaggaccccttacagtcaaatccacaaggtcatttagacactggccaccggagattgcacctaagacttttccttttcaaaacaggactcttttcatgatgcaattgtttttcccttactaaccaaccttactgaatttggttgaaggaaaccagagagtagccagcttccaattaatctgcaagctggagggggaatcagtttgcctttctcatagcattcaccctgaaggataactcctaattaccaacaggattccctaacagagtctagtttatctcatgccctagctaggagaagagagaagtggccatttctgagccctggctggataaggtttcccctgctcccattatctccccaaccccactatctccccaacaccagaaactgttcgaggtggaggaggtgaactgcatctgcgtggactggaagaagggctcccaagccacctacacacaggctgccaacaacgtgcgagtggtgggcgcccaggtggcccagatgctcgacatcctcttggtgagtcagctggctggcctatgtgaggagggaagcagtgcctgctggtctctgtttggtagagatgcagctgagagttatggattaaagaaggacaaagaattgatatccagaccttacttctaaaactctgaaatttgccttcataatgacacgccagtggaagcaaaaataagaatcgctaacacttagaaagtggttttttaaaaatcatcttcaatttacagataaagaaactgaggcccagaaagtttaactagtttgctcccaaagtcataaagcaaatgaatagaagacctgccttttgatccagaccatctagcttcagaattcacccacaacaccaggtgggctctgtttcgcgtgaaacacagcatggccagagagagccacagagagccaacggacagtacgtgcaattggcatgtaccagctctactggcctggtggtatgggtcctattgatgttggggaattccttctgccacaatcatttcacttatttcttcctatactgtttcattatagctaactccttcagtctttaattctttaagttgctaatcctttgtgactattttctataccaggtaatgactacagccatttctgtcttatagttaaagggtctacaaaagaatcaacttctgcactcctgcagaaatcaaaacccatggtatttgtgcaagaagtatgatagaccaataaatgaagtgcctttgggtgaacgtctctgagatcaacatgtgcaaatacctcatagctctatttgatttgcttgttcaccagtacttttggagcagaatgtcaggagtatgtgaggaagtaaagaagacacatgagatcccagaccatcaaggagcttgcagtgaaaacttgcaatgccagtagagtgcgatctattagtgggttctgatggggagagtaggagctttacaggaacacatagaaggcagctaatccacactgatggggtggggaaagggcttaaggaggtctcccaaggaagagacgtctaaattgacagctgaaggctagtctgttgatgttagctggcaagtgcttgggggatagacaacaacaagaagagaagaacaaaccaggcccagaggtgagaggctatgatgtattcgagggtctgaaagttcaacaaagggtttggctgaagagtctagaaaaatagatgatgagttaggaaagctcggaggccttcagaatgag

SEQ ID NO: 20553 - protein, 118 aa, Homo sapiens
MLIFWTITLFLLGAAKGKEVCYEDLGCFSDTEPWGGTAIRPLKILPWSPEKIGTRFLLYTNENPNNFQILLLSDPSTIEASNFQMDRKTRFIIHGFIDKGDESWVTDMCKQPGASPRA

SEQ ID NO: 20554 - DNA, 1723 bp, Homo sapiens
gatccggtgggagggaacatctggaacattagacaggatgctgatcttctggacaatcacacttttcctgctgggagcagccaaaggaaaagaagtttgctatgaggacctcgggtgcttttctgacactgagccctggggcgggacagcaatcaggcccctgaaaattctcccctggagccctgagaagatcggcacccgcttcctgctgtacaccaatgaaaacccaaacaactttcaaattctcctcctctctgatccatcaacaattgaggcatcaaattttcaaatggacagaaagacccggttcatcatccatggcttcatagacaaaggagatgagagctgggtgacagacatgtgcaagaaactgttcgaggtggaggaggtgaactgcatctgcgtggactggaagaagggctcccaagccacctacacacaggctgccaacaacgtgcgagtggtgggcgcccaggtggcccagatgctcgacatcctcttggtgagtcagctggctggcctatgtgaggagggaagcagtgcctgctggtctctgtttggtagagatgcagctgagagttatggattaaagaaggacaaagaattgatatccagaccttacttctaaaactctgaaatttgccttcataatgacacgccagtggaagcaaaaataagaatcgctaacacttagaaagtggttttttaaaaatcatcttcaatttacagataaagaaactgaggcccagaaagtttaactagtttgctcccaaagtcataaagcaaatgaatagaagacctgccttttgatccagaccatctagcttcagaattcacccacaacaccaggtgggctctgtttcgcgtgaaacacagcatggccagagagagccacagagagccaacggacagtacgtgcaattggcatgtaccagctctactggcctggtggtatgggtcctattgatgttggggaattccttctgccacaatcatttcacttatttcttcctatactgtttcattatagctaactccttcagtctttaattctttaagttgctaatcctttgtgactattttctataccaggtaatgactacagccatttctgtcttatagttaaagggtctacaaaagaatcaacttctgcactcctgcagaaatcaaaacccatggtatttgtgcaagaagtatgatagaccaataaatgaagtgcctttgggtgaacgtctctgagatcaacatgtgcaaatacctcatagctctatttgatttgcttgttcaccagtacttttggagcagaatgtcaggagtatgtgaggaagtaaagaagacacatgagatcccagaccatcaaggagcttgcagtgaaaacttgcaatgccagtagagtgcgatctattagtgggttctgatggggagagtaggagctttacaggaacacatagaaggcagctaatccacactgatggggtggggaaagggcttaaggaggtctcccaaggaagagacgtctaaattgacagctgaaggctagtctgttgatgttagctggcaagtgcttgggggatagacaacaacaagaagagaagaacaaaccaggcccagaggtgagaggctatgatgtattcgagggtctgaaagttcaacaaagggtttggctgaagagtctagaaaaatagatgatgagttaggaaagctcggaggccttcagaatgag

SEQ ID NO: 20555 - protein, 196 aa, Homo sapiens; identical to SEQ ID NO: 20547

SEQ ID NO: 20556 - DNA, 1500 bp, Homo sapiens
gatccggtgggagggaacatctggaacattagacaggatgctgatcttctggacaatcacacttttcctgctgggagcagccaaaggaaaagaagtttgctatgaggacctcgggtgcttttctgacactgagccctggggcgggacagcaatcaggcccctgaaaattctcccctggagccctgagaagatcggcacccgcttcctgctgtacaccaatgaaaacccaaacaactttcaaattctcctcctctctgatccatcaacaattgaggcatcaaattttcaaatggacagaaagacccggttcatcatccatggcttcatagacaaaggagatgagagctgggtgacagacatgtgcaagaaactgttcgaggtggaggaggtgaactgcatctgcgtggactggaagaagggctcccaagccacctacacacaggctgccaacaacgtgcgagtggtgggcgcccaggtggcccagatgctcgacatcctcttgacagagtatagctaccccccttccaaagttcacctcattggccacagcctgggagcccacgtggctggagaggcaggaagcaagactccaggcctgagcaggattacagggttggatcctgtagaagcaagtttcgagagtactcctgaagaggtgcgacttgatccctctgatgctgactttgttgatgtgattcacacggatgcagctcccctgatcccattcttgggttttggaacgaaccaacagatgggtcatcttgacttcttccccaatggaggagagagcatgccgggatgcaagaagaatgccctgtctcagatcgtggatctagatggcatctgggcgggaacccgggactttgtggcttgcaatcacctaagaagctacaagtattacttggaaagcatcctcaatcccgatgggtttgctgcatatccctgcacttcctacaagtcctttgagtctgacaagtgcttcccgtgtccagatcaaggatgcccacagatgggtcactatgctgataaatttgctggcaggacaagtgaagagcagcagaaattcttcttgaacacaggagaggctagcaatttcgctcgctggagatatggggtttccatcacactgtctggaagaacagccactggtcagatcaaagttgctttgtttggaaataagggaaacactcaccagtacagtatcttcagggggattctcaaaccaggctcaacccattcctatgagtttgatgcaaagctggatgttggaacaattgagaaagtcaagtttctttggaataacaatgtgataaatccaaccctccccaaagtgggtgccaccaagatcactgtgcaaaagggagaagagaagacagtgtacaacttctgtagcgaagacacagtgcgggaagacacgctgctcaccctcacgccctgctaagctcccggggcgacgaggctgctgcgttcacactaataaaatccactggtgcatctgta

SEQ ID NO: 20557 - protein, 467 aa, Homo sapiens; identical to SEQ ID NO: 2599

SEQ ID NO: 20558 - DNA, 1483 bp, Homo sapiens
ccccctgctgtgacgtacagatgctgatcttctggacaatcacacttttcctgctgggagcagccaaaggaaaagaagtttgctatgaggacctcgggtgcttttctgacactgagccctggggcgggacagcaatcaggcccctgaaaattctcccctggagccctgagaagatcggcacccgcttcctgctgtacaccaatgaaaacccaaacaactttcaaattctcctcctctctgatccatcaacaattgaggcatcaaattttcaaatggacagaaagacccggttcatcatccatggcttcatagacaaaggagatgagagctgggtgacagacatgtgcaagaaactgttcgaggtggaggaggtgaactgcatctgcgtggactggaagaagggctcccaagccacctacacacaggctgccaacaacgtgcgagtggtgggcgcccaggtggcccagatgctcgacatcctcttgacagagtatagctaccccccttccaaagttcacctcattggccacagcctgggagcccacgtggctggagaggcaggaagcaagactccaggcctgagcaggattacagggttggatcctgtagaagcaagtttcgagagtactcctgaagaggtgcgacttgatccctctgatgctgactttgttgatgtgattcacacggatgcagctcccctgatcccattcttgggttttggaacgaaccaacagatgggtcatcttgacttcttccccaatggaggagagagcatgccgggatgcaagaagaatgccctgtctcagatcgtggatctagatggcatctgggcgggaacccgggactttgtggcttgcaatcacctaagaagctacaagtattacttggaaagcatcctcaatcccgatgggtttgctgcatatccctgcacttcctacaagtcctttgagtctgacaagtgcttcccgtgtccagatcaaggatgcccacagatgggtcactatgctgataaatttgctggcaggacaagtgaagagcagcagaaattcttcttgaacacaggagaggctagcaatttcgctcgctggagatatggggtttccatcacactgtctggaagaacagccactggtcagatcaaagttgctttgtttggaaataagggaaacactcaccagtacagtatcttcagggggattctcaaaccaggctcaacccattcctatgagtttgatgcaaagctggatgttggaacaattgagaaagtcaagtttctttggaataacaatgtgataaatccaaccctccccaaagtgggtgccaccaagatcactgtgcaaaagggagaagagaagacagtgtacaacttctgtagcgaagacacagtgcgggaagacacgctgctcaccctcacgccctgctaagctcccggggcgacgaggctgctgcgttcacactaataaaatccactggtgcatctgta

SEQ ID NO: 20559 - protein, 467 aa, Homo sapiens; identical to SEQ ID NO: 2599

SEQ ID NO: 20560 - DNA, 1000 bp, Homo sapiens
ctttccatgtttccgcactacatctgcacactgaagcaaccacatttgctgttagaaaagtactcctactacctaatttctggttaaaccaaggcctgatgttttctgcttccatttgtagtgagggtactttgtatcctataagcgagggactataggggtttctttgttcaaatttttcccacatccctgagaggctgacatgtgttgctgtgaccacttaattgatcccagcactttgggaggccaaggtggatggatcacctgaggtcaggagttcaagaccagcgtagccaacatggtgaaaccctgtctctactaaaagtacaaaaattagccaggtgtggtcgcaggcgcctgtagtcctagctactcaggaggctgaggcaggagaattgcttaaattcggaggcagaggttgcagtgagctgagatcgcgccactgcactccagcctgggcgacagaatgaggctgtctcaaaaaaaaaaaaaaaaaaagaaagaaaaaaagaaaagaaaagaaaagtcctgaggagaaaactcccactatctctgtgcatgtgatcacacatattagtatactatatgtggaatgattccaagtgcattttaaatttatagtaccattttaaattcaagctggtaatatgtactgcctggcagaactcctaaagatatatcagctcctttgacatccaggaagacattttccttccagaattcttcaatctcttttaaatcagtacagttctatttttcaaatatctacatgtgtctactccatgaagtactgtgtcatcgtgactataaaaatagtgaaacttctctctcactttccagcagcctggggcatcgccaagagcctgaaaggaccccttacagtcaaatccacaaggtcatttagacactggccaccggagattgcacctaagacttttccttttcaaaacaggactcttttcatgatgcaattgtttttcccttactaaccaaccttact

SEQ ID NO: 20561 - protein, 35 aa, Homo sapiens
MDHLRSGVQDQRSQHGETLSLLKVQKLARCGRRRL

SEQ ID NO: 20562 - DNA, 541 bp, Homo sapiens
ggagcaggaaggaagcccgggagcgccctgcacctgtgcctgcctctgcgcacctccccaagagccagggccaacgaggggtcccctcaccctcaaatctacctcctcagagaggctggtcctcccgggcctgccgcgatccctcggggtggtctcggtgagtcagggagggtccttgaaataggggtccggggcccggccctccgacctgacggggacagcgagtcactcagtgagtttgaacagctacctgctcctctgggcctcagtttcctccctgtgaagtgagggacggggctaaaggctggtatccctgagctgaggctccggagttcagtccatcgccaccagctcaggcacggagaagacagtcgacctacgcacaggagccagggaaaccgtgtgacccaaagttaacggggagaaacccagaaaacctgatgtcttatatccagctgctcttaagaaagagtctttctggagcagacagcgaggggagctgcactcagccactggaatgcaggtgacagctgatgggcac

SEQ ID NO: 20563 - protein, 95 aa, Homo sapiens
GAGRKPGSALHLCLPLRTSPRARANEGSPHPQIYLLREAGPPGPAAIPRGGLGESGRVLEIGVRGPALRPDGDSESLSEFEQLPAPLGLSFLPVK

SEQ ID NO: 20564 - DNA, 1604 bp, Homo sapiens
ttaggttcaaagcgcccacgtgcagtgccttatctatcctgccccggcctttcctctaaggagtccaaaggataaagcctggttataaaaggccacagccaacctgctgggctgtgagtggaagctctggtgcagcatgatgctgcccccttggaccctcggccttctcctgctggccacagtcagaggaaaagagtctgctacggacaacttggctgcttttctgatgaaaaaccatgggcaggaacccttcagcgacctgtaaaattacttccctggtcccccgaggacattgacacccgctttcttctgtacacaaatgaaaatccaaacaacttccaactaatcactggcacggaaccagacaccattgaggcttcaaacttccaactggaccgcaagacacgcttcatcatccatggcttcttagacaaggcggaggacagctggccatcggacatgtgcaagaaaatgtttgaagtggagaaggtgaactgcatctgtgtggactggaggcacgggtcccgggcaatgtacacccaagccgtgcaaaacattcgggttgttggggcggagacagctttcttaatacaagcactgtcgacgcagctagggtacagccttgaggacgtgcatgtcatcggccacagcctgggcgcgcacacggccgcggaggcgggcaggaggctggggggccgcgtgggcaggatcacagggctggatccagcagggccgtgcttccaggatgaacctgaggaggttcggttggatccatctgacgccgtgtttgtggatgtgattcacacagattcttctcccatagttccttccctaggtttcggaatgagccaaaaggtgggccatctggatttctttccaaatggaggaaaggaaatgcccggatgtaagaaaaatgtcctttcaaccattactgatattgatggaatatgggaaggaattggtggctttgtgtcttgcaatcacctaagaagcttcgagtattactcaagcagcgtcctcaaccctgatggcttcctgggctatccctgtgcctcctacgatgagtttcaggagagtaagtgtttcccttgtccagctgaaggatgccccaaaatggggcactatgctgaccaatttaaggggaaaacaagtgctgtggaacaaacctttttcctgaacacaggagagagtggtaactttactagttgaagatataagatatcagtcacactttctggaaaagagaaagtgaatgggtacatcaggattgctttgtatggaagtaatgaaaactcaaaacaatatgagattttcaaaggatccctcaaaccagatgcaagtcacacgtgtgctattgatgtggattttaatgttggaaaaatacagaaagttaaattcctctggaacaaacgtgggataaatctatctgagcccaaactgggggcttcccaaatcacagtgcaaagtggtgaagatgggactgagtataatttttgtagcagcgacactgtggaagaaaacgtcttgcaatctctttacccttgttaaaaacgtggtgcagctattgcggtaataaaatctttaatgcactcggtttgagggtg

SEQ ID NO: 20565 - protein, 249 aa, Homo sapiens
MCKKMFEVEKVNCICVDWRHGSRAMYTQAVQNIRVVGAETAFLIQALSTQLGYSLEDVHVIGHSLGAHTAAEAGRRLGGRVGRITGLDPAGPCFQDEPEEVRLDPSDAVFVDVIHTDSSPIVPSLGFGMSQKVGHLDFFPNGGKEMPGCKKNVLSTITDIDGIWEGIGGFVSCNHLRSFEYYSSSVLNPDGFLGYPCASYDEFQESKCFPCPAEGCPKMGHYADQFKGKTSAVEQTFFLNTGESGNFTS

SEQ ID NO: 20566 - DNA, 929 bp, Homo sapiens
cagagagcgaaatcatggagccttccaagaccttcatgagaaacctgccaatcacaccaggctatagcggctttgtgccattcctcagctgccaaggaatgtccaaggaggatgacatgaaccactgtgtgaaaaccttccaggagaaaacacagcgctataaagaacagctgcgggaattgtgctgcgcagtggccactgccccgaaactgaaacctgtcaactccgaggagacggtcctgcaggccctgcaccagtacaatctgcagtaccaccccctgatcctggaatgcaaatatgtaaagaaacctctccaggagcccccgatccctggctgggcaggctacctgccgagagccaaggtcactgaatttggctgtggcacgagatacactgtcatggccaaaaactgctacaaggacttcctggagatcacggagagggccaagaaggcacatctgaaaccatatgaagaaatatatggagttagctccacaaaaacttctgctccgtctccaaaagttttgcagcatgaagagctgctgccaaaatatcccgatttttctattccagatggaagctgccctgcccttggaaggcccctgagagaggaccccaaaactccgctgacatgtggctgtgctcagaggccaagtataccatgcagtgggaagatgtatctagagccactgtcctccgcaaagtatgcagaaggctagaagcgcagagtctcccaaggaggtgaactttaagtggggcttccaaaacctgccattctcatgttggaatcacgcccagtgagcaataaagaaatttagtaacaagaattttttaactgccgcctgcatcctgagtggttgacggttgcatgtcattaatgataaagaccgttttttgtcatgtgggaataaagaggctgcttctccgca

SEQ ID NO: 20567 - protein, 234 aa, Homo sapiens
MEPSKTFMRNLPITPGYSGFVPFLSCQGMSKEDDMNHCVKTFQEKTQRYKEQLRELCCAVATAPKLKPVNSEETVLQALHQYNLQYHPLILECKYVKKPLQEPPIPGWAGYLPRAKVTEFGCGTRYTVMAKNCYKDFLEITERAKKAHLKPYEEIYGVSSTKTSAPSPKVLQHEELLPKYPDFSIPDGSCPALGRPLREDPKTPLTCGCAQRPSIPCSGKMYLEPLSSAKYAEG

SEQ ID NO: 20568 - DNA, 1619 bp, Homo sapiens
aagtgggcaccggatagcgccagccccgcccagagagcgaaatcatggagccttccaagaccttcatgagaaacctgccaatcacaccaggctatagcggctttgtgccattcctcagctgccaaggaatgtccaaggaggatgacatgaaccactgtgtgaaaaccttccaggagaaaacacagcgctataaagaacagctgcgggaattgtgctgcgcagtggccactgccccgaaactgaaacctgtcaactccgaggagacggtcctgcaggccctgcaccagtacaatctgcagtaccaccccctgatcctgggtagcagcgccctgaaaccatttcccctcacccctggtcacccctgcagattctcataggccagctgagctgccccatagcacccagaatcccgcaccgttccaaatcccaggggtcagcaccaaatgcaaaggctccatttcttaaaatgagaaagacacatttctttttctttctttctttttctttttttttttttttttgagacggagtctcactctgttgcctaggctggagtgcagtggtgtgatctcggctcactgcaacctctgcctcctgggttcaagcgattctcctgcctcagcctcagcctcagccaagtagctgagactacaggtgcatgccaccatgcctggctaatttttgtatttttagtagagacggggtttcaccatgttgccgagggtggtctcaaattcctgacctcaggtgatctgcctgcctcagcctcccaaagtgctgggattacaggcatgagccacagaggctggccagaaagaaacatttctaggggagggggcacagtcctggttagggaagagggtgctggtctgagaactaggagaccctaggcaagtcacaagttttcaggcctcagcttctgggtcagtggaaaacattttttagttgctttctctgtgccatggtgtctttttacagaatgcaaatatgtaaagaaacctctccaggagcccccgatccctggctgggcaggctacctgccgagagccaaggtcactgaatttggctgtggcacgagatacactgtcatggccaaaaactgctacaaggacttcctggagatcacggagagggccaagaaggcacatctgaaaccatatgaagaaatatatggagttagctccacaaaaacttctgctccgtctccaaaagttttgcagcatgaagagctgctgccaaaatatcccgatttttctattccagatggaagctgccctgcccttggaaggcccctgagagaggaccccaaaactccgctgacatgtggctgtgctcagaggccaagtataccatgcagtgggaagatgtatctagagccactgtcctccgcaaagtatgcagaaggctagaagcgcagagtctcccaaggaggtgaactttaagtggggcttccaaaacctgccattctcatgttggaatcacgcccagtgagcaataaagaaatttagtaacaagaattttttaactgccgcctgcatcctgagtggttgacggttgcatgtcattaatgataaagaccgttttttgtcatgtgggaataaagaggctgcttctccgca

SEQ ID NO: 20569 - protein, 110 aa, Homo sapiens
MEPSKTFMRNLPITPGYSGFVPFLSCQGMSKEDDMNHCVKTFQEKTQRYKEQLRELCCAVATAPKLKPVNSEETVLQALHQYNLQYHPLILGSSALKPFPLTPGHPCRFS

SEQ ID NO: 20570 - DNA, 993 bp, Homo sapiens
gggcagaggccaagtgggcaccggatagcgccagccccgcccagagagcgaaatcatggagccttccaagaccttcatgagaaacctgccaatcacaccaggctatagcggctttgtgccattcctcagctgccaaggaatgtccaaggaggatgacatgaaccactgtgtgaaaaccttccaggagaaaacacagcgctataaagaacagctgcgggaattgtgctgcgcagtggccactgccccgaaactgaaacctgtcaactccgaggagacggtcctgcaggccctgcaccagtacaatctgcagtaccaccccctgatcctggaatgcaaatatgtaaagaaacctctccaggagcccccgatccctggctgggcaggctacctgccgagagccaaggtcactgaatttggctgtggcacgagatacactgtcatggccaaaaactgctacaaggacttcctggagatcacggagagggccaagaaggcacatctgaaaccatatgaagagtgaggagaaatgtctctttccttcctactaccgttttaaaaaggggatgaaatgtttgcagtggcctttctgcttagctgggccagctccctgcaactcacacggacggttcctctcctagatggaagctgccctgcccttggaaggcccctgagagaggaccccaaaactccgctgacatgtggctgtgctcagaggccaagtataccatgcagtgggaagatgtatctagagccactgtcctccgcaaagtatgcagaaggctagaagcgcagagtctcccaaggaggtgaactttaagtggggcttccaaaacctgccattctcatgttggaatcacgcccagtgagcaataaagaaatttagtaacaagaattttttaactgccgcctgcatcctgagtggttgacggttgcatgtcattaatgataaagaccgttttttgtcatgtgggaataaagaggctgcttctccgc

SEQ ID NO: 20571 - protein, 154 aa, Homo sapiens; identical to SEQ ID NO: 2603

SEQ ID NO: 20572 - DNA, 1793 bp, Homo sapiens
gccgcagtgtctacacccgcaaaaacgcccgctttgacttagagccctccgcatatccttcccctggctggggcagccaaggcgcggaggacagctccgaggccagatgtttactgcgcagatgcccgactttacaccggggtccgggctgtgccgggcgctgggggaagcgcccaccttccagagagcgaaatcatggagccttccaagaccttcatgagaaacctgccaatcacaccaggctatagcggctttgtgccattcctcagctgccaaggaatgtccaaggaggatgacatgaaccactgtgtgaaaaccttccaggagaaaacacagcgctataaagaacagctgcgggaattgtgctgcgcagtggccactgccccgaaactgaaacctgtcaactccgaggagacggtcctgcaggccctgcaccagtacaatctgcagtaccaccccctgatcctgggtagcagcgccctgaaaccatttcccctcacccctggtcacccctgcagattctcataggccagctgagctgccccatagcacccagaatcccgcaccgttccaaatcccaggggtcagcaccaaatgcaaaggctccatttcttaaaatgagaaagacacatttctttttctttctttctttttctttttttttttttttttgagacggagtctcactctgttgcctaggctggagtgcagtggtgtgatctcggctcactgcaacctctgcctcctgggttcaagcgattctcctgcctcagcctcagcctcagccaagtagctgagactacaggtgcatgccaccatgcctggctaatttttgtatttttagtagagacggggtttcaccatgttgccgagggtggtctcaaattcctgacctcaggtgatctgcctgcctcagcctcccaaagtgctgggattacaggcatgagccacagaggctggccagaaagaaacatttctaggggagggggcacagtcctggttagggaagagggtgctggtctgagaactaggagaccctaggcaagtcacaagttttcaggcctcagcttctgggtcagtggaaaacattttttagttgctttctctgtgccatggtgtctttttacagaatgcaaatatgtaaagaaacctctccaggagcccccgatccctggctgggcaggctacctgccgagagccaaggtcactgaatttggctgtggcacgagatacactgtcatggccaaaaactgctacaaggacttcctggagatcacggagagggccaagaaggcacatctgaaaccatatgaagagtgagtctggcttgggtccgtaccccaggcacaaggtcaaagggagaagtgcaaacccaggatgggggtttaccagatgtccccatcccagcactaggactatttgtgtgtgatttgtcttagagaaggtgcctcatttgtagtttcagggcttccccagtaggcaggtgccctctgctcccaacctgtgctcagcattccccagcagctctacctgtggtctttgctggtttgcagggaggggatgggagtaaaaaccagcagggctaccatcctggcagtggcttaaggcccaagggtgctgagtggcctcagctttctcttctgcgaaatgaggagggtgatctttacctttagaataaattgtaaagaaataacataccatgttcatatatttactcatatttatgtattgtattttattctatttattattattctattcttaataaaaggtccataactttgtgacttcta

SEQ ID NO: 20573 - protein, 110 aa, Homo sapiens; identical to SEQ ID NO: 20569

SEQ ID NO: 20574 - DNA, 1181 bp, Homo sapiens
agcgcccggcacagcccggaccccggtgtaaagtcgggcatctgcgcagtaaacatctggcctcggagctgtcctccgcgccttggctgccccagccaggggaaggatatgcggagggctctaagtcaaagcgggcgtttttgcgggtgtagacactgcggcgcctgggtctgcaggaggggcagattttcaggtggccgggacaggtgaaggcagagaggagtggctgtccacctggggaagcatcctgaaaacatcacacacagtggaccacgctttgccctcagagtgactgctccgacccggaaggagaggtcaacgacccctcaggacacaaagggtttcttaggttgttctgcgcagtcacatggcttccagaaccagaacgttcagctcttaaagtctgcacagaagaactgatagaatctgctcctttcaatggaatctgtgactgtttgggaaggatgtgcatggagaagggtctgatgaggctcctgatccaggcggtccacgtgcgttcagtgtgtttggaccctaggcacctctgtctattgctcggtcttgcgtacatagtccatagcttggcatcagcacagatcgatgcttagtgagcacaattaagaaaccaaactatggaaaattaaggacagtaacaaaagtatcatcaacaaaaatcaagcattttcctctttttgaaacaagaaaagcgcatcgtagaaaccaagattctgtacaatattctaacattatatgtacataaaattatattactcataactatattgaaaagtcttatttgtagaatatggctggcaacaaagaaagacccataccatttagcgtttgaagcagggcaggtagcaagagaacattagcaaagacacctttgtgcctggatacacaatcctgctactaagttatgtgactaaccagcacactctaagttctgtggtttgttcgttgtttcacattctagtagggaattctgcagcaggcgatgcgaaaaagaagacatggtcaaatgaaatgtgaaatgctgtttaaaatctgcatattggctatgataatgggtttgtgaatccaagttgcattggaagttcactcattctccattcattatgcatgcctccagtgatttaatgaatttcagcaggtggaaaagacagctttgaacagatcag

SEQ ID NO: 20575 - protein, 33 aa, Homo sapiens
MRRALSQSGRFCGCRHCGAWVCRRGRFSGGRDR

SEQ ID NO: 20576 - DNA, 5944 bp, Homo sapiens
atggtggaggatggaggagatggtctgcgacagtgccctgcagctatgcagggagtgactgctgttccttgttgctgggcagtccctgtggatgaacgggatctttgcccttcgcgtgagaaggacgcagtgcccaaacagcttgctctggcggaattagtggtctctgactcgtggctggcctgggtgcctgcctcctctagagcagcgctcccgctgcccggcggctcagacacggcccgagcgccgccgcggacgcggacagagacccgcacgggcacgggcgctgcgctggaggctcccctcgcggtccggggctgcgcgaccatggcggacaaggaggccggcggcagcgacgggccccgagaaacggctcccacatctgcatattcatctccagcccggagtcttggggacacaggaataacgcctctgtccccctcccatattgtgaacgacactgactccaacgtctcagaacagcagtcatttctcgtggtggtggccgtcgactttgggaccacatccagtggctatgcctacagcttcaccaaggagccggaatgcatccatgtgatgaggcgatgggagggaggtgaccctggtgtgtccaatcagaagactccaaccaccatcttgctgactcccgagaggaagttccacagcttcgggtatgccgccagggacttttaccatgacctggatcccaatgaggccaagcagtggctgtacctggagaagttcaagatgaagctgcacaccactggggacctcaccatggatacagacctgacggcagcaaatggcaagaaagtcaaagcccttgaaatctttgcttatgccctgcagtactttaaggagcaggcgctgaaggagctgagtgaccaggcgggttcggagttcgagaactctgatgtcagatgggtcatcacggtgcctgccatctggaagcagccggccaagcagttcatgagacaagctgcctaccaggcaggcctggcctcccccgagaactcggagcagctcatcattgccttggagcctgaggcagcctctatctactgccgaaagctgcggctacaccagatgattgagctgagcagcaaggcagccgtcaatgggtacagcggcagtgacacagtaggagctgggtttacacaggctaaggaacacatacggcgtaatcggcagagtcggacctttttggtggagaatgtcataggagaaatctggtccgagctggaggaaggtgataagtatgtggttgtggacagtggcggtggcaccgtagacctgacagtccatcagatccggttaccggagggacaccttaaggaactgtataaagcaacaggcggaccctatggatctttaggagtagattatgagttcgaaaaacttctgtataaaatatttggagaggattttattgaacaattcaaaatcaaacgccctgcagcctgggttgacttaatgattgcgtttgagtctcgcaaaagggcggctgccccagacagaactaacccgctgaacatcaccctgcccttctccttcattgactactacaagaagttccgcgggcacagtgtggagcacgccttgcggaaaagcaatgtggattttgtgaagtggtcctcgcaggggatgctgcggatgagtccagatgccatgaacgccctttttaagccgaccatcgatagcatcattgagcatctccgggacctgtttcagaagcccgaggtgtccaccgtcaagttcctctttctggtgggcggctttgccgaggcgcccctgctgcagcaggcggtgcaggctgcttttggggaccagtgccggatcatcatcccccaggacgtgggcctcaccatcctcaagggtgccgtcctctttggcctggaccccgcggtcatcaaggtgcgccggtcgccgctcacctacggggtaggcgtgctgaaccgctacgtggagggcaagcacccgcctgagaagctgctggtgaaggatggcactcggtggtgcaccgacgtctttgacaagttcatctctgccgaccagtctgtggctctgggtgagctggtcaagcgtagctacaccccggccaagccctcccagctggtcattgtcatcaacatctacagctctgagcacgacaacgtcagcttcatcactgatcccggggtgaagaagtgtggcacgctccgcctggatctcacagggaccagtggcactgcggtgcccgcccggagggagatccagacccttatgcagttcggggacaccgagatcaaagccacagccattgatatagccacttcgaagagtgtcaaagttgggatcgacttcttaaattactaaccctcccgccccgctgcctgtccccttggactcaacttatctgcatctgctgacctcaaccttgactgttctttccctaaccttgaccctcaccattgcccatgtgaatttcagcagggaagatgagaacaatcagggctagaaataattagtgacttttgagggcacactggagtcagaaaaacagaaattaagattaaggtttaggcatagaaaattaaaggatcctggaggagcagctagttttcataggtacaaaagtggtgaaatggccacggagaagggaatcagtacatttctgcagcagtggttgcgctgctttgaacagatctccgttatgtagaatttaggatgccctattgctgtctttctagatttaaaatgagatctttgaaccaggaggagatcttcatctgagacttgtctttctaaattttttggatggccatcaatataaaatgccacccatctgcagttaatttcttttcctcatcatgtgattaaaagtggtgattcagtgggaactgggaatgtttttagctggtggtagaaggctgcctacactgggcactgttttagattctcatatcatttaaacagcaaggaggttcagggaagaataaccgtagccttgggtaatccactagggcttttgtgagtaggagagctgatacctcacattcttagcaggtgaaaacttgccatgatggaaacagatagtgaagagttactgacgtatcccaaattatatgctgtgacataaattcccagcatgcccagccctgatttctgagttcataagtaattctagtgaaccttagtaggaattctgggtaagaaaatgaggttgccattggtcttgtttgcatcaccaagaccagacatccagaagagcccctcaccttgaaaagcagacagattttaaattaaccccctccttcccactcaccttcatctccctaagagttttggccatttaattccacattttgaaaggaatacattggtgaaatttgggaagagaatctgtgctatgcaatgtttcattaaaatcttcagtttttcaagtctctctaaaaataatttgtagatctatacttgatgtattaagtcagttttttttcacagcgggcctgtggctcgcctgcatcagaattgcctgggtgcgtgttcagaacaggttcctggatctgagccctttttaactgaggccgactcttggagaggggcaccagaatctgcatttgtagtgtataccacatcgtggttcaactgaaattggagaaatactaacctgagattttgttgaagttcacacacagatcacagcccgccctctgcaggtgtcccctttgggctcctttaggaagagggcttccatgagaaggtgaccccataccttgccctcttggtcaatgggattggggctccacctggcttggagatggcccttttaaccctcacaggaagggccaggggaggaaaaaaattgcaagaaagcgacaccaagaacggagctgactgaggaaccaactggagggtcttcactctctccttccccagtgtacaaaaccagttttctgcaacattcaggagccaaatgaggaaaaagaatcaagaatctgactcacagcccatctgatctgttcaaagctgtcttttccacctgctgaaattcattaaatcactggaggcatgcataatgaatggagaatgagtgaacttccaatgcaacttggattcacaaacccattatcatagccaatatgcagattttaaacagcatttcacatttcatttgaccatgtcttctttttcgcatcgcctgctgcagaattccctactagaatgtgaaacaacgaacaaaccacagaacttagagtgtgctggttagtcacataacttagtagcaggattgtgtatccaggcacaaaggtgtctttgctaatgttctcttgctacctgccctgcttcaaacgctaaatggtatgggtctttctttgttgccagccatattctacaaataagacttttcaatatagttatgagtaatataattttatgtacatataatgttagaatattgtacagaatcttggtttctacgatgcgcttttcttgtttcaaaaagaggaaaatgcttgatttttgttgatgatacttttgttactgtccttaattttccatagtttggtttcttaattgtgctcactaagcatcgatctgtgctgatgccaagctatggactatgtacgcaagaccgagcaatagacagaggtgcctagggtccaaacacactgaacgcacgtggaccgcctggatcaggagcctcatcagacccttctccatgcacatccttcccaaacagtcacagattccattgaaaggagcagattctatcagttcttctgtgcagactttaagagctgaacgttctggttctggaagccatgtgactgcgcagaacaacctaagaaaccctttgtgtcctgaggggtcgttgacctctccttccgggtcggagcagtcactctgagggcaaagcgtggtccactgtgtgtgatgttttcaggatgctagggtcaaagaaagaaaccaagtggtacataagcccagcttttctgctgggctaagtgtaagtgtgagtaacatggtcaagcccctcttttttgggctaatgtaaagcctttcctgccttgcattaatgctatctccctgtgtactgtttctcttaaatgagcagatagaaatctgcagtgttggcagataggtgatggagaggatgataattttatcttctggccacagagctgcagccccagttgtcagagtccttaaatgaaacccccaaatccatccctccttccctacccccactggaatattctagaataagagcactggataagtacacttgaacacatttttctaaccttagaaaatacctacaaggcctgttgtcttgacccattactcaattgtccctggcatattatctgatcttcacgtttcttggaagcagaatcatcaaggctttcctttgtaactgccctttccgtacacagcaggcatgaataaatgctgagtaacagacaagttacagacaggaggggaaagaggaggaaccatacaactgtttttgcaaaatgatggctgagtccagattatagaggttgccttacccttagaatgttatttagaccaagtttagcttttagagtccaggtctggttaattgccagggtagcaaagaatcgcatgcaccaatgtaaacaggagtcagaatgcattattagtcaaagatcgaatttcacattgtagagatgtatagctgtgattaagctgcatatgtatgctgggaaacggcttgagtggatggctaatataaaagttgttggccataatgccacacctctcatctgcttgaaatatggaccagtattctaaaatatcagctactggggtctcattcactacaagataaattcaaacttcacagaactttgcagcagttcaccaccagacgggactgtgtctgcaaactctcttgtcttcacagacgcctaataaagcaaaactctgaatctca

SEQ ID NO: 20577 - protein, 784 aa, Homo sapiens
MVEDGGDGLRQCPAAMQGVTAVPCCWAVPVDERDLCPSREKDAVPKQLALAELVVSDSWLAWVPASSRAALPLPGGSDTARAPPRTRTETRTGTGAALEAPLAVRGCATMADKEAGGSDGPRETAPTSAYSSPARSLGDTGITPLSPSHIVNDTDSNVSEQQSFLVVVAVDFGTTSSGYAYSFTKEPECIHVMRRWEGGDPGVSNQKTPTTILLTPERKFHSFGYAARDFYHDLDPNEAKQWLYLEKFKMKLHTTGDLTMDTDLTAANGKKVKALEIFAYALQYFKEQALKELSDQAGSEFENSDVRWVITVPAIWKQPAKQFMRQAAYQAGLASPENSEQLIIALEPEAASIYCRKLRLHQMIELSSKAAVNGYSGSDTVGAGFTQAKEHIRRNRQSRTFLVENVIGEIWSELEEGDKYVVVDSGGGTVDLTVHQIRLPEGHLKELYKATGGPYGSLGVDYEFEKLLYKIFGEDFIEQFKIKRPAAWVDLMIAFESRKRAAAPDRTNPLNITLPFSFIDYYKKFRGHSVEHALRKSNVDFVKWSSQGMLRMSPDAMNALFKPTIDSIIEHLRDLFQKPEVSTVKFLFLVGGFAEAPLLQQAVQAAFGDQCRIIIPQDVGLTILKGAVLFGLDPAVIKVRRSPLTYGVGVLNRYVEGKHPPEKLLVKDGTRWCTDVFDKFISADQSVALGELVKRSYTPAKPSQLVIVINIYSSEHDNVSFITDPGVKKCGTLRLDLTGTSGTAVPARREIQTLMQFGDTEIKATAIDIATSKSVKVGIDFLNY

SEQ ID NO: 20578 - DNA, 5934 bp, Homo sapiens
agtaggatgaggccccagaataggctgaagccaagttgtagcaaacgccaaggtgttcatcctgtgatcaaagaggagctgcttaaggtcggtgagctgagctgagggcattaagatggagagtgttggcgtgtacggattctgtgggtgtaaagcaaagaacaaaatgaagtgtgattcaaggtgggaaatagccgcttcaggaagtccaggtcgtcctgctggagaggccacctagaggggaactgaggcccccgaccgacagcctaggtgaacatggacatgaatgagcctgtcttggcccatctagtgccagatgagccttgagatgactttagctgtatgagttgaccccagaaacggctcccacatctgcatattcatctccagcccggagtcttggggacacaggaataacgcctctgtccccctcccatattgtgaacgacactgactccaacgtctcagaacagcagtcatttctcgtggtggtggccgtcgactttgggaccacatccagtggctatgcctacagcttcaccaaggagccggaatgcatccatgtgatgaggcgatgggagggaggtgaccctggtgtgtccaatcagaagactccaaccaccatcttgctgactcccgagaggaagttccacagcttcgggtatgccgccagggacttttaccatgacctggatcccaatgaggccaagcagtggctgtacctggagaagttcaagatgaagctgcacaccactggggacctcaccatggatacagacctgacggcagcaaatggcaagaaagtcaaagcccttgaaatctttgcttatgccctgcagtactttaaggagcaggcgctgaaggagctgagtgaccaggcgggttcggagttcgagaactctgatgtcagatgggtcatcacggtgcctgccatctggaagcagccggccaagcagttcatgagacaagctgcctaccaggcaggcctggcctcccccgagaactcggagcagctcatcattgccttggagcctgaggcagcctctatctactgccgaaagctgcggctacaccagatgattgagctgagcagcaaggcagccgtcaatgggtacagcggcagtgacacagtaggagctgggtttacacaggctaaggaacacatacggcgtaatcggcagagtcggacctttttggtggagaatgtcataggagaaatctggtccgagctggaggaaggtgataagtatgtggttgtggacagtggcggtggcaccgtagacctgacagtccatcagatccggttaccggagggacaccttaaggaactgtataaagcaacaggcggaccctatggatctttaggagtagattatgagttcgaaaaacttctgtataaaatatttggagaggattttattgaacaattcaaaatcaaacgccctgcagcctgggttgacttaatgattgcgtttgagtctcgcaaaagggcggctgccccagacagaactaacccgctgaacatcaccctgcccttctccttcattgactactacaagaagttccgcgggcacagtgtggagcacgccttgcggaaaagcaatgtggattttgtgaagtggtcctcgcaggggatgctgcggatgagtccagatgccatgaacgccctttttaagccgaccatcgatagcatcattgagcatctccgggacctgtttcagaagcccgaggtgtccaccgtcaagttcctctttctggtgggcggctttgccgaggcgcccctgctgcagcaggcggtgcaggctgcttttggggaccagtgccggatcatcatcccccaggacgtgggcctcaccatcctcaagggtgccgtcctctttggcctggaccccgcggtcatcaaggtgcgccggtcgccgctcacctacggggtaggcgtgctgaaccgctacgtggagggcaagcacccgcctgagaagctgctggtgaaggatggcactcggtggtgcaccgacgtctttgacaagttcatctctgccgaccagtctgtggctctgggtgagctggtcaagcgtagctacaccccggccaagccctcccagctggtcattgtcatcaacatctacagctctgagcacgacaacgtcagcttcatcactgatcccggggtgaagaagtgtggcacgctccgcctggatctcacagggaccagtggcactgcggtgcccgcccggagggagatccagacccttatgcagttcggggacaccgagatcaaagccacagccattgatatagccacttcgaagagtgtcaaagttgggatcgacttcttaaattactaaccctcccgccccgctgcctgtccccttggactcaacttatctgcatctgctgacctcaaccttgactgttctttccctaaccttgaccctcaccattgcccatgtgaatttcagcagggaagatgagaacaatcagggctagaaataattagtgacttttgagggcacactggagtcagaaaaacagaaattaagattaaggtttaggcatagaaaattaaaggatcctggaggagcagctagttttcataggtacaaaagtggtgaaatggccacggagaagggaatcagtacatttctgcagcagtggttgcgctgctttgaacagatctccgttatgtagaatttaggatgccctattgctgtctttctagatttaaaatgagatctttgaaccaggaggagatcttcatctgagacttgtctttctaaattttttggatggccatcaatataaaatgccacccatctgcagttaatttcttttcctcatcatgtgattaaaagtggtgattcagtgggaactgggaatgtttttagctggtggtagaaggctgcctacactgggcactgttttagattctcatatcatttaaacagcaaggaggttcagggaagaataaccgtagccttgggtaatccactagggcttttgtgagtaggagagctgatacctcacattcttagcaggtgaaaacttgccatgatggaaacagatagtgaagagttactgacgtatcccaaattatatgctgtgacataaattcccagcatgcccagccctgatttctgagttcataagtaattctagtgaaccttagtaggaattctgggtaagaaaatgaggttgccattggtcttgtttgcatcaccaagaccagacatccagaagagcccctcaccttgaaaagcagacagattttaaattaaccccctccttcccactcaccttcatctccctaagagttttggccatttaattccacattttgaaaggaatacattggtgaaatttgggaagagaatctgtgctatgcaatgtttcattaaaatcttcagtttttcaagtctctctaaaaataatttgtagatctatacttgatgtattaagtcagttttttttcacagcgggcctgtggctcgcctgcatcagaattgcctgggtgcgtgttcagaacaggttcctggatctgagccctttttaactgaggccgactcttggagaggggcaccagaatctgcatttgtagtgtataccacatcgtggttcaactgaaattggagaaatactaacctgagattttgttgaagttcacacacagatcacagcccgccctctgcaggtgtcccctttgggctcctttaggaagagggcttccatgagaaggtgaccccataccttgccctcttggtcaatgggattggggctccacctggcttggagatggcccttttaaccctcacaggaagggccaggggaggaaaaaaattgcaagaaagcgacaccaagaacggagctgactgaggaaccaactggagggtcttcactctctccttccccagtgtacaaaaccagttttctgcaacattcaggagccaaatgaggaaaaagaatcaagaatctgactcacagcccatctgatctgttcaaagctgtcttttccacctgctgaaattcattaaatcactggaggcatgcataatgaatggagaatgagtgaacttccaatgcaacttggattcacaaacccattatcatagccaatatgcagattttaaacagcatttcacatttcatttgaccatgtcttctttttcgcatcgcctgctgcagaattccctactagaatgtgaaacaacgaacaaaccacagaacttagagtgtgctggttagtcacataacttagtagcaggattgtgtatccaggcacaaaggtgtctttgctaatgttctcttgctacctgccctgcttcaaacgctaaatggtatgggtctttctttgttgccagccatattctacaaataagacttttcaatatagttatgagtaatataattttatgtacatataatgttagaatattgtacagaatcttggtttctacgatgcgcttttcttgtttcaaaaagaggaaaatgcttgatttttgttgatgatacttttgttactgtccttaattttccatagtttggtttcttaattgtgctcactaagcatcgatctgtgctgatgccaagctatggactatgtacgcaagaccgagcaatagacagaggtgcctagggtccaaacacactgaacgcacgtggaccgcctggatcaggagcctcatcagacccttctccatgcacatccttcccaaacagtcacagattccattgaaaggagcagattctatcagttcttctgtgcagactttaagagctgaacgttctggttctggaagccatgtgactgcgcagaacaacctaagaaaccctttgtgtcctgaggggtcgttgacctctccttccgggtcggagcagtcactctgagggcaaagcgtggtccactgtgtgtgatgttttcaggatgctagggtcaaagaaagaaaccaagtggtacataagcccagcttttctgctgggctaagtgtaagtgtgagtaacatggtcaagcccctcttttttgggctaatgtaaagcctttcctgccttgcattaatgctatctccctgtgtactgtttctcttaaatgagcagatagaaatctgcagtgttggcagataggtgatggagaggatgataattttatcttctggccacagagctgcagccccagttgtcagagtccttaaatgaaacccccaaatccatccctccttccctacccccactggaatattctagaataagagcactggataagtacacttgaacacatttttctaaccttagaaaatacctacaaggcctgttgtcttgacccattactcaattgtccctggcatattatctgatcttcacgtttcttggaagcagaatcatcaaggctttcctttgtaactgccctttccgtacacagcaggcatgaataaatgctgagtaacagacaagttacagacaggaggggaaagaggaggaaccatacaactgtttttgcaaaatgatggctgagtccagattatagaggttgccttacccttagaatgttatttagaccaagtttagcttttagagtccaggtctggttaattgccagggtagcaaagaatcgcatgcaccaatgtaaacaggagtcagaatgcattattagtcaaagatcgaatttcacattgtagagatgtatagctgtgattaagctgcatatgtatgctgggaaacggcttgagtggatggctaatataaaagttgttggccataatgccacacctctcatctgcttgaaatatggaccagtattctaaaatatcagctactggggtctcattcactacaagataaattcaaacttcacagaactttgcagcagttcaccaccagacgggactgtgtctgcaaactctcttgtcttcacagacgcctaataaagcaaaactctgaatctca

SEQ ID NO: 20579 - protein, 592 aa, Homo sapiens
MRRWEGGDPGVSNQKTPTTILLTPERKFHSFGYAARDFYHDLDPNEAKQWLYLEKFKMKLHTTGDLTMDTDLTAANGKKVKALEIFAYALQYFKEQALKELSDQAGSEFENSDVRWVITVPAIWKQPAKQFMRQAAYQAGLASPENSEQLIIALEPEAASIYCRKLRLHQMIELSSKAAVNGYSGSDTVGAGFTQAKEHIRRNRQSRTFLVENVIGEIWSELEEGDKYVVVDSGGGTVDLTVHQIRLPEGHLKELYKATGGPYGSLGVDYEFEKLLYKIFGEDFIEQFKIKRPAAWVDLMIAFESRKRAAAPDRTNPLNITLPFSFIDYYKKFRGHSVEHALRKSNVDFVKWSSQGMLRMSPDAMNALFKPTIDSIIEHLRDLFQKPEVSTVKFLFLVGGFAEAPLLQQAVQAAFGDQCRIIIPQDVGLTILKGAVLFGLDPAVIKVRRSPLTYGVGVLNRYVEGKHPPEKLLVKDGTRWCTDVFDKFISADQSVALGELVKRSYTPAKPSQLVIVINIYSSEHDNVSFITDPGVKKCGTLRLDLTGTSGTAVPARREIQTLMQFGDTEIKATAIDIATSKSVKVGIDFLNY

SEQ ID NO: 20580 - DNA, 1308 bp, Homo sapiens
tgccaccggctggtaagcatcactgtgggccaggcactgtttacctatgggaccacgtgtaacaactcagacctttgctgagtcaagatagactaggctttgggtctaaattttggctctgctactttctaactgcacagtggtcaaaaaggtactgagcatatcaaagtctcagtattcccatttgtaggaaaggggcgcagtgagactcccttcctaacaggattcttgactggatgaatagagacaaggtatgcaaagtgcttaataaggtggcagatacgtgataagcactcagtaaatgtagctctccataaatcatcaatcctctcaacaatcgttggagcttggcattataatccccactgcacagatatggaaactgaggcctaagaggttgtcagttgtccaaagtcacatgattaggaagtggccaaagggatttcctctgatcctcctttctccagcccacggtcccattcagtgagggaaaggggctagagctcccggcttgcagaatattcaggaaacagatctttgctctctgatgctggtaagtttgggggaccctgaaactggctcctgaagagctcatggcaggaagcctgggttcagtgaagccacaggaggctgctccaggaaccagctgccacttgacctgttgcatttctttcccttggcttcaggagctgagtgaccaggcgggttcggagttcgagaactctgatgtcagatgggtcatcacggtgcctgccatctggaagcagccggccaagcagttcatgagacaagctgcctaccaggcaggcctggcctcccccgagaactcggagcagctcatcattgccttggagcctgaggcagcctctatctactgccgaaagctgcggctacaccagatgattgagctgagcagcaaggcagccgtcaatgggtacagcggcagtgacacagtaggagctgggtttacacagggtacctctgctctctctctccccctcctgctctccttccttcccaagccctggatgtctctctccctctgatgattttaaaggcacttagtgccataatgaagaatcaggatactccgggaggaggtgggctttaagcacctctctgctcagcccccctacctggcccctccaaggacccccataaatggaggcatggttaccctggttcatcacccaccaagtgtctgggggcggggagcttctctctaagaatctgagggtagcctgagagcggttattggcctcacattgtactaggctcttaatctttcttgtgtattaacagattctt

SEQ ID NO: 20581 - protein, 150 aa, Homo sapiens [sequence omitted]

SEQ ID NO: 20582 - DNA, 3167 bp, Homo sapiens
atggagttgtccagagagctcgcccttgctgcgagccactcccagccactgcctccacacctactacagccgattggcacctgtagccactgtgatgctgctgcatccactttggaggtgtcggtgctacctctcctgctggtacagacaccgccagtgctggtgccaccaccaccacgtgagtgtcaccaacactgccagcgccaggctcaccgccactgccatgtcactggagccaccaactcacaacaccgcagggccagcgcagtggtggggaagagtgaagctctgggtgttgtttgctcaagtcccactcagtttgaaggcagatgtgggacaaactgggtgacaagacgtcatgaagtgctccgaactgcccctcttctccaaataaagcttcattctggactatttggggatgtccaagggacaggacttagtccctcagacttcaaacaagcaggaaatcttcaccaaatgacttggcagttccagtgtgcaaaccgcaatcgcagctgtgcaggtcaggactccgagtcggaggtgagtgtgcgaggcatagacaagataggcgtcagaaccagaaatagaagagatatgagagctcagaataaaagcagtgtgagtaaacaacagtgtacaggagcagcaagaaagacaaagaaggtcaccaaagaggaaaaagaacgattcgtctgttcttacaactttgaactctatgtggatgttgtctatcaggatcttcagtcctcccttttctctgggataccaatgctactcaagctctacacatctaacacccaatgcatcatatcgcctccatcaaaaccagatgacgcactgatcctatttccgttaactatcacagaattctacaagggccccaggctccgtggtggatgtgaaggtaacacagactcagattctaccgtcaggggatttccatctagcaaggagagaaggcaggttcatgatggtccattacacacagacagtgagacgttccgtaagagagcagagagaacacggaggaagtttggaaggtacaatgaagccaggaaggcacttcggattgaaaagggcaaggacataggcagcattctggagagggaacggagaaaagacagagcagcgagcgcaaataccatcctagctccaataaaagggaacgacttttaccgcaggaagaacctaggcctggaagccacgcgagatctgggggtcgggatcacgttgcgttgcctagcgacagcagggacgctcgtgggaccccaggctaaaccccgctgtagccttaaatctcctaccatggaggaagaaggcggcggccgcagctgtgggaccactagggagctgcagaagctgaagcagcaggcgatggagtactaccgggagaacgacgttccgcgcaggctggaagagctgctcaactccaccttctacctccagcctgccgacgtctacgggcacctgccctctcctccaaaagcagagacaaaaaaagggcacgatggaagcaaaagaggtcaacagcagatcactggcaagatgtctcatcttggctgtttaaccattaactgtgactccatagaacagccactgcttctaatacaggaaatctgtgccaacctggggctagaactgggaacaaatctgcatctagctatcaactgtgctggacatgagctgatggactacgactctgaacagtgggacagcatctatcacgcacttggttccaggtgttacataattgcaggaactgcttccaaaagcatttctaaacttctagagcaaggaaacatcagcatccccaaatccaatgggctgatcataaaacacacaaaccaaactacaatgtctgacttggtggaaataaccaatctgattgacagtaagaagcacatcactgtctttggaagtacagaaggagaatcatctgatgacagccttgtcgatttggctgttgggcttggtgtccggttcatcaagttggggggtctttcccgtggtgaacgagtgactaaatacaaccgccttctcactatagaggaagaacttgtccagaatggaacactgggtttcaaagaagaacacacttttttttactttaatgaggaagctgaaaaggctgcggaggcacttgaggctgctgcggctagggagccgctggtgcccaccttccccacacaaggtgtagaggaatcagccgaaacaggagcatcctctggatagggctgtacacaccccaggttccagccacaccatcagtattagtagaccgggaggtctgaagtacggcgccgtgtctccacatggagtttcctcttcaacttcaccaactcttgtggtttttattcttctaattccactgtttggtaaattacatatatgatgtttttgcctgaaattctgtgaacttcgttttgcagccaccacacttccatgtggattttgtttgtctattagctctcctgtccatttttcagggacacgctccagtaaaagaggccaatatttttgttgccaactccacactcagtcaaacaccccatcctttaccaatcagaatatctctgagaacaaaaacctaatgaccctagaagctctctgtgctgggaacagatgtccatcttctgtgtttattctacatgtctgtgctgaaaagcactgacacatttttgtaaccaacctcacgtagaagtgtgagagcatcaccattttttgtaagagccaatttcatctcactttcctacccttgattccttttttcctaattccctctcctttttaaattttagtttttcttgtattatttttatctttgcgagtcttcttagatcctttttggagtaagaatgagtataaatgaataagcacatcagtaaatgaattaatattctcaaggttattaaatgcccagttattcataccacagcatttaaaaagcaatccgcaagtgataaaaaaaaaaaaaaaaaatgatgtgacatatccattgcctgaattgctcttttgtaagccagtgttgggattatagcagaggagtagcagaaataaatatattcagacacaaacatatagatataataatatccaaccactttatatgatttagggtctcgttaaaatggttaccatttgcttctcctaaaaattatataaat

SEQ ID NO: 20583 - protein, 744 aa, Homo sapiens
MELSRELALAASHSQPLPPHLLQPIGTCSHCDAAASTLEVSVLPLLLVQTPPVLVPPPPRECHQHCQRQAHRHCHVTGATNSQHRRASAVVGKSEALGVVCSSPTQFEGRCGTNWVTRRHEVLRTAPLLQIKLHSGLFGDVQGTGLSPSDFKQAGNLHQMTWQFQCANRNRSCAGQDSESEVSVRGIDKIGVRTRNRRDMRAQNKSSVSKQQCTGAARKTKKVTKEEKERFVCSYNFELYVDVVYQDLQSSLFSGIPMLLKLYTSNTQCIISPPSKPDDALILFPLTITEFYKGPRLRGGCEGNTDSDSTVRGFPSSKERRQVHDGPLHTDSETFRKRAERTRRKFGRYNEARKALRIEKGKDIGSILERERRKDRAASANTILAPIKGNDFYRRKNLGLEATRDLGVGITLRCLATAGTLVGPQAKPRCSLKSPTMEEEGGGRSCGTTRELQKLKQQAMEYYRENDVPRRLEELLNSTFYLQPADVYGHLPSPPKAETKKGHDGSKRGQQQITGKMSHLGCLTINCDSIEQPLLLIQEICANLGLELGTNLHLAINCAGHELMDYDSEQWDSIYHALGSRCYIIAGTASKSISKLLEQGNISIPKSNGLIIKHTNQTTMSDLVEITNLIDSKKHITVFGSTEGESSDDSLVDLAVGLGVRFIKLGGLSRGERVTKYNRLLTIEEELVQNGTLGFKEEHTFFYFNEEAEKAAEALEAAAAREPLVPTFPTQGVEESAETGASSG

SEQ ID NO: 20584 - DNA, 395 bp, Homo sapiens
cggacacggtagggtgctccatgccacagggcctttgaacaaacctttcttatccttggaataaatgccttttcttccttttgttcccctgccaaacacatgctattaggaaagattcaaccccatgtcatcacctccacaaagttctctcttaaaaatgcaacattctgacagcatgtggaggcttggatggaaacacggtaaaaattacaacattgtttctcacacttttgcaccaaagtgatacaaatcgcagagctgaggcaactggtgtttctgcgagaatggaatggaatgtggttgaaattttgtgttgttttttaaatatttgcaactatttgtcattcttccataaaaatcagaattcatggttgtgtacataaaagtaattttct

SEQ ID NO: 20585 - protein, 39 aa, Homo sapiens [sequence omitted]

SEQ ID NO: 20586 - DNA, 1252 bp, Homo sapiens
gaggagctgcttaaggtcggtgagctgagctgagggcattaaggtatgtgttaaaaatgacaattggcaagcatgggcggtgggccggcccacaaacggagaggcctcttaggcagcgaggaagcctgccagcccctgggctgccgctgcaggtcaaatacgcctagcgccctctttcctccagctgcctcctttctgccactttctctggggagatcccttcacccctgggtgtccttcccgctccttccctccagaagtctcctccgcacacgcaggcccagggcccgggcggctggcatgcgagattctgaggcgcaggcgcaggcgcaaggcgttgccgcagcgcggggcggggggagaggggttggcgggaggagagcgcttgtcccaggtccctaccaggtgcccgtagacgtcggcaggctggaggtagaaggtggagttgagcagctcttccagcctgcgcggaacgtcgttctcccggtagtactccatcgcctgctgcttcagcttctgcagctccctagtggtcccacagctgcggccgccgccttcttcctccatgatgaaaacatctgagactcagggctaagcaccttgcccaaggccacacaacaagtaggtgatggagagtgttggcgtgtacggattctgtgggtgtaaagcaaagaacaaaatgaagtgtgattcaaggtgggaaatagccgcttcagctcccccaggctgcagcagctaccacacaaagaagcagtcctatggcaatgacaggacatctgtgtccaggatttggatttgacgaactggcagttcctgcagggatgacggtactccctagttgtgtctgaattggacgcaccagcacttgagcacacacaaacgcacgtgaacagacggaacatgttatgggcctgttagccaaggaatgacagaattaatccatgggcatttgcggccagtgttgtgttaaactaaagggaaaaagtgaactggaaaaagcaatgtttgttttatgaaaatctcagacccaatccttaggtgacagttctggaaatgaggggtgtctaaaacaaagggcatctgaaacttcggtttttcagcttcctttccttgtctcatgacctctttcctacccgctgcctctgttttctctaatatggaacagtgaaaatgggggccagcaaaacagattgctgatgtctgttgattttatcaaaggaaggttagattgagtaagatggcataaataagc

SEQ ID NO: 20587 - protein, 169 aa, Homo sapiens [sequence omitted]

SEQ ID NO: 20588 - DNA, 1816 bp, Homo sapiens
cgctcgtgggaccccaggctaaaccccgctgtagccttaaatctcctaccatggaggaagaaggcggcggccgcagctgtgggaccactagggagctgcagaagctgaagcagcaggcgatggagtactaccgggagaacgacgttccgcgcaggctggaagagctgctcaactccaccttctacctccagcctgccgacgtctacgggcacctgccctctcctccaaaagcagagacaaaaaaagggcacgatggaagcaaaagaggtcaacagcagatcactggcaagatgtctcatcttggctgtttaaccattaactgtgactccatagaacagccactgcttctaatacaggaaatctgtgccaacctggggctagaactgggaacaaatctgcatctagctatcaactgtgctggacatgagctgatggactacgactctgaacagtgggacagcatctatcacgcacttggttccaggtgttacataattgcaggaactgcttccaaaagcatttctaaacttctagagcaaggaaacatcagcatccccaaatccaatgggctgatcataaaacacacaaaccaaactacaatgtctgacttggtggaaataaccaatctgattgacagtaagaagcacatcactgtctttggaagtacagaaggagaatcatctgatgacagccttgtcgatttggctgttgggcttggtgtccggttcatcaagttggggggtctttcccgtggtgaacgagtgactaaatacaaccgccttctcactatagaggaagaacttgtccagaatggaacactgggtttcaaagaagaacacacttttttttactttaatgaggaagctgaaaaggctgcggaggcacttgaggctgctgcggctagggagccgctggtgcccaccttccccacacaaggtgtagaggaatcagccgaaacaggagcatcctctggatagggctgtacacaccccaggttccagccacaccatcagtattagtagaccgggaggtctgaagtacggcgccgtgtctccacatggagtttcctcttcaacttcaccaactcttgtggtttttattcttctaattccactgtttggtaaattacatatatgatgtttttgcctgaaattctgtgaacttcgttttgcagccaccacacttccatgtggattttgtttgtctattagctctcctgtccatttttcagggacacgctccagtaaaagaggccaatatttttgttgccaactccacactcagtcaaacaccccatcctttaccaatcagaatatctctgagaacaaaaacctaatgaccctagaagctctctgtgctgggaacagatgtccatcttctgtgtttattctacatgtctgtgctgaaaagcactgacacatttttgtaaccaacctcacgtagaagtgtgagagcatcaccattttttgtaagagccaatttcatctcactttcctacccttgattccttttttcctaattccctctcctttttaaattttagtttttcttgtattatttttatctttgcgagtcttcttagatcctttttggagtaagaatgagtataaatgaataagcacatcagtaaatgaattaatattctcaaggttattaaatgcccagttattcataccacagcatttaaaaagcaatccgcaagtgataaaaaaaaaaaaaaaaaatgatgtgacatatccattgcctgaattgctcttttgtaagccagtgttgggattatagcagaggagtagcagaaataaatatattcagacac

SEQ ID NO: 20589 - protein, 308 aa, Homo sapiens
MEEEGGGRSCGTTRELQKLKQQAMEYYRENDVPRRLEELLNSTFYLQPADVYGHLPSPPKAETKKGHDGSKRGQQQITGKMSHLGCLTINCDSIEQPLLLIQEICANLGLELGTNLHLAINCAGHELMDYDSEQWDSIYHALGSRCYIIAGTASKSISKLLEQGNISIPKSNGLIIKHTNQTTMSDLVEITNLIDSKKHITVFGSTEGESSDDSLVDLAVGLGVRFIKLGGLSRGERVTKYNRLLTIEEELVQNGTLGFKEEHTFFYFNEEAEKAAEALEAAAAREPLVPTFPTQGVEESAETGASSG

SEQ ID NO: 20590 - DNA, 444 bp, Homo sapiens
aattggaaaagagcctggaatactcaacagtgcctacacctctacctccagtaccaccaccaccaccccctccacctcctaccaaaaaaaaggggcaaaagccagggaggaaggatactattacagagaaacctattgcgcctgcagagcctgttgagcctgtactcagtggcagtatggccataggggccgtgtcactagctgttgccaaagcctgtgccatgctgcttaataaacctctgtacttaaatatcgctctactgaagcacaatcaggaacagccaacaacgctatctatgcctttgctgatggtatcgctggtcagctgtgggaagtcatcatctgggaagctaaatttaatgaaagaagtgatttgtataccccatcctgaattaacaaccaaacaagtaccttacattatcttaaattaccttttctaaaaaa

SEQ ID NO: 20591 - protein, 87 aa, Homo sapiens
MAIGAVSLAVAKACAMLLNKPLYLNIALLKHNQEQPTTLSMPLLMVSLVSCGKSSSGKLNLMKEVICIPHPELTTKQVPYIILNYLF

SEQ ID NO: 20592 - DNA, 523 bp, Homo sapiens
aaccaaactacaatgtctgacttggtggaaataaccaatctgattgacagtaagaagcacatcactgtctttggaagtacagaaggagaatcatctgatgacagccttgtcgatttggctgttgggcttggtgtccggttcatcaagttggggggtctttcccgtggtgaacgagtgactaaatacaaccgccttctcactatagaggaagaacttgtccagaatggaacactggccacttcatcttcaagctgtgatgccaggattggagggcaagaacaggaaacaatgactttggtgaaagtgtaaccactcttttagaacaaaaacagcacagtgttatttgaaaaattattaacatatgtgatggagcagtctgtaagcacgatcaaataaactggccaaagatgaggctaattgtaaatgggaataaaacacaccacaaacaattcacaaaaaacagattttaaaatactctcctttcatttccccattagctaaacaataaactgaaatctattct

SEQ ID NO: 20593 - protein, 98 aa, Homo sapiens
MSDLVEITNLIDSKKHITVFGSTEGESSDDSLVDLAVGLGVRFIKLGGLSRGERVTKYNRLLTIEEELVQNGTLATSSSSCDARIGGQEQETMTLVKV

SEQ ID NO: 20594 - DNA, 4798 bp, Homo sapiens
aacacacaatacctagaatttggagaatgctgcaagacagctttgagggcagctaccacttcttttttgcctgtgaaaattggagggaaagaactttgaattggaagaaagaagaacaccaaaagagaaagagagtgaaaggaattccatcctagtgggaatgatttaatgtgttgtattctttagggataagagtgtagaaatccagaaagcacagttctggccagacttacataggtggagcagtagaattgtcgactactattaaaaatgaattgatggtcctttcattgtatgccaaggattcttaaacagtgtgacaaaattaggcaagaacgagatgaagccgttaaaaaactggaagaatttcagaaaatttctcacatggtcatagaggaagttaatttcatgcagaaccatcttgaaatagagaagacttgtcgagaaagtgctgaagctttggcaacaaagctaaataaagaaaataaaacgttgaaaagaatcagcatgttgtacatggccaagctgggaccagatgtaataactgaagagataaacattgatgatgaagattcgactacagacacagacggtgccgccgagacttgtgtctcagtacagtgtcagaagcaaattaaagaacttcgagatcaaattgtatctgttcaggaggaaaagaagattttagccattgagctggaaaatctcaagagcaaactcgtagaagtaattgaagaagtaaataaagttaaacaagaaaagactgttttaaattcagaagttcttgaacagagaaaagtcttagaaaaatgcaatagagtgtccatgttagctgtagaagagtatgaggagatgcaagtaaacctggagctggagaaggaccttcgaaagaaagcagagtcatttgcacaagagatgttcattgagcaaaacaagctaaagagacaaagccaccttctgctgcagagctccatccctgatcagcagcttttgaaagctttagacgaaaatgcaaaactcacccagcaacttgaagaagagagaattcagcatcaacaaaaggtcaaagaattagaagagcaactagaaaatgaaacactccacaaagaaatacacaacctcaaacagcaactggagcttctagaggaagataaaaaggaattggaattgaaatatcagaattctgaagagaaagccagaaatttaaagcactctgttgatgaactccagaaacgagtgaaccagtctgagaattcagtacctccaccacctcctcctccaccaccacttccccctccacctcccaatcctatccgatccctcatgtccatgatccggaaacgatcccaccccagtggcagtggtgctaagaaagaaaaggcaactcaaccagaaacaactgaagaagtcacagatctaaagaggcaagcagttgaagagatgatggatagaattaaaaagggagttcatcttagacccgttaatcagacagccagaccgaagacaaagccagaatcttcgaaaggctgcgaaagtgcagtggatgaactaaaaggaatactggggacacttaacaaatccactagttcaagaagcttaaaatcccttgaccctgaaaacagtgaaactgagttagaaaggattttgcgtcgcagaaaggtgacagcagaagcagatagcagtagtccaactgggatattagccacctcagagtccaaatccatgccagtgttgggttctgtatccagtgtaacaaaaacagccttgaacaagaaaactctggaggcagaattcaacagcccgtcccccccaacacctgagccaggtgaagggccccgtaaattggaaggatgcacaagttccaaggttacgtttcagcctcccagtagcattggatgcaggaaaaaatacattgacggtgaaaaacaagccgaaccagttgtagttttagatcctgtttctacacatgaaccccaaaccaaagaccaggttgctgaaaaagatccaactcaacacaaggaggatgaaggcgaaattcaaccagaaaacaaagaagacagcattgaaaacgtgagagagacagacagctccaactgctgatccataaaccagaagcctgacatgtttggaagtccttttcaataagcacatgattagtgttgttatattggcaagggctgtagacattctgctctggtcactgtattcagaatacaggttcttttctggtgtcacttttgtaagtagcaactataaacataagtaagctgtttagcaaaacacacattcctagtaggttttggttttttgatctttataaagatgaggtttttttcctagttactgtattaagtatgacttcttttagaaggttacaaaaaaattcagatgttgatacctttttaggaaatgtgcataccactcatcaaatggaatgctgaaagtttgaggtgcttgtatataatcggataaacaaaactgatcaacccaatgtgattttaaaagcccccaaagaagcttctgttttgggtctgatcctcttgatggagaaactgcagcagcatggaaattgttgggtactgtggcatacaagttattttctacagtagactgagataaactgaaaactcaggagctggcatcaaactcgtagtcccatagtcagtgttaattacacacattgttaactattggatgaaaaatacatgctattgattgtgtccaaagcctcccgaggacctccgtggggatgctctggtagcctgaatacagaactgaggtgaaagtccaaaccttgaattttacagtagtaagttggtaaaccatgtgctctgtgctatgagttaattatgttttcccaaatactaatgtggcacaagtaccatattttatcagagttcttatgtacagtatggtgaagataagtgacaagcacacatttttcttgcttcactgctgttctatattacacaggtttgttgttgttttttttaaaaaagaaattaagcagtagttagtctctaaaaatacaatgtttcaggctaccacagtgaataaatagaaatgtaatcagggattaaaaaaaaaacttatgcagcttttcaaagttgattgtttcaaaattggtgtttatttaaaataagtggtaatgtacttgaatgcactttttatgacaatgattcagtaatggtaattttactattaaagaaagtgaaaggtttagttttgttagcatggctcagcatgtagctgtcaggtgtttttcacctaagggcaaaagaaaatgatagtaataattgcagtagttgtattgtattgtatttttgcacgtgtggtaagcataggcttgaagaggtgggtaggcaggtacatgtacttcctaaatttggagataattatctttctgtaagttcgttatgcttgactgtttccatgttctcccaataatgattttatagttacttatcactttactcatggagaattaaaacgtaatgtttttcaactgtatctttctttaactggataatactgctatatgatatgcttactacagactgcattaattcacgaaacgaattctgttatgctgtaatttgaactctcctcaccacaacttattaaaaaggcaccaatagtttcccattaagggtcagttgtggttattattaacgtttctggtttagttccccaagcttgacattctttaatagaaaattgtatatgatttgacaactttagtaatttttaatagtccctaagatggtttattgagttttctttcatgtttctttgtgctgtcttccttcttgcatctgtgatctgtctgccagcatgcaactcacacacatttaggaatataaaaatatgtacactgtctttccatatttcatcacaccatcacagaataatatggttatcaaaataccctcctttctagagtaagaagttgccctttgggtgaaatgtgttagctggactagggaacaattagtaacaggtattttgaaagtattcctgccttttttaagctgcttactttctctcactgtgattacaaagcattttaaattaatttgacatgaaggtatttgatggaagatattcactcacctttttctgcctacagtttttcccttttcactttggttttgagggggttttgcccctggctggggtgacactgtcaaccaaagcaagggatcccaaataggaagacataggagaaccgtgcttatatctgcaaggtatgttcatagctattgcacacacaaaacttacatacgtcctgcttacacaattttaagttggaaaagactgcatctttatgtttttgatttctctaaaaggttatttatgcttccttctgtttgggaaagataaattaagtcttgtgcgctatagaggattttttttctttaagaaaaacgaatgttgatgcattttatagcccgagtgaggaacagagatagaggtactttgtgccattgctattaaagaaaaagaaaatgtctctttttttttctggaagaataagattttaattaaagcacttgcacccttttgtatgtgagctggtctcaaacaaagtcctcacccacagcagtttcagcagctgaacagtcccatggaagttctgactggcaggcatcaacagggctattagcacccagcatagtttgccctgagtacggaggatggatgctttggctctaactactcaccaataattgctccttccttaccttctttgttaatggtaaactgctggaaatggagtagtacaggtaacaattat

SEQ ID NO: 20595 - protein, 601 aa, Homo sapiens
MPRILKQCDKIRQERDEAVKKLEEFQKISHMVIEEVNFMQNHLEIEKTCRESAEALATKLNKENKTLKRISMLYMAKLGPDVITEEINIDDEDSTTDTDGAAETCVSVQCQKQIKELRDQIVSVQEEKKILAIELENLKSKLVEVIEEVNKVKQEKTVLNSEVLEQRKVLEKCNRVSMLAVEEYEEMQVNLELEKDLRKKAESFAQEMFIEQNKLKRQSHLLLQSSIPDQQLLKALDENAKLTQQLEEERIQHQQKVKELEEQLENETLHKEIHNLKQQLELLEEDKKELELKYQNSEEKARNLKHSVDELQKRVNQSENSVPPPPPPPPPLPPPPPNPIRSLMSMIRKRSHPSGSGAKKEKATQPETTEEVTDLKRQAVEEMMDRIKKGVHLRPVNQTARPKTKPESSKGCESAVDELKGILGTLNKSTSSRSLKSLDPENSETELERILRRRKVTAEADSSSPTGILATSESKSMPVLGSVSSVTKTALNKKTLEAEFNSPSPPTPEPGEGPRKLEGCTSSKVTFQPPSSIGCRKKYIDGEKQAEPVVVLDPVSTHEPQTKDQVAEKDPTQHKEDEGEIQPENKEDSIENVRETDSSNC

SEQ ID NO: 20596 - DNA, 4593 bp, Homo sapiens
agcgcgtcctgccgcgccggcagccacaggctggcatagcggctgccgacccgccctcgttcctccaccccctgaacgggactgctgggcccgccccgccccgcctgcaggtgaagcggccgcagccgccgagtaggtgcgtggggatgatctcactcgcgcgctccgcgccaggaggaggaggagcgggagcggatccaacttccgggtagtggagccgcaagccaccggcatcttgctttttcttccccctcctcctgtgtgccccgcgccgctccctctttcccttttattcccggccccacccgccaaaatgaacagctcggacgaagagaagcagctgcagctcattaccagtctgaaggagcaagcaataggcgaatatgaagaccttagagcagagaaccagaaaacaaaggagaagtgtgacaaaattaggcaagaacgagatgaagccgttaaaaaactggaagaatttcagaaaatttctcacatggtcatagaggaagttaatttcatgcagaaccatcttgaaatagagaagacttgtcgagaaagtgctgaagctttggcaacaaagctaaataaagaaaataaaacgttgaaaagaatcagcatgttgtacatggccaagctgggaccagatgtaataactgaagagataaacattgatgatgaagattcgactacagacacagacggtgccgccgagacttgtgtctcagtacagtgtcagaagcaaattaaagaacttcgagatcaaattgtatctgttcaggaggaaaagaagattttagccattgagctggaaaatctcaagagcaaactcgtagaagtaattgaagaagtaaataaagttaaacaagaaaagactgttttaaattcagaagttcttgaacagagaaaagtcttagaaaaatgcaatagagtgtccatgttagctgtagaagagtatgaggagatgcaagtaaacctggagctggagaaggaccttcgaaagaaagcagagtcatttgcacaagagatgttcattgagcaaaacaagctaaagagacaaagccaccttctgctgcagagctccatccctgatcagcagcttttgaaagctttagacgaaaatgcaaaactcacccagcaacttgaagaagagagaattcagcatcaacaaaaggtcaaagaattagaagagcaactagaaaatgaaacactccacaaagaaatacacaacctcaaacagcaactggagcttctagaggaagataaaaaggaattggaattgaaatatcagaattctgaagagaaagccagaaatttaaagcactctgttgatgaactccagaaacgagtgaaccagtctgagaattcagtacctccaccacctcctcctccaccaccacttccccctccacctcccaatcctatccgatccctcatgtccatgatccggaaacgatcccaccccagtggcagtggtgctaagaaagaaaaggcaactcaaccagaaacaactgaagaagtcacagatctaaagaggcaagcagttgaagagatgatggatagaattaaaaagggagttcatcttagacccgttaatcagacagccagaccgaagacaaagccagaatcttcgaaaggctgcgaaagtgcagtggatgaactaaaaggaatactggcctcccagtagcattggatgcaggaaaaaatacattgacggtgaaaaacaagccgaaccagttgtagttttagatcctgtttctacacatgaaccccaaaccaaagaccaggttgctgaaaaagatccaactcaacacaaggaggatgaaggcgaaattcaaccagaaaacaaagaagacagcattgaaaacgtgagagagacagacagctccaactgctgatccataaaccagaagcctgacatgtttggaagtccttttcaataagcacatgattagtgttgttatattggcaagggctgtagacattctgctctggtcactgtattcagaatacaggttcttttctggtgtcacttttgtaagtagcaactataaacataagtaagctgtttagcaaaacacacattcctagtaggttttggttttttgatctttataaagatgaggtttttttcctagttactgtattaagtatgacttcttttagaaggttacaaaaaaattcagatgttgatacctttttaggaaatgtgcataccactcatcaaatggaatgctgaaagtttgaggtgcttgtatataatcggataaacaaaactgatcaacccaatgtgattttaaaagcccccaaagaagcttctgttttgggtctgatcctcttgatggagaaactgcagcagcatggaaattgttgggtactgtggcatacaagttattttctacagtagactgagataaactgaaaactcaggagctggcatcaaactcgtagtcccatagtcagtgttaattacacacattgttaactattggatgaaaaatacatgctattgattgtgtccaaagcctcccgaggacctccgtggggatgctctggtagcctgaatacagaactgaggtgaaagtccaaaccttgaattttacagtagtaagttggtaaaccatgtgctctgtgctatgagttaattatgttttcccaaatactaatgtggcacaagtaccatattttatcagagttcttatgtacagtatggtgaagataagtgacaagcacacatttttcttgcttcactgctgttctatattacacaggtttgttgttgttttttttaaaaaagaaattaagcagtagttagtctctaaaaatacaatgtttcaggctaccacagtgaataaatagaaatgtaatcagggattaaaaaaaaaacttatgcagcttttcaaagttgattgtttcaaaattggtgtttatttaaaataagtggtaatgtacttgaatgcactttttatgacaatgattcagtaatggtaattttactattaaagaaagtgaaaggtttagttttgttagcatggctcagcatgtagctgtcaggtgtttttcacctaagggcaaaagaaaatgatagtaataattgcagtagttgtattgtattgtatttttgcacgtgtggtaagcataggcttgaagaggtgggtaggcaggtacatgtacttcctaaatttggagataattatctttctgtaagttcgttatgcttgactgtttccatgttctcccaataatgattttatagttacttatcactttactcatggagaattaaaacgtaatgtttttcaactgtatctttctttaactggataatactgctatatgatatgcttactacagactgcattaattcacgaaacgaattctgttatgctgtaatttgaactctcctcaccacaacttattaaaaaggcaccaatagtttcccattaagggtcagttgtggttattattaacgtttctggtttagttccccaagcttgacattctttaatagaaaattgtatatgatttgacaactttagtaatttttaatagtccctaagatggtttattgagttttctttcatgtttctttgtgctgtcttccttcttgcatctgtgatctgtctgccagcatgcaactcacacacatttaggaatataaaaatatgtacactgtctttccatatttcatcacaccatcacagaataatatggttatcaaaataccctcctttctagagtaagaagttgccctttgggtgaaatgtgttagctggactagggaacaattagtaacaggtattttgaaagtattcctgccttttttaagctgcttactttctctcactgtgattacaaagcattttaaattaatttgacatgaaggtatttgatggaagatattcactcacctttttctgcctacagtttttcccttttcactttggttttgagggggttttgcccctggctggggtgacactgtcaaccaaagcaagggatcccaaataggaagacataggagaaccgtgcttatatctgcaaggtatgttcatagctattgcacacacaaaacttacatacgtcctgcttacacaattttaagttggaaaagactgcatctttatgtttttgatttctctaaaaggttatttatgcttccttctgtttgggaaagataaattaagtcttgtgcgctatagaggattttttttctttaagaaaaacgaatgttgatgcattttatagcccgagtgaggaacagagatagaggtactttgtgccattgctattaaagaaaaagaaaatgtctctttttttttctggaagaataagattttaattaaagcacttgcacccttttgtatgtgagctggtctcaaacaaagtcctcacccacagcagtttcagcagctgaacagtcccatggaagttctgactggcaggcatcaacagggctattagcacccagcatagtttgccctgagtacggaggatggatgctttggctctaactactcaccaataattgctccttccttaccttctttgttaatggtaaactgctggaaatggagtagtacaggtaacaattat

SEQ ID NO: 20597 - protein, 456 aa, Homo sapiens; identical to SEQ ID NO: 2609

SEQ ID NO: 20598 - DNA, 3726 bp, Homo sapiens
gaagaagcccaggcgttcatggctcattgcgtcccgctctacctctgtggttctttgggagcgacccccgggaagcgtccaaagtggagttcccacacacgctgcgaacccacagccggttttctctgaactcgcgtccctgagtccgggaggtggaggcggagaaaagggtgcggagcgaccccacgcagggccgccccccctcccaccagcgcgtcctgccgcgccggcagccacaggctggcatagcggctgccgacccgccctcgttcctccacccccttggcagtggtgctaagaaagaaaaggcaactcaaccagaaacaactgaagaagtcacagatctaaagaggcaagcagttgaagagatgatggatagaattaaaaagggagttcatcttagacccgttaatcagacagccagaccgaagacaaagccagaatcttcgaaaggctgcgaaagtgcagtggatgaactaaaaggaatactggggacacttaacaaatccactagttcaagaagcttaaaatcccttgaccctgaaaacagtgaaactgagttagaaaggattttgcgtcgcagaaaggtgacagcagaagcagatagcagtagtccaactgggatattagccacctcagagtccaaatccatgccagtgttgggttctgtatccagtgtaacaaaaacagccttgaacaagaaaactctggaggcagaattcaacagcccgtcccccccaacacctgagccaggtgaagggccccgtaaattggaaggatgcacaagttccaaggttacgtttcagcctcccagtagcattggatgcaggaaaaaatacattgacggtgaaaaacaagccgaaccagttgtagttttagatcctgtttctacacatgaaccccaaaccaaagaccaggttgctgaaaaagatccaactcaacacaaggaggatgaaggcgaaattcaaccagaaaacaaagaagacagcattgaaaacgtgagagagacagacagctccaactgctgatccataaaccagaagcctgacatgtttggaagtccttttcaataagcacatgattagtgttgttatattggcaagggctgtagacattctgctctggtcactgtattcagaatacaggttcttttctggtgtcacttttgtaagtagcaactataaacataagtaagctgtttagcaaaacacacattcctagtaggttttggttttttgatctttataaagatgaggtttttttcctagttactgtattaagtatgacttcttttagaaggttacaaaaaaattcagatgttgatacctttttaggaaatgtgcataccactcatcaaatggaatgctgaaagtttgaggtgcttgtatataatcggataaacaaaactgatcaacccaatgtgattttaaaagcccccaaagaagcttctgttttgggtctgatcctcttgatggagaaactgcagcagcatggaaattgttgggtactgtggcatacaagttattttctacagtagactgagataaactgaaaactcaggagctggcatcaaactcgtagtcccatagtcagtgttaattacacacattgttaactattggatgaaaaatacatgctattgattgtgtccaaagcctcccgaggacctccgtggggatgctctggtagcctgaatacagaactgaggtgaaagtccaaaccttgaattttacagtagtaagttggtaaaccatgtgctctgtgctatgagttaattatgttttcccaaatactaatgtggcacaagtaccatattttatcagagttcttatgtacagtatggtgaagataagtgacaagcacacatttttcttgcttcactgctgttctatattacacaggtttgttgttgttttttttaaaaaagaaattaagcagtagttagtctctaaaaatacaatgtttcaggctaccacagtgaataaatagaaatgtaatcagggattaaaaaaaaaacttatgcagcttttcaaagttgattgtttcaaaattggtgtttatttaaaataagtggtaatgtacttgaatgcactttttatgacaatgattcagtaatggtaattttactattaaagaaagtgaaaggtttagttttgttagcatggctcagcatgtagctgtcaggtgtttttcacctaagggcaaaagaaaatgatagtaataattgcagtagttgtattgtattgtatttttgcacgtgtggtaagcataggcttgaagaggtgggtaggcaggtacatgtacttcctaaatttggagataattatctttctgtaagttcgttatgcttgactgtttccatgttctcccaataatgattttatagttacttatcactttactcatggagaattaaaacgtaatgtttttcaactgtatctttctttaactggataatactgctatatgatatgcttactacagactgcattaattcacgaaacgaattctgttatgctgtaatttgaactctcctcaccacaacttattaaaaaggcaccaatagtttcccattaagggtcagttgtggttattattaacgtttctggtttagttccccaagcttgacattctttaatagaaaattgtatatgatttgacaactttagtaatttttaatagtccctaagatggtttattgagttttctttcatgtttctttgtgctgtcttccttcttgcatctgtgatctgtctgccagcatgcaactcacacacatttaggaatataaaaatatgtacactgtctttccatatttcatcacaccatcacagaataatatggttatcaaaataccctcctttctagagtaagaagttgccctttgggtgaaatgtgttagctggactagggaacaattagtaacaggtattttgaaagtattcctgccttttttaagctgcttactttctctcactgtgattacaaagcattttaaattaatttgacatgaaggtatttgatggaagatattcactcacctttttctgcctacagtttttcccttttcactttggttttgagggggttttgcccctggctggggtgacactgtcaaccaaagcaagggatcccaaataggaagacataggagaaccgtgcttatatctgcaaggtatgttcatagctattgcacacacaaaacttacatacgtcctgcttacacaattttaagttggaaaagactgcatctttatgtttttgatttctctaaaaggttatttatgcttccttctgtttgggaaagataaattaagtcttgtgcgctatagaggattttttttctttaagaaaaacgaatgttgatgcattttatagcccgagtgaggaacagagatagaggtactttgtgccattgctattaaagaaaaagaaaatgtctctttttttttctggaagaataagattttaattaaagcacttgcacccttttgtatgtgagctggtctcaaacaaagtcctcacccacagcagtttcagcagctgaacagtcccatggaagttctgactggcaggcatcaacagggctattagcacccagcatagtttgccctgagtacggaggatggatgctttggctctaactactcaccaataattgctccttccttaccttctttgttaatggtaaactgctggaaatggagtagtacaggtaacaattat

SEQ ID NO: 20599 - protein, 219 aa, Homo sapiens
MMDRIKKGVHLRPVNQTARPKTKPESSKGCESAVDELKGILGTLNKSTSSRSLKSLDPENSETELERILRRRKVTAEADSSSPTGILATSESKSMPVLGSVSSVTKTALNKKTLEAEFNSPSPPTPEPGEGPRKLEGCTSSKVTFQPPSSIGCRKKYIDGEKQAEPVVVLDPVSTHEPQTKDQVAEKDPTQHKEDEGEIQPENKEDSIENVRETDSSNC

SEQ ID NO: 20600 - DNA, 3647 bp, Homo sapiens
aacacacaatacctagaatttggagaatgctgcaagacagctttgagggcagctaccacttcttttttgcctgtgaaaattggagggaaagaactttgaattggaagaaagaagaacaccaaaagagaaagagagtgaaaggaattccatcctagtgggaatgatttaatgtgttgtattctttagggataagagtgtagaaatccagaaagcacagttctggccagacttacataggtggagcagtagaattgtcgactactattaaaaatgaattgatggtcctttcattgtatgccaaggattcttaaacagtgtgacaaaattaggcaagaacgagatgaagccgttaaaaaactggaagaatttcagaaaatttctcacatggtcatagaggaagttaatttcatgcagaaccatcttgaaatagagaagacttgtcgagaaagtgctgaagctttggcaacaaagctaaataaagaaaataaaacgttgaaaagaatcagcatgttgtacatggccaagctgggaccagatgtaataactgaagagataaacattgatgatgaagattcgactacagacacagacggtgccgccgagacttgtgtctcagtacagtgtcagaagcaaattaaagaacttcgagatcaaattgtatctgttcaggaggaaaagaagattttagccattgagctggaaaatctcaagagcaaactcgtagaagtaattgaagaagtaaataaagttaaacaagaaaagactgttttaaattcagaagttcttgaacagagaaaagtcttagaaaaatgcaatagagtgtccatgttagctgtagaagagtatgaggagatgcaagtaaacctggagctggagaaggaccttcgaaagaaagcagagtcatttgcacaagagatgttcattgagcaaaacaagctaaagagacaaagccaccttctgctgcagagctccatccctgatcagcagcttttgaaagctttagacgaaaatgcaaaactcacccagcaacttgaagaagagagaattcagcatcaacaaaaggtcaaagaattagaagagcaactagaaaatgaaacactccacaaagaaatacacaacctcaaacagcaactggagcttctagaggaagataaaaaggaattggaattgaaatatcagaattctgaagagaaagccagaaatttaaagcactctgttgatgaactccagaaacgagtgaaccagtctgagaattcagtacctccaccacctcctcctccaccaccacttccccctccacctcccaatcctatccgatccctcatgtccatgatccggaaacgatcccaccccagtggcagtggtgctaagaaagaaaaggcaactcaaccagaaacaactgaagaagtcacagatctaaagaggcaagcagttgaagagatgatggatagaattaaaaagggagttcatcttagacccgttaatcagacagccagaccgaagacaaagccagaatcttcgaaaggctgcgaaagtgcagtggatgaactaaaaggaatactggggacacttaacaaatccactagttcaagaagcttaaaatcccttgaccctgaaaacagtgaaactgagttagaaaggattttgcgtcgcagaaaggtgacagcagaagcagatagcagtagtccaactgggatattagccacctcagagtccaaatccatgccagtgttgggttctgtatccagtgtaacaaaaacagccttgaacaagaaaactctggaggcagaattcaacagcccgtcccccccaacacctgagccaggtgaagggccccgtaaattggaaggatgcacaagttccaaggttacgtttcagcctcccagtagcattggatgcaggaaaaaatacattgacggtgaaaaacaagccgaaccagttgtagttttagatcctgtttctacacatgaaccccaaaccaaagaccaggttgctgaaaaagatccaactcaacacaaggaggatgaaggcgaaattcaaccagaaaacaaagaagacagcattgaaaacgtgagagagacagacagctccaactgctgatccataaaccagaagcctgacatgtttggaagtccttttcaataagcacatgattagtgttgttatattggcaagggctgtagacattctgctctggtcactgtattcagaatacaggttcttttctggtgtcacttttgtaagtagcaactataaacataagtaagctgtttagcaaaacacacattcctagtaggttttggttttttgatctttataaagatgaggtttttttcctagttactgtattaagtatgacttcttttagaaggttacaaaaaaattcagatgttgatacctttttaggaaatgtgcataccactcatcaaatggaatgctgaaagtttgaggtgcttgtatataatcggataaacaaaactgatcaacccaatgtgattttaaaagcccccaaagaagcttctgttttgggtctgatcctcttgatggagaaactgcagcagcatggaaattgttgggtactgtggcatacaagttattttctacagtagactgagataaactgaaaactcaggagctggcatcaaactcgtagtcccatagtcagtgttaattacacacattgttaactattggatgaaaaatacatgctattgattgtgtccaaagcctcccgaggacctccgtggggatgctctggtagcctgaatacagaactgaggtgaaagtccaaaccttgaattttacagtagtaagttggtaaaccatgtgctctgtgctatgagttaattatgttttcccaaatactaatgtggcacaagtaccatattttatcagagttcttatgtacagtatggtgaagataagtgacaagcacacatttttcttgcttcactgctgttctatattacacaggtttgttgttgttttttttaaaaaagaaattaagcagtagttagtctctaaaaatacaatgtttcaggctaccacagtgaataaatagaaatgtaatcagggattaaaaaaaaaacttatgcagcttttcaaagttgattgtttcaaaattggtgtttatttaaaataagtggtaatgtacttgaatgcactttttatgacaatgattcagtaatggtaattttactattaaagaaagtgaaaggtttagttttgttagcatggctcagcatgtagctgtcaggtgtttttcacctaagggcaaaagaaaatgatagtaataattgcagtagttgtattgtattgtatttttgcacgtgtggtaagcataggcttgaagaggtgggtaggcaggtacatgtacttcctaaatttggagataattatctttctgtaagttcgttatgcttgactgtttccatgttctcccaataatgattttatagttacttatcactttactcatggagaattaaaacgtaatgtttttcaactgtatctttctttaactggataatactgctatatgatatgcttactacagactgcattaattcacgaaacgaattctgttatgctgtaatttgaactctcctcaccacaacttattaaaaaggcaccaatagtttcccatt

SEQ ID NO: 20601 - protein, 601 aa, Homo sapiens; identical to SEQ ID NO: 20595

SEQ ID NO: 20602 - DNA, 3442 bp, Homo sapiens
agcgcgtcctgccgcgccggcagccacaggctggcatagcggctgccgacccgccctcgttcctccaccccctgaacgggactgctgggcccgccccgccccgcctgcaggtgaagcggccgcagccgccgagtaggtgcgtggggatgatctcactcgcgcgctccgcgccaggaggaggaggagcgggagcggatccaacttccgggtagtggagccgcaagccaccggcatcttgctttttcttccccctcctcctgtgtgccccgcgccgctccctctttcccttttattcccggccccacccgccaaaatgaacagctcggacgaagagaagcagctgcagctcattaccagtctgaaggagcaagcaataggcgaatatgaagaccttagagcagagaaccagaaaacaaaggagaagtgtgacaaaattaggcaagaacgagatgaagccgttaaaaaactggaagaatttcagaaaatttctcacatggtcatagaggaagttaatttcatgcagaaccatcttgaaatagagaagacttgtcgagaaagtgctgaagctttggcaacaaagctaaataaagaaaataaaacgttgaaaagaatcagcatgttgtacatggccaagctgggaccagatgtaataactgaagagataaacattgatgatgaagattcgactacagacacagacggtgccgccgagacttgtgtctcagtacagtgtcagaagcaaattaaagaacttcgagatcaaattgtatctgttcaggaggaaaagaagattttagccattgagctggaaaatctcaagagcaaactcgtagaagtaattgaagaagtaaataaagttaaacaagaaaagactgttttaaattcagaagttcttgaacagagaaaagtcttagaaaaatgcaatagagtgtccatgttagctgtagaagagtatgaggagatgcaagtaaacctggagctggagaaggaccttcgaaagaaagcagagtcatttgcacaagagatgttcattgagcaaaacaagctaaagagacaaagccaccttctgctgcagagctccatccctgatcagcagcttttgaaagctttagacgaaaatgcaaaactcacccagcaacttgaagaagagagaattcagcatcaacaaaaggtcaaagaattagaagagcaactagaaaatgaaacactccacaaagaaatacacaacctcaaacagcaactggagcttctagaggaagataaaaaggaattggaattgaaatatcagaattctgaagagaaagccagaaatttaaagcactctgttgatgaactccagaaacgagtgaaccagtctgagaattcagtacctccaccacctcctcctccaccaccacttccccctccacctcccaatcctatccgatccctcatgtccatgatccggaaacgatcccaccccagtggcagtggtgctaagaaagaaaaggcaactcaaccagaaacaactgaagaagtcacagatctaaagaggcaagcagttgaagagatgatggatagaattaaaaagggagttcatcttagacccgttaatcagacagccagaccgaagacaaagccagaatcttcgaaaggctgcgaaagtgcagtggatgaactaaaaggaatactggcctcccagtagcattggatgcaggaaaaaatacattgacggtgaaaaacaagccgaaccagttgtagttttagatcctgtttctacacatgaaccccaaaccaaagaccaggttgctgaaaaagatccaactcaacacaaggaggatgaaggcgaaattcaaccagaaaacaaagaagacagcattgaaaacgtgagagagacagacagctccaactgctgatccataaaccagaagcctgacatgtttggaagtccttttcaataagcacatgattagtgttgttatattggcaagggctgtagacattctgctctggtcactgtattcagaatacaggttcttttctggtgtcacttttgtaagtagcaactataaacataagtaagctgtttagcaaaacacacattcctagtaggttttggttttttgatctttataaagatgaggtttttttcctagttactgtattaagtatgacttcttttagaaggttacaaaaaaattcagatgttgatacctttttaggaaatgtgcataccactcatcaaatggaatgctgaaagtttgaggtgcttgtatataatcggataaacaaaactgatcaacccaatgtgattttaaaagcccccaaagaagcttctgttttgggtctgatcctcttgatggagaaactgcagcagcatggaaattgttgggtactgtggcatacaagttattttctacagtagactgagataaactgaaaactcaggagctggcatcaaactcgtagtcccatagtcagtgttaattacacacattgttaactattggatgaaaaatacatgctattgattgtgtccaaagcctcccgaggacctccgtggggatgctctggtagcctgaatacagaactgaggtgaaagtccaaaccttgaattttacagtagtaagttggtaaaccatgtgctctgtgctatgagttaattatgttttcccaaatactaatgtggcacaagtaccatattttatcagagttcttatgtacagtatggtgaagataagtgacaagcacacatttttcttgcttcactgctgttctatattacacaggtttgttgttgttttttttaaaaaagaaattaagcagtagttagtctctaaaaatacaatgtttcaggctaccacagtgaataaatagaaatgtaatcagggattaaaaaaaaaacttatgcagcttttcaaagttgattgtttcaaaattggtgtttatttaaaataagtggtaatgtacttgaatgcactttttatgacaatgattcagtaatggtaattttactattaaagaaagtgaaaggtttagttttgttagcatggctcagcatgtagctgtcaggtgtttttcacctaagggcaaaagaaaatgatagtaataattgcagtagttgtattgtattgtatttttgcacgtgtggtaagcataggcttgaagaggtgggtaggcaggtacatgtacttcctaaatttggagataattatctttctgtaagttcgttatgcttgactgtttccatgttctcccaataatgattttatagttacttatcactttactcatggagaattaaaacgtaatgtttttcaactgtatctttctttaactggataatactgctatatgatatgcttactacagactgcattaattcacgaaacgaattctgttatgctgtaatttgaactctcctcaccacaacttattaaaaaggcaccaatagtttcccatt

SEQ ID NO: 20603 - protein, 456 aa, Homo sapiens; identical to SEQ ID NO: 2609

SEQ ID NO: 20604 - DNA, 2575 bp, Homo sapiens
gaagaagcccaggcgttcatggctcattgcgtcccgctctacctctgtggttctttgggagcgacccccgggaagcgtccaaagtggagttcccacacacgctgcgaacccacagccggttttctctgaactcgcgtccctgagtccgggaggtggaggcggagaaaagggtgcggagcgaccccacgcagggccgccccccctcccaccagcgcgtcctgccgcgccggcagccacaggctggcatagcggctgccgacccgccctcgttcctccacccccttggcagtggtgctaagaaagaaaaggcaactcaaccagaaacaactgaagaagtcacagatctaaagaggcaagcagttgaagagatgatggatagaattaaaaagggagttcatcttagacccgttaatcagacagccagaccgaagacaaagccagaatcttcgaaaggctgcgaaagtgcagtggatgaactaaaaggaatactggggacacttaacaaatccactagttcaagaagcttaaaatcccttgaccctgaaaacagtgaaactgagttagaaaggattttgcgtcgcagaaaggtgacagcagaagcagatagcagtagtccaactgggatattagccacctcagagtccaaatccatgccagtgttgggttctgtatccagtgtaacaaaaacagccttgaacaagaaaactctggaggcagaattcaacagcccgtcccccccaacacctgagccaggtgaagggccccgtaaattggaaggatgcacaagttccaaggttacgtttcagcctcccagtagcattggatgcaggaaaaaatacattgacggtgaaaaacaagccgaaccagttgtagttttagatcctgtttctacacatgaaccccaaaccaaagaccaggttgctgaaaaagatccaactcaacacaaggaggatgaaggcgaaattcaaccagaaaacaaagaagacagcattgaaaacgtgagagagacagacagctccaactgctgatccataaaccagaagcctgacatgtttggaagtccttttcaataagcacatgattagtgttgttatattggcaagggctgtagacattctgctctggtcactgtattcagaatacaggttcttttctggtgtcacttttgtaagtagcaactataaacataagtaagctgtttagcaaaacacacattcctagtaggttttggttttttgatctttataaagatgaggtttttttcctagttactgtattaagtatgacttcttttagaaggttacaaaaaaattcagatgttgatacctttttaggaaatgtgcataccactcatcaaatggaatgctgaaagtttgaggtgcttgtatataatcggataaacaaaactgatcaacccaatgtgattttaaaagcccccaaagaagcttctgttttgggtctgatcctcttgatggagaaactgcagcagcatggaaattgttgggtactgtggcatacaagttattttctacagtagactgagataaactgaaaactcaggagctggcatcaaactcgtagtcccatagtcagtgttaattacacacattgttaactattggatgaaaaatacatgctattgattgtgtccaaagcctcccgaggacctccgtggggatgctctggtagcctgaatacagaactgaggtgaaagtccaaaccttgaattttacagtagtaagttggtaaaccatgtgctctgtgctatgagttaattatgttttcccaaatactaatgtggcacaagtaccatattttatcagagttcttatgtacagtatggtgaagataagtgacaagcacacatttttcttgcttcactgctgttctatattacacaggtttgttgttgttttttttaaaaaagaaattaagcagtagttagtctctaaaaatacaatgtttcaggctaccacagtgaataaatagaaatgtaatcagggattaaaaaaaaaacttatgcagcttttcaaagttgattgtttcaaaattggtgtttatttaaaataagtggtaatgtacttgaatgcactttttatgacaatgattcagtaatggtaattttactattaaagaaagtgaaaggtttagttttgttagcatggctcagcatgtagctgtcaggtgtttttcacctaagggcaaaagaaaatgatagtaataattgcagtagttgtattgtattgtatttttgcacgtgtggtaagcataggcttgaagaggtgggtaggcaggtacatgtacttcctaaatttggagataattatctttctgtaagttcgttatgcttgactgtttccatgttctcccaataatgattttatagttacttatcactttactcatggagaattaaaacgtaatgtttttcaactgtatctttctttaactggataatactgctatatgatatgcttactacagactgcattaattcacgaaacgaattctgttatgctgtaatttgaactctcctcaccacaacttattaaaaaggcaccaatagtttcccatt

SEQ ID NO: 20605 - protein, 219 aa, Homo sapiens; identical to SEQ ID NO: 20599

SEQ ID NO: 20606 - DNA, 2041 bp, Homo sapiens
agcgcgtcctgccgcgccggcagccacaggctggcatagcggctgccgacccgccctcgttcctccaccccctgaacgggactgctgggcccgccccgccccgcctgcaggtgaagcggccgcagccgccgagtaggtgcgtggggatgatctcactcgcgcgctccgcgccaggaggaggaggagcgggagcggatccaacttccgggtagtggagccgcaagccaccggcatcttgctttttcttccccctcctcctgtgtgccccgcgccgctccctctttcccttttattcccggccccacccgccaaaatgaacagctcggacgaagagaagcagctgcagctcattaccagtctgaaggagcaagcaataggcgaatatgaagaccttagagcagagaaccagaaaacaaaggagaagtgtgacaaaattaggcaagaacgagatgaagccgttaaaaaactggaagaatttcagaaaatttctcacatggtcatagaggaagttaatttcatgcagaaccatcttgaaatagagaagacttgtcgagaaagtgctgaagctttggcaacaaagctaaataaagaaaataaaacgttgaaaagaatcagcatgttgtacatggccaagctgggaccagatgtaataactgaagagataaacattgatgatgaagattcgactacagacacagacggtgccgccgagacttgtgtctcagtacagtgtcagaagcaaattaaagaacttcgagatcaaattgtatctgttcaggaggaaaagaagattttagccattgagctggaaaatctcaagagcaaactcgtagaagtaattgaagaagtaaataaagttaaacaagaaaagactgttttaaattcagaagttcttgaacagagaaaagtcttagaaaaatgcaatagagtgtccatgttagctgtagaagagtatgaggagatgcaagtaaacctggagctggagaaggaccttcgaaagaaagcagagtcatttgcacaagagatgttcattgagcaaaacaagctaaagagacaaagccaccttctgctgcagagctccatccctgatcagcagcttttgaaagctttagacgaaaatgcaaaactcacccagcaacttgaagaagagagaattcagcatcaacaaaaggtcaaagaattagaagagcaactagaaaatgaaacactccacaaagaaatacacaacctcaaacagcaactggagcttctagaggaagataaaaaggaattggaattgaaatatcagaattctgaagagaaagccagaaatttaaagcactctgttgatgaactccagaaacgagtgaaccagtctgagaattcagtacctccaccacctcctcctccaccaccacttccccctccacctcccaatcctatccgatccctcatgtccatgatccggaaacgatcccaccccagtggcagtggtgctaagaaagaaaaggcaactcaaccagaaacaactgaagaagtcacagatctaaagaggcaagcagttgaagagatgatggatagaattaaaaagggagttcatcttagacccgttaatcagacagccagaccgaagacaaagccagaatcttcgaaaggctgcgaaagtgcagtggatgaactaaaaggaatactggggacacttaacaaatccactagttcaagaagcttaaaatcccttgaccctgaaaacagtgaaactgagttagaaaggattttgcgtcgcagaaaggtgacagcagaagcagatagcagtagtccaactgggatattagccacctcagagtccaaatccatgccagtgttgggttctgtatccagtgtaacaaaaacagccttgaacaagaaaactctggaggcagaattcaacagcccgtcccccccaacacctgagccaggtgaagggccccgtaaattggaaggatgcacaagttccaaggttacgtttcaataatctgaatcagaaaatactgcaactccttcctccttttgtctgccttttgtt

SEQ ID NO: 20607 - protein, 558 aa, Homo sapiens
MNSSDEEKQLQLITSLKEQAIGEYEDLRAENQKTKEKCDKIRQERDEAVKKLEEFQKISHMVIEEVNFMQNHLEIEKTCRESAEALATKLNKENKTLKRISMLYMAKLGPDVITEEINIDDEDSTTDTDGAAETCVSVQCQKQIKELRDQIVSVQEEKKILAIELENLKSKLVEVIEEVNKVKQEKTVLNSEVLEQRKVLEKCNRVSMLAVEEYEEMQVNLELEKDLRKKAESFAQEMFIEQNKLKRQSHLLLQSSIPDQQLLKALDENAKLTQQLEEERIQHQQKVKELEEQLENETLHKEIHNLKQQLELLEEDKKELELKYQNSEEKARNLKHSVDELQKRVNQSENSVPPPPPPPPPLPPPPPNPIRSLMSMIRKRSHPSGSGAKKEKATQPETTEEVTDLKRQAVEEMMDRIKKGVHLRPVNQTARPKTKPESSKGCESAVDELKGILGTLNKSTSSRSLKSLDPENSETELERILRRRKVTAEADSSSPTGILATSESKSMPVLGSVSSVTKTALNKKTLEAEFNSPSPPTPEPGEGPRKLEGCTSSKVTFQ

SEQ ID NO: 20608 - DNA, 2425 bp, Homo sapiens
tcctgccgcgccggcagccacaggctggcatagcggctgccgacccgccctcgttcctccaccccctgaacgggactgctgggcccgccccgccccgcctgcaggtgaagcggccgcagccgccgagtaggtgcgtggggatgatctcactcgcgcgctccgcgccaggaggaggaggagcgggagcggatccaacttccgggtagtggagccgcaagccaccggcatcttgctttttcttccccctcctcctgtgtgccccgcgccgctccctctttcccttttattcccggccccacccgccaaaatgaacagctcggacgaagagaagcagctgcagctcattaccagtctgaaggagcaagcaataggcgaatatgaagaccttagagcagagaaccagaaaacaaaggagaaggtcatgaaccttatcaatgggaggcggcggtggatgtgattcctttgggcaggatcttttcctgccctgtttggactctcttgcgttgagacaagtggtctgacatggtgctcttcagggaaaccagttgttcagaggctgcatggtgtaagaagctgctataggacatccatgctctctcatctccctgtctcatgctctacacagcagtgtgtctgctccatttcacagaggaaagaacagtaccccagggcttgagtgaggttcccagtgttacacagaccatggcagagtctagattcaaacatgggtcttctgagcacgatgttcttttagaagcaggtgaacagtgggagcttattgactcttcttctgcaaaggtcctaactttattctaattctgtattgttagtgcatgagttttccacagcaaattatcagacccgatccttttctgggtcatttatctttaccagctattggtttgtgttgaaaaactgaaagttgaatataagtatcaaatcaatcttatgtcaaaacattcacatgtgtttgtatatgtatgtgtgtacttgtatatatacatatagattctggcataatgcatcccaaggataaaagcaggaaatttggggcagggggagtggacccatgttttgatggatattttctcttttttttgcagttcttccattttaggaaaactgctgactcttttatgttttttttttttatcagtgactttgagaatggagtcaatttgtttgagtttataaggaaagctcttttgaagggaaacctttttattgaatgccttctgagtactggggtataaagaaaaatatatgaaggtcctactcttgagtaaaaccactctaatgaggacctcaaataagttgacaaataaccacgatcaattatgctgctctgtgagtgcctagagcatggctgggcaatggacaaagaacaaaaagacaaggttcctactcttttccatgtgataactttttactagcctttaatgcttgccttaataaatgtcacttaggtttttcaaagtcttctctaactctctcacaagcagaatttattgcttttttggtaataagacatctgcatatttatgtatgtatgtatcacatttatcaagcaaaatttattgtcaaaatattagagtataagcaaatgatgtgggttgccttcaaatgtaaaaacagcgagtttttttaacatcaagataaatggggattatggaaatggtgctacttgctagtttccattattttttgcccattttctaagtggacttagcagtatgtgaaaaagtaagagcctatcatactgaggtgaacaactcttcaaatttatatttttggggtatagaaaaatagatgactatatattttgcaatcaaccaaataaaatggtttactttgcttgtgtagcaatcaccatattcaaatgttagtcatgcctccacaattgaagggcattctcttatgactcactcaggatctttatcataatcgtttgggtttttttcctatatggggggaaagcgtcattgagctttgaatggaatagctttcatgtttctcagagtggtgggggtgggggtgtgtgtggagtgtgcgtaaaaagaaggaaatctgtataatagaagaatgtctgcctttaaatagtaagtatttatgtttagtattatgttctgagatcaagttttgaaatgcataaatgtttaagtggctgattagaagtcgtttgggtgagctactgtaacagtgcatcaggcggttctgtcagcttgccaggaacaatgaatgaaaagagaatgagacagacactttccaagacttatgtttcaagaagcaggatatatgatactgtttgcatcttggctcagttgtctattgttaaaatttcttcctcttgtgtaatattcagagatgaaggtctcaaagtattttattttttaaaaaaatcaataaagaagccactttaaagagc

SEQ ID NO: 20609 - protein, 49 aa, Homo sapiens
MNSSDEEKQLQLITSLKEQAIGEYEDLRAENQKTKEKVMNLINGRRRWM

SEQ ID NO: 20610 - DNA, 7892 bp, Homo sapiens
gactgctggccgtggatccatttcacaggcctgccttctctcactaacgctcttcctagtccccgggccaactcggacagtttgctcatttattgcaacggtcaaggctggcttgtgccagaacggcgcgcgcgcgcgcacgcacgcacacacacggggggaaacttttttaaaaatgaaaggctagaagagctcagcggcggcgcgggcgctgcgcgagggctccggagctgactcgccgaggcaggaaatccctccggtcgcgacgcccggccccggctcggcgcccgcgtgggatggtgcagcgctcgccgccgggcccgagagctgctgcactgaaggccggcgacgatggcagcgcgcccgctgcccgtgtcccccgcccgcgccctcctgctcgccctggccggtgctctgctcgcgccctgcgaggcccgaggggtgagcttatggaaccaaggaagagctgatgaagttgtcagtgcctctgttgggagtggggacctctggatcccagtgaagagcttcgactccaagaggtctcattgccagcagtttcacggaaacccactatctgcaagacggtactgatgtctccctcgctcgaaattacacgggtcactgttactaccatggacatgtacggggatattctgattcagcagtcagtctcagcacgtgttctggtctcaggggacttattgtgtttgaaaatgaaagctatgtcttagaaccaatgaaaagtgcaaccaacagatacaaactcttcccagcgaagaagctgaaaagcgtccggggatcatgtggatcacatcacaacacaccaaacctcgctgcaaagaatgtgtttccaccaccctctcagacatgggcaagaaggcataaaagagagaccctcaaggcaactaagtatgtggagctggtgatcgtggcagacaaccgagagtttcagaggcaaggaaaagatctggaaaaagttaagcagcgattaatagagattgctaatcacgttgacaagttttacagaccactgaacattcggatcgtgttggtaggcgtggaagtgtggaatgacatggacaaatgctctgtaagtcaggacccattcaccagcctccatgaatttctggactggaggaagatgaagcttctacctcgcaaatcccatgacaatgcgcagcttgtcagtggggtttatttccaagggaccaccatcggcatggccccaatcatgagcatgtgcacggcagaccagtctgggggaattgtcatggaccattcagacaatccccttggtgcagccgtgaccctggcacatgagctgggccacaatttcgggatgaatcatgacacactggacaggggctgtagctgtcaaatggcggttgagaaaggaggctgcatcatgaacgcttccaccgggtacccatttcccatggtgttcagcagttgcagcaggaaggacttggagaccagcctggagaaaggaatgggggtgtgcctgtttaacctgccggaagtcagggagtctttcgggggccagaagtgtgggaacagatttgtggaagaaggagaggagtgtgactgtggggagccagaggaatgtatgaatcgctgctgcaatgccaccacctgtaccctgaagccggacgctgtgtgcgcacatgggctgtgctgtgaagactgccagctgaagcctgcaggaacagcgtgcagggactccagcaactcctgtgacctcccagagttctgcacaggggccagccctcactgcccagccaacgtgtacctgcacgatgggcactcatgtcaggatgtggacggctactgctacaatggcatctgccagactcacgagcagcagtgtgtcacgctctggggaccaggtgctaaacctgcccctgggatctgctttgagagagtcaattctgcaggtgatccttatggcaactgtggcaaagtctcgaagagttcctttgccaaatgcgagatgagagatgctaaatgtggaaaaatccagtgtcaaggaggtgccagccggccagtcattggtaccaatgccgtttccatagaaacaaacatccccctgcagcaaggaggccggattctgtgccgggggacccacgtgtacttgggcgatgacatgccggacccagggcttgtgcttgcaggcacaaagtgtgcagatggaaaaatctgcctgaatcgtcaatgtcaaaatattagtgtctttggggttcacgagtgtgcaatgcagtgccacggcagaggggtgtgcaacaacaggaagaactgccactgcgaggcccactgggcacctcccttctgtgacaagtttggctttggaggaagcacagacagcggccccatccggcaagcagataaccaaggtttaaccataggaattctggtgaccatcctgtgtcttcttgctgccggatttgtggtttatctcaaaaggaagaccttgatacgactgctgtttacaaataagaagaccaccattgaaaaactaaggtgtgtgcgcccttcccggccaccccgtggcttccaaccctgtcaggctcacctcggccaccttggaaaaggcctgatgaggaagccgccagattcctacccaccgaaggacaatcccaggagattgctgcagtgtcagaatgttgacatcagcagacccctcaacggcctgaatgtccctcagccccagtcaactcagcgagtgcttcctcccctccaccgggctccacgtgcacctagcgtccctgccagacccctgccagccaagcctgcacttaggcaggcccaggggacctgtaagccaaacccccctcagaagcctctgcctgcagatcctctggccagaacaactcggctcactcatgccttggccaggaccccaggacaatgggagactgggctccgcctggcacccctcagacctgctccacaatatccacaccaagtgcccagatccacccacaccgcctatattaagtgagaagccgacaccttttttcaacagtgaagacagaagtttgcactatctttcagctccagttggagttttttgtaccaacttttaggattttttttaatgtttaaaacatcattactataagaactttgagctactgccgtcagtgctgtgctgtgctatggtgctctgtctacttgctcaggtacttgtaaattattaatttatgcagaatgttgattacagtgcagtgcgctgtagtaggcatttttaccatcactgagttttccatggcaggaaggcttgttgtgcttttagtattttagtgaacttgaaatatcctgcttgatgggattctggacaggatgtgtttgctttctgatcaaggccttattggaaagcagtcccccaactacccccagctgtgcttatggtaccagatgcagctcaagagatcccaagtagaatctcagttgattttctggattccccatctcaggccagagccaaggggcttcaggtccaggctgtgtttggctttcagggaggccctgtgccccttgacaactggcaggcaggctcccagggacacctgggagaaatctggcttctggccaggaagctttggtgagaacctgggttgcagacaggaatcttaaggtgtagccacaccaggatagagactggaacactagacaagccagaacttgaccctgagctgaccagccgtgagcatgtttggaaggggtctgtagtgtcactcaaggcggtgcttgatagaaatgccaagcacttctttttctcgctgtcctttctagagcactgccaccagtaggttatttagcttgggaaaggtggtgtttctgtaagaaacctactgcccaggcactgcaaaccgccacctccctatactgcttggagctgagcaaatcaccacaaactgtaatacaatgatcctgtattcagacagatgaggctttccatgggaccacaactattttcagatgtgaaccattaaccagatctagtcaatcaagtctgtttactgcaaggttcaacttattaacaattaggcagactctttatgcttgcaaaaactacaaccaatggaatgtgatgttcatgggtatagttcatgtctgctatcattattcgtagatattggacaaagaaccttctctatggggcatcctctttttccaacttggctgcaggaatctttaaaagatgcttttaacagagtctgaacctatttcttaaacacttgcaacctacctgttgagcatcacagaatgtgataaggaaatcaacttgcttatcaacttcctaaatattatgagatgctggcttgggcagcatccccttgaactcttcactcttcaaatgcctgactagggagccatgtttcacaaggtctttaaagtgactaatggcatgagaaatacaaaaatactcagataaggtaaaatgccatgatgcctctgtcttctggactggttttcacattagaagacaattgacaacagttacataattcactctgagtgttttatgagaaagccttcttttgggggtcaacagttttcctatgctttgaaacagaaaaatatgtaccaagaatcttggtttgccttccagaaaacaaaactgcatttcactttcccggtgttccccactgtatctaggcaacatagtattcatgactatggataaactaaacacgtgacacaaacacacacaaaagggaacccagctctaatacattccaactcgtatagcatgcatctgtttattctatagttattaagttctttaaaatgtaaagccatgctggaaaataatactgctgagatacatacagaattactgtaactgattacacttggtaattgtactaaagccaaacatatatatactattaaaaaggtttacagaattttatggtgcattacgtgggcattgtctttttagatgcccaaatccttagatctggcatgttagcccttcctccaattataagaggatatgaactgagtttttcttttgttgtttgttcttagctgtaattcctatgcttctatttcagagagccaggagagtttgatattaaaggaggttaaaactgtgatcttatgccatgtcatcaatggccacttaggggccatggctgatgacacattcttatctctacagtactaatgtgttattatagagccatgcattttatttctgaataagaacatatttaaactaatattcccttacaatatggacagtattaatccttccaagatgcagtatttatcaagtgaagcatatttagcagcaaattccattttaacataacttaggaaccaataaccagggtgttttgtggttgggggaggcacggggtggagtattcttttttatatcctcaaaacaaaaaaaatcaatacttatatttcaatggcaatctagtatttttttaaaagactgtataggcatgaataatagaggtggtttgagttttgtagggccatcacctggaaagtcaatgtgactagacacaaagtagcccagaggctacttttcttcctacagcttattatagttgtaggttctatgacctcacttcatgggttccaggcaattccgctgaaaggtttgtctcctgaaattttttaagtttgttttcctgacacatgtaatcagatgtgtagcaaccgagggaaacgaagcctaacattctccattgtggaaatacacacaggaggttacatttcacagcgtggatttttccagcttacacatgtgggatgacatcacagaaaccacaaaagcagcaaattaaactgtaggagagtcaatactcctgacgagtctcggggggggggcatttttatgccttcttaactttatgagaattctcaggctgaactataggccattgttcccaggcaaatcaatacatcaatgcatcctcaaaaaaaaaaaaaaaaaaaaaaaaccggctaaaactgtgtcaaaatgttcttaaggagcctatggtctccacggtgctaaaaagagcctggtgctgggccgactggcagggctgagcatcctcctgccccctcgccactgatgtttactaagcactctgagccaatgagacccccagcagcagaaagggcacaaggtggcgccagggcagcagggccagatctttctcatgcacctcgacctcttgcagactttcttcgtgagatgtactactcatttcaaaactgctttgcagggctcccctatgtattcggggggcccacggcacactcaggctggagatccttcctcactgcgctcaagatggcctcagccagacaccagttacccagctgaaagtcacaatccctcccagaagtctcccaacactagtgctgaccagaggtggggctctcaggctaggagtttcacacacaatgacaggctgctgggggacattgcaggaccccttttcctctcctctccatgctagaagccagccctaggcagctgcagttactccctgtgactcagcagcaggctgattcaacacagctgcccacacaaagccagtggctaatacatctgtttacctttccctatcacccagacacaagcccctttcccaggtcaaaccacaggccgatgcatctccagtttgacagtcaaatcactacttccattgctactttagatcagccaaagtggtgactgctgcagtgtgtggctatccctacaaggcccacccaagggatgcccaaagcccaaccttctccagggctgcagcccagagcaaccccaccagcctaagtccagcagaggacctcccacccaatgtcttgttctaattagaaggggaagttagccacagaaaatcaacttatctataattacaaaattctcttgactcaccttaaagttcctattgacatctactgcttttaaacctatttgaaaactctgatactaaaacaaatgacactctaagaaagtttgggagccccatgctgagaaccatttctgtgcagtgaggatgtttccagaagctacttacctacatgtgaatgtgccattttctttccttttgtagagaaaatcccctttactttttggaacagtaatggcagcttctagtacagccattacagtttcatatgagaaaaattaagaataactataaaattgttaaaatatccaataatggataatgatggccagaagatttaacatacaaagtaattctcaatgtaaagctattcagctcttccaggttgaatgccctgtaacccaccctgaccttccacatcatcttcaaaaagcagtttctctgttccccatgattctcctataaggtaactctttagtcctccatttagcacattttaaatcctccaaagaataagtatcatgtgattattttagctttacaaaaaaaaagttgaatggcgttttattttcatggcctataagcaggtaccttagtagggcagatataggaaaaacaaattagagcaaaacaaatcctctacaaatccaaggcaggaaaagtggtggcagagtgactcattctcctgtccctcccatcaggtcaaatcaggaggctgcagtgaatgcctgttctttgaatgtgtagcagttgttcctgtaactctttaaaacttggctataggctgtttagcacagtacagattaaagatacagttacgtaaacagcaaagtaattttatagtgcttcatccatttatcatgctttggtttgctaattttttcacatacctttttctatcacagtctgttgcttttgtacacatttctcatattggggttcgacaggtaaacacaaactgctatttcagtagaaaaagttattgttatgaatattaaacccaataaattgtataaaggtaaatatcaa

SEQ ID NO: 20611 - protein, 753 aa, Homo sapiens
MKSATNRYKLFPAKKLKSVRGSCGSHHNTPNLAAKNVFPPPSQTWARRHKRETLKATKYVELVIVADNREFQRQGKDLEKVKQRLIEIANHVDKFYRPLNIRIVLVGVEVWNDMDKCSVSQDPFTSLHEFLDWRKMKLLPRKSHDNAQLVSGVYFQGTTIGMAPIMSMCTADQSGGIVMDHSDNPLGAAVTLAHELGHNFGMNHDTLDRGCSCQMAVEKGGCIMNASTGYPFPMVFSSCSRKDLETSLEKGMGVCLFNLPEVRESFGGQKCGNRFVEEGEECDCGEPEECMNRCCNATTCTLKPDAVCAHGLCCEDCQLKPAGTACRDSSNSCDLPEFCTGASPHCPANVYLHDGHSCQDVDGYCYNGICQTHEQQCVTLWGPGAKPAPGICFERVNSAGDPYGNCGKVSKSSFAKCEMRDAKCGKIQCQGGASRPVIGTNAVSIETNIPLQQGGRILCRGTHVYLGDDMPDPGLVLAGTKCADGKICLNRQCQNISVFGVHECAMQCHGRGVCNNRKNCHCEAHWAPPFCDKFGFGGSTDSGPIRQADNQGLTIGILVTILCLLAAGFVVYLKRKTLIRLLFTNKKTTIEKLRCVRPSRPPRGFQPCQAHLGHLGKGLMRKPPDSYPPKDNPRRLLQCQNVDISRPLNGLNVPQPQSTQRVLPPLHRAPRAPSVPARPLPAKPALRQAQGTCKPNPPQKPLPADPLARTTRLTHALARTPGQWETGLRLAPLRPAPQYPHQVPRSTHTAYIK

SEQ ID NO: 20612 - DNA, 6438 bp, Homo sapiens
atttcacaggcctgccttctctcactaacgctcttcctagtccccgggccaactcggacagtttgctcatttattgcaacggtcaaggctggcttgtgccagaacggcgcgcgcgcgcgcacgcacgcacacacacggggggaaacttttttaaaaatgaaaggctagaagagctcagcggcggcgcgggcgctgcgcgagggctccggagctgactcgccgaggcaggaaatccctccggtcgcgacgcccggccccggctcggcgcccgcgtgggatggtgcagcgctcgccgccgggcccgagagctgctgcactgaaggccggcgacgatggcagcgcgcccgcaggggtgagcttatggaaccaaggaagagctgatgaagttgtcagtgcctctgttgggagtggggacctctggatcccagtgaagagcttcgactccaagaggtctcattgccagcagtttcacggaaacccactatctgcaagacggtactgatgtctccctcgctcgaaattacacgggtcactgttactaccatggacatgtacggggatattctgattcagcagtcagtctcagcacgtgttctggtctcaggggacttattgtgtttgaaaatgaaagctatgtcttagaaccaatgaaaagtgcaaccaacagatacaaactcttcccagcgaagaagctgaaaagcgtccggggatcatgtggatcacatcacaacacaccaaacctcgctgcaaagaatgtgtttccaccaccctctcagacatgggcaagaaggcataaaagagagaccctcaaggcaactaagtatgtggagctggtgatcgtggcagacaaccgagagtttcagaggcaaggaaaagatctggaaaaagttaagcagcgattaatagagattgctaatcacgttgacaagttttacagaccactgaacattcggatcgtgttggtaggcgtggaagtgtggaatgacatggacaaatgctctgtaagtcaggacccattcaccagcctccatgaatttctggactggaggaagatgaagcttctacctcgcaaatcccatgacaatgcgcagcttgtcagtggggtttatttccaagggaccaccatcggcatggccccaatcatgagcatgtgcacggcagaccagtctgggggaattgtcatggaccattcagacaatccccttggtgcagccgtgaccctggcacatgagctgggccacaatttcgggatgaatcatgacacactggacaggggctgtagctgtcaaatggcggttgagaaaggaggctgcatcatgaacgcttccaccgggtacccatttcccatggtgttcagcagttgcagcaggaaggacttggagaccagcctggagaaaggaatgggggtgtgcctgtttaacctgccggaagtcagggagtctttcgggggccagaagtgtgggaacagatttgtggaagaaggagaggagtgtgactgtggggagccagaggaatgtatgaatcgctgctgcaatgccaccacctgtaccctgaagccggacgctgtgtgcgcacatgggctgtgctgtgaagactgccagctgaagcctgcaggaacagcgtgcagggactccagcaactcctgtgacctcccagagttctgcacaggggccagccctcactgcccagccaacgtgtacctgcacgatgggcactcatgtcaggatgtggacggctactgctacaatggcatctgccagactcacgagcagcagtgtgtcacgctctggggaccaggtgctaaacctgcccctgggatctgctttgagagagtcaattctgcaggtgatccttatggcaactgtggcaaagtctcgaagagttcctttgccaaatgcgagatgagagatgctaaatgtggaaaaatccagtgtcaaggaggtgccagccggccagtcattggtaccaatgccgtttccatagaaacaaacatccccctgcagcaaggaggccggattctgtgccgggggacccacgtgtacttgggcgatgacatgccggacccagggcttgtgcttgcaggcacaaagtgtgcagatggaaaaatctgcctgaatcgtcaatgtcaaaatattagtgtctttggggttcacgagtgtgcaatgcagtgccacggcagaggggtgtgcaacaacaggaagaactgccactgcgaggcccactgggcacctcccttctgtgacaagtttggctttggaggaagcacagacagcggccccatccggcaagcagaagcaaggcaggaagctgcagagtccaacagggagcgcggccagggccaggagcccgtgggatcgcaggagcatgcgtctactgcctcactgacactcatctgagccctcccatgacatggagaccgtgaccagtgctgctgcagaggaggtcacgcgtccccaaggcctcctgtgactggcagcattgactctgtggctttgccatcgtttccatgacaacagacacaacacagttctcggggctcaggaggggaagtccagcctaccaggcacgtctgcagaaacagtgcaaggaagggcagcgacttcctggttgagcttctgctaaaacatggacatgcttcagtgctgctcctgagagagtagcaggttaccactctggcaggccccagccctgcagcaaggaggaagaggactcaaaagtctggcctttcactgagcctccacagcagtgggggagaagcaagggttgggcccagtgtcccctttccccagtgacacctcagccttggcagccctgatgactggtctctggctgcaacttaatgctctgatatggcttttagcatttattatatgaaaatagcagggttttagtttttaatttatcagagaccctgccacccattccatctccatccaagcaaactgaatggcaatgaaacaaactggagaagaaggtaggagaaagggcggtgaactctggctctttgctgtggacatgcgtgaccagcagtactcaggtttgagggtttgcagaaagccagggaacccacagagtcaccaacccttcatttaacaagtaagaatgttaaaaagtgaaaacaatgtaagagcctaactccatcccccgtggccattactgcataaaatagagtgcatttgaaataccgctgcctccaccctgttcatacatatataaaatcaaggcaggccatgagcaagcatggctcactgctccctggcctggccatggctcaggggctcattaaacaagtacttgtgtgtctgccacacaccagccactctcctgggtcctggagagacattaagcaagaatgacatggcataagtgaggggtacgactgcagggagagagggcatcatgggaggggagcaacccccacagagcggcagggggttgtcaggaaggctcctggggaccctgcatctgttgaggtctgaagggggcgagggaaacatgcattctgaagccgagatagctggctgtgcgaagatctagaggagtgtggactggcctgggctcagattctagagtgcggactgggccaacaggaggggacacaggacacggtgctcgtgctggtcctggggaagagggaaatggagtcagtcactgcccgggcctctggcttgagcaaccctggggagttcagcaggttcagtgtgggggccctgtaaatgttcagtttcatagattgatgtattgaagatttatggattcactttatggaactagaaattatagttcaagatttttgctgttcactttttaaattaactttaattaactttgttatgagacaccagaactctagctagagccccctgtgatcactactaagggtctgaaaagagtgacattttgcccaggaaaccagaagcaatgcttttccagtaacaccaacaagtaagtcaagactgtcatctgttggctgtcttgcttaggctaagacacatccctgataggccttgttagtgggggatggggtccagaaaccaagaaggtgtgaaagacattctttccctggagtaggagctgctgctgcagtgatccacagccagctgagggtccaggtgggaggcagggccgaggagagcccaggtaactgcatcacggcgatcaccagcagccggaaaggactgttgcacacttacctgatgtgaagtacaccctgatccttgctgatgggaagacaaatgaatcaagatccctgtcctctaaaaattcactgtccagttgaaatcacaggtagacctcctctaagtctgagcatttagagtccttcccagacagccgctgaccatagctactgtaagaaaccaacctgatggtttgatttttttccttcctttccctacccttgaggaggctcttaactgtattaaacaaaatggcagcaggtcatagaaaagaagatgttttcatagagaaaatagcttcctcccaggaaaagggtttcccccacaaaggctgtgtttttaagtccccaacataacaaagcaaaacccatgggtgtttcatttaaatgagttttctttctcttttttcactatctactttgagatgtccagcaagaaagcaattcattttttaaaaacacgaaaagagataaagcagaacccaactacagaatgagtaaagaaaagcactttggaatggcaaatctgtgctggggactggaaacatttgagcctggggatggctgtgattccagtgaggcttcagtgatggctccctgctaccttctgtggctaccatggtccactgtgccgttgtcacgcctcagggaacctgcgtggtccagaccatcaccccacctacccgactatatattcctgtttagcaagttctagagttgtcagaaatgaatgatggtaacatagattgaacctcaaacatggcatctgaagtaagacagtttattagtacatcactcacgggtgtactctcttcatttctgttgcttcagagttcactttgccataaacgtcacaacttgatacctcccatatttcattgtaactgcctccttctgtgagccccatgtgttttgtttcagataaccaaggtttaaccataggaattctggtgaccatcctgtgtcttcttgctgccggatttgtggtttatctcaaaaggaagaccttgatacgactgctgtttacaaataagaagaccaccattgaaaaactaaggtaccctgggtttagcttgtcatctgttctagaaatggtggctcagaggctgggtgcggtggctcaagcctgtaatcccagcactttgggaggctgaggcgggcggatcacgaggtcaggagatcgagaccacggtgaaaccccgtctctactaaaaatacaaaatatcagccgggcgcggtggtgggtgcctgtagtcccatctactcgggaggctgaggcatgagaatggcgtgaacccgggaggcggagcttgcagtgagttgcgatcactccactgcactccagcctgggcgagagagcaagactccatctcaaaaaaaaaaaaaaaaaaaaaaaaagaaatggtgtctcagaaaatgtacagcaaactgcttctcacttcatttttttagcaaaggtcagattttctggatcataaacctgggacttggttcttttttggggggtttcttgttttaaatttctgccagatcagctgcctcctttacttcccttcaaacaacaatgtgctgcttattacataagctagcagggtgtcaggaaattccactgatgtgttttctcccacccttatattagtaatttttatacaacatggagacattgaaatattttcatcagatggggtagcttttgatccaaatatattcaaagacattatcgctgaaatgccagcttcatacaaatcatcttccaggtgtcactacactgcatttctatggagcgtgagaactaatttgacaaaatagaggttttgagggaaaaaccagtatttattttttaatctcctaagagtgttattaggtaatttttcctttgcatgtttagcacactgagttaagtaaactgtcttttgagtgccactatgagcaaagtgtaaaaagtcaagtcagtgagaaggggaaacacgcttggtcagcaggtatgggattctgttgcaggtgtgtgcgcccttcccggccaccccgtggcttccaaccctgtcaggctcacctcggccaccttggaaaaggcctgatgaggaagccgccagattcctacccaccgaaggtgagtcttgagtagatgtgagtgctcagggcacacatgcagacatgaggttttcaatacgagactgaataagaatgggatcctagaggcgctgcctgtgaaatgctgagtcagcctcactaggtcagcaggctctgagggagggtctctg

SEQ ID NO: 20613 - protein, 582 aa, Homo sapiens
MKSATNRYKLFPAKKLKSVRGSCGSHHNTPNLAAKNVFPPPSQTWARRHKRETLKATKYVELVIVADNREFQRQGKDLEKVKQRLIEIANHVDKFYRPLNIRIVLVGVEVWNDMDKCSVSQDPFTSLHEFLDWRKMKLLPRKSHDNAQLVSGVYFQGTTIGMAPIMSMCTADQSGGIVMDHSDNPLGAAVTLAHELGHNFGMNHDTLDRGCSCQMAVEKGGCIMNASTGYPFPMVFSSCSRKDLETSLEKGMGVCLFNLPEVRESFGGQKCGNRFVEEGEECDCGEPEECMNRCCNATTCTLKPDAVCAHGLCCEDCQLKPAGTACRDSSNSCDLPEFCTGASPHCPANVYLHDGHSCQDVDGYCYNGICQTHEQQCVTLWGPGAKPAPGICFERVNSAGDPYGNCGKVSKSSFAKCEMRDAKCGKIQCQGGASRPVIGTNAVSIETNIPLQQGGRILCRGTHVYLGDDMPDPGLVLAGTKCADGKICLNRQCQNISVFGVHECAMQCHGRGVCNNRKNCHCEAHWAPPFCDKFGFGGSTDSGPIRQAEARQEAAESNRERGQGQEPVGSQEHASTASLTLI

SEQ ID NO: 20614 - DNA, 6527 bp, Homo sapiens
gactgctggccgtggatccatttcacaggcctgccttctctcactaacgctcttcctagtccccgggccaactcggacagtttgctcatttattgcaacggtcaaggctggcttgtgccagaacggcgcgcgcgcgcgcacgcacgcacacacacggggggaaacttttttaaaaatgaaaggctagaagagctcagcggcggcgcgggcgctgcgcgagggctccggagctgactcgccgaggcaggaaatccctccggtcgcgacgcccggccccggctcggcgcccgcgtgggatggtgcagcgctcgccgccgggcccgagagctgctgcactgaaggccggcgacgatggcagcgcgcccgctgcccgtgtcccccgcccgcgccctcctgctcgccctggccggtgctctgctcgcgccctgcgaggcccgaggggtgagcttatggaaccaaggaagagctgatgaagttgtcagtgcctctgttgggagtggggacctctggatcccagtgaagagcttcgactccaagaggtctcattgccagcagtttcacggaaacccactatctgcaagacggtactgatgtctccctcgctcgaaattacacgggtcactgttactaccatggacatgtacggggatattctgattcagcagtcagtctcagcacgtgttctggtctcaggggacttattgtgtttgaaaatgaaagctatgtcttagaaccaatgaaaagtgcaaccaacagatacaaactcttcccagcgaagaagctgaaaagcgtccggggatcatgtggatcacatcacaacacaccaaacctcgctgcaaagaatgtgtttccaccaccctctcagacatgggcaagaaggcataaaagagagaccctcaaggcaactaagtatgtggagctggtgatcgtggcagacaaccgagagtttcagaggcaaggaaaagatctggaaaaagttaagcagcgattaatagagattgctaatcacgttgacaagttttacagaccactgaacattcggatcgtgttggtaggcgtggaagtgtggaatgacatggacaaatgctctgtaagtcaggacccattcaccagcctccatgaatttctggactggaggaagatgaagcttctacctcgcaaatcccatgacaatgcgcagcttgtcagtggggtttatttccaagggaccaccatcggcatggccccaatcatgagcatgtgcacggcagaccagtctgggggaattgtcatggaccattcagacaatccccttggtgcagccgtgaccctggcacatgagctgggccacaatttcgggatgaatcatgacacactggacaggggctgtagctgtcaaatggcggttgagaaaggaggctgcatcatgaacgcttccaccgggtacccatttcccatggtgttcagcagttgcagcaggaaggacttggagaccagcctggagaaaggaatgggggtgtgcctgtttaacctgccggaagtcagggagtctttcgggggccagaagtgtgggaacagatttgtggaagaaggagaggagtgtgactgtggggagccagaggaatgtatgaatcgctgctgcaatgccaccacctgtaccctgaagccggacgctgtgtgcgcacatgggctgtgctgtgaagactgccagctgaagcctgcaggaacagcgtgcagggactccagcaactcctgtgacctcccagagttctgcacaggggccagccctcactgcccagccaacgtgtacctgcacgatgggcactcatgtcaggatgtggacggctactgctacaatggcatctgccagactcacgagcagcagtgtgtcacgctctggggaccaggtgctaaacctgcccctgggatctgctttgagagagtcaattctgcaggtgatccttatggcaactgtggcaaagtctcgaagagttcctttgccaaatgcgagatgagagatgctaaatgtggaaaaatccagtgtcaaggaggtgccagccggccagtcattggtaccaatgccgtttccatagaaacaaacatccccctgcagcaaggaggccggattctgtgccgggggacccacgtgtacttgggcgatgacatgccggacccagggcttgtgcttgcaggcacaaagtgtgcagatggaaaaatctgcctgaatcgtcaatgtcaaaatattagtgtctttggggttcacgagtgtgcaatgcagtgccacggcagaggggtgtgcaacaacaggaagaactgccactgcgaggcccactgggcacctcccttctgtgacaagtttggctttggaggaagcacagacagcggccccatccggcaagcagaagcaaggcaggaagctgcagagtccaacagggagcgcggccagggccaggagcccgtgggatcgcaggagcatgcgtctactgcctcactgacactcatctgagccctcccatgacatggagaccgtgaccagtgctgctgcagaggaggtcacgcgtccccaaggcctcctgtgactggcagcattgactctgtggctttgccatcgtttccatgacaacagacacaacacagttctcggggctcaggaggggaagtccagcctaccaggcacgtctgcagaaacagtgcaaggaagggcagcgacttcctggttgagcttctgctaaaacatggacatgcttcagtgctgctcctgagagagtagcaggttaccactctggcaggccccagccctgcagcaaggaggaagaggactcaaaagtctggcctttcactgagcctccacagcagtgggggagaagcaagggttgggcccagtgtcccctttccccagtgacacctcagccttggcagccctgatgactggtctctggctgcaacttaatgctctgatatggcttttagcatttattatatgaaaatagcagggttttagtttttaatttatcagagaccctgccacccattccatctccatccaagcaaactgaatggcaatgaaacaaactggagaagaaggtaggagaaagggcggtgaactctggctctttgctgtggacatgcgtgaccagcagtactcaggtttgagggtttgcagaaagccagggaacccacagagtcaccaacccttcatttaacaagtaagaatgttaaaaagtgaaaacaatgtaagagcctaactccatcccccgtggccattactgcataaaatagagtgcatttgaaataccgctgcctccaccctgttcatacatatataaaatcaaggcaggccatgagcaagcatggctcactgctccctggcctggccatggctcaggggctcattaaacaagtacttgtgtgtctgccacacaccagccactctcctgggtcctggagagacattaagcaagaatgacatggcataagtgaggggtacgactgcagggagagagggcatcatgggaggggagcaacccccacagagcggcagggggttgtcaggaaggctcctggggaccctgcatctgttgaggtctgaagggggcgagggaaacatgcattctgaagccgagatagctggctgtgcgaagatctagaggagtgtggactggcctgggctcagattctagagtgcggactgggccaacaggaggggacacaggacacggtgctcgtgctggtcctggggaagagggaaatggagtcagtcactgcccgggcctctggcttgagcaaccctggggagttcagcaggttcagtgtgggggccctgtaaatgttcagtttcatagattgatgtattgaagatttatggattcactttatggaactagaaattatagttcaagatttttgctgttcactttttaaattaactttaattaactttgttatgagacaccagaactctagctagagccccctgtgatcactactaagggtctgaaaagagtgacattttgcccaggaaaccagaagcaatgcttttccagtaacaccaacaagtaagtcaagactgtcatctgttggctgtcttgcttaggctaagacacatccctgataggccttgttagtgggggatggggtccagaaaccaagaaggtgtgaaagacattctttccctggagtaggagctgctgctgcagtgatccacagccagctgagggtccaggtgggaggcagggccgaggagagcccaggtaactgcatcacggcgatcaccagcagccggaaaggactgttgcacacttacctgatgtgaagtacaccctgatccttgctgatgggaagacaaatgaatcaagatccctgtcctctaaaaattcactgtccagttgaaatcacaggtagacctcctctaagtctgagcatttagagtccttcccagacagccgctgaccatagctactgtaagaaaccaacctgatggtttgatttttttccttcctttccctacccttgaggaggctcttaactgtattaaacaaaatggcagcaggtcatagaaaagaagatgttttcatagagaaaatagcttcctcccaggaaaagggtttcccccacaaaggctgtgtttttaagtccccaacataacaaagcaaaacccatgggtgtttcatttaaatgagttttctttctcttttttcactatctactttgagatgtccagcaagaaagcaattcattttttaaaaacacgaaaagagataaagcagaacccaactacagaatgagtaaagaaaagcactttggaatggcaaatctgtgctggggactggaaacatttgagcctggggatggctgtgattccagtgaggcttcagtgatggctccctgctaccttctgtggctaccatggtccactgtgccgttgtcacgcctcagggaacctgcgtggtccagaccatcaccccacctacccgactatatattcctgtttagcaagttctagagttgtcagaaatgaatgatggtaacatagattgaacctcaaacatggcatctgaagtaagacagtttattagtacatcactcacgggtgtactctcttcatttctgttgcttcagagttcactttgccataaacgtcacaacttgatacctcccatatttcattgtaactgcctccttctgtgagccccatgtgttttgtttcagataaccaaggtttaaccataggaattctggtgaccatcctgtgtcttcttgctgccggatttgtggtttatctcaaaaggaagaccttgatacgactgctgtttacaaataagaagaccaccattgaaaaactaaggtaccctgggtttagcttgtcatctgttctagaaatggtggctcagaggctgggtgcggtggctcaagcctgtaatcccagcactttgggaggctgaggcgggcggatcacgaggtcaggagatcgagaccacggtgaaaccccgtctctactaaaaatacaaaatatcagccgggcgcggtggtgggtgcctgtagtcccatctactcgggaggctgaggcatgagaatggcgtgaacccgggaggcggagcttgcagtgagttgcgatcactccactgcactccagcctgggcgagagagcaagactccatctcaaaaaaaaaaaaaaaaaaaaaaaaagaaatggtgtctcagaaaatgtacagcaaactgcttctcacttcatttttttagcaaaggtcagattttctggatcataaacctgggacttggttcttttttggggggtttcttgttttaaatttctgccagatcagctgcctcctttacttcccttcaaacaacaatgtgctgcttattacataagctagcagggtgtcaggaaattccactgatgtgttttctcccacccttatattagtaatttttatacaacatggagacattgaaatattttcatcagatggggtagcttttgatccaaatatattcaaagacattatcgctgaaatgccagcttcatacaaatcatcttccaggtgtcactacactgcatttctatggagcgtgagaactaatttgacaaaatagaggttttgagggaaaaaccagtatttattttttaatctcctaagagtgttattaggtaatttttcctttgcatgtttagcacactgagttaagtaaactgtcttttgagtgccactatgagcaaagtgtaaaaagtcaagtcagtgagaaggggaaacacgcttggtcagcaggtatgggattctgttgcaggtgtgtgcgcccttcccggccaccccgtggcttccaaccctgtcaggctcacctcggccaccttggaaaaggcctgatgaggaagccgccagattcctacccaccgaaggtgagtcttgagtagatgtgagtgctcagggcacacatgcagacatgaggttttcaatacgagactgaataagaatgggatcctagaggcgctgcctgtgaaatgctgagtcagcctcactaggtcagcaggctctgagggagggtctctg

SEQ ID NO: 20615 - protein, 582 aa, Homo sapiens; identical to SEQ ID NO: 20613

SEQ ID NO: 20616 - DNA, 3185 bp, Homo sapiens
atttcacaggcctgccttctctcactaacgctcttcctagtccccgggccaactcggacagtttgctcatttattgcaacggtcaaggctggcttgtgccagaacggcgcgcgcgcgcgcacgcacgcacacacacggggggaaacttttttaaaaatgaaaggctagaagagctcagcggcggcgcgggcgctgcgcgagggctccggagctgactcgccgaggcaggaaatccctccggtcgcgacgcccggccccggctcggcgcccgcgtgggatggtgcagcgctcgccgccgggcccgagagctgctgcactgaaggccggcgacgatggcagcgcgcccgcaggggtgagcttatggaaccaaggaagagctgatgaagttgtcagtgcctctgttgggagtggggacctctggatcccagtgaagagcttcgactccaagaggtctcattgccagcagtttcacggaaacccactatctgcaagacggtactgatgtctccctcgctcgaaattacacgggtcactgttactaccatggacatgtacggggatattctgattcagcagtcagtctcagcacgtgttctggtctcaggggacttattgtgtttgaaaatgaaagctatgtcttagaaccaatgaaaagtgcaaccaacagatacaaactcttcccagcgaagaagctgaaaagcgtccggggatcatgtggatcacatcacaacacaccaaacctcgctgcaaagaatgtgtttccaccaccctctcagacatgggcaagaaggcataaaagagagaccctcaaggcaactaagtatgtggagctggtgatcgtggcagacaaccgagagtttcagaggcaaggaaaagatctggaaaaagttaagcagcgattaatagagattgctaatcacgttgacaagttttacagaccactgaacattcggatcgtgttggtaggcgtggaagtgtggaatgacatggacaaatgctctgtaagtcaggacccattcaccagcctccatgaatttctggactggaggaagatgaagcttctacctcgcaaatcccatgacaatgcgcagcttgtcagtggggtttatttccaagggaccaccatcggcatggccccaatcatgagcatgtgcacggcagaccagtctgggggaattgtcatggaccattcagacaatccccttggtgcagccgtgaccctggcacatgagctgggccacaatttcgggatgaatcatgacacactggacaggggctgtagctgtcaaatggcggttgagaaaggaggctgcatcatgaacgcttccaccgggtacccatttcccatggtgttcagcagttgcagcaggaaggacttggagaccagcctggagaaaggaatgggggtgtgcctgtttaacctgccggaagtcagggagtctttcgggggccagaagtgtgggaacagatttgtggaagaaggagaggagtgtgactgtggggagccagaggaatgtatgaatcgctgctgcaatgccaccacctgtaccctgaagccggacgctgtgtgcgcacatgggctgtgctgtgaagactgccagctgaagcctgcaggaacagcgtgcagggactccagcaactcctgtgacctcccagagttctgcacaggggccagccctcactgcccagccaacgtgtacctgcacgatgggcactcatgtcaggatgtggacggctactgctacaatggcatctgccagactcacgagcagcagtgtgtcacgctctggggaccaggtgctaaacctgcccctgggatctgctttgagagagtcaattctgcaggtgatccttatggcaactgtggcaaagtctcgaagagttcctttgccaaatgcgagatgagagatgctaaatgtggaaaaatccagtgtcaaggaggtgccagccggccagtcattggtaccaatgccgtttccatagaaacaaacatccccctgcagcaaggaggccggattctgtgccgggggacccacgtgtacttgggcgatgacatgccggacccagggcttgtgcttgcaggcacaaagtgtgcagatggaaaaatctgcctgaatcgtcaatgtcaaaatattagtgtctttggggttcacgagtgtgcaatgcagtgccacggcagaggggtgtgcaacaacaggaagaactgccactgcgaggcccactgggcacctcccttctgtgacaagtttggctttggaggaagcacagacagcggccccatccggcaagcagaagcaaggcaggaagctgcagagtccaacagggagcgcggccagggccaggagcccgtgggatcgcaggagcatgcgtctactgcctcactgacactcatctgagccctcccatgacatggagaccgtgaccagtgctgctgcagaggaggtcacgcgtccccaaggcctcctgtgactggcagcattgactctgtggctttgccatcgtttccatgacaacagacacaacacagttctcggggctcaggaggggaagtccagcctaccaggcacgtctgcagaaacagtgcaaggaagggcagcgacttcctggttgagcttctgctaaaacatggacatgcttcagtgctgctcctgagagagtagcaggttaccactctggcaggccccagccctgcagcaaggaggaagaggactcaaaagtctggcctttcactgagcctccacagcagtgggggagaagcaagggttgggcccagtgtcccctttccccagtgacacctcagccttggcagccctgatgactggtctctggctgcaacttaatgctctgatatggcttttagcatttattatatgaaaatagcagggttttagtttttaatttatcagagaccctgccacccattccatctccatccaagcaaactgaatggcaatgaaacaaactggagaagaaggtaggagaaagggcggtgaactctggctctttgctgtggacatgcgtgaccagcagtactcaggtttgagggtttgcagaaagccagggaacccacagagtcaccaacccttcatttaacaagtaagaatgttaaaaagtgaaaacaatgtaagagcctaactccatcccccgtggccattactgcataaaatagagtgcatttgaaatac

SEQ ID NO: 20617 - protein, 582 aa, Homo sapiens; identical to SEQ ID NO: 20613

SEQ ID NO: 20618 - DNA, 3274 bp, Homo sapiens
gactgctggccgtggatccatttcacaggcctgccttctctcactaacgctcttcctagtccccgggccaactcggacagtttgctcatttattgcaacggtcaaggctggcttgtgccagaacggcgcgcgcgcgcgcacgcacgcacacacacggggggaaacttttttaaaaatgaaaggctagaagagctcagcggcggcgcgggcgctgcgcgagggctccggagctgactcgccgaggcaggaaatccctccggtcgcgacgcccggccccggctcggcgcccgcgtgggatggtgcagcgctcgccgccgggcccgagagctgctgcactgaaggccggcgacgatggcagcgcgcccgctgcccgtgtcccccgcccgcgccctcctgctcgccctggccggtgctctgctcgcgccctgcgaggcccgaggggtgagcttatggaaccaaggaagagctgatgaagttgtcagtgcctctgttgggagtggggacctctggatcccagtgaagagcttcgactccaagaggtctcattgccagcagtttcacggaaacccactatctgcaagacggtactgatgtctccctcgctcgaaattacacgggtcactgttactaccatggacatgtacggggatattctgattcagcagtcagtctcagcacgtgttctggtctcaggggacttattgtgtttgaaaatgaaagctatgtcttagaaccaatgaaaagtgcaaccaacagatacaaactcttcccagcgaagaagctgaaaagcgtccggggatcatgtggatcacatcacaacacaccaaacctcgctgcaaagaatgtgtttccaccaccctctcagacatgggcaagaaggcataaaagagagaccctcaaggcaactaagtatgtggagctggtgatcgtggcagacaaccgagagtttcagaggcaaggaaaagatctggaaaaagttaagcagcgattaatagagattgctaatcacgttgacaagttttacagaccactgaacattcggatcgtgttggtaggcgtggaagtgtggaatgacatggacaaatgctctgtaagtcaggacccattcaccagcctccatgaatttctggactggaggaagatgaagcttctacctcgcaaatcccatgacaatgcgcagcttgtcagtggggtttatttccaagggaccaccatcggcatggccccaatcatgagcatgtgcacggcagaccagtctgggggaattgtcatggaccattcagacaatccccttggtgcagccgtgaccctggcacatgagctgggccacaatttcgggatgaatcatgacacactggacaggggctgtagctgtcaaatggcggttgagaaaggaggctgcatcatgaacgcttccaccgggtacccatttcccatggtgttcagcagttgcagcaggaaggacttggagaccagcctggagaaaggaatgggggtgtgcctgtttaacctgccggaagtcagggagtctttcgggggccagaagtgtgggaacagatttgtggaagaaggagaggagtgtgactgtggggagccagaggaatgtatgaatcgctgctgcaatgccaccacctgtaccctgaagccggacgctgtgtgcgcacatgggctgtgctgtgaagactgccagctgaagcctgcaggaacagcgtgcagggactccagcaactcctgtgacctcccagagttctgcacaggggccagccctcactgcccagccaacgtgtacctgcacgatgggcactcatgtcaggatgtggacggctactgctacaatggcatctgccagactcacgagcagcagtgtgtcacgctctggggaccaggtgctaaacctgcccctgggatctgctttgagagagtcaattctgcaggtgatccttatggcaactgtggcaaagtctcgaagagttcctttgccaaatgcgagatgagagatgctaaatgtggaaaaatccagtgtcaaggaggtgccagccggccagtcattggtaccaatgccgtttccatagaaacaaacatccccctgcagcaaggaggccggattctgtgccgggggacccacgtgtacttgggcgatgacatgccggacccagggcttgtgcttgcaggcacaaagtgtgcagatggaaaaatctgcctgaatcgtcaatgtcaaaatattagtgtctttggggttcacgagtgtgcaatgcagtgccacggcagaggggtgtgcaacaacaggaagaactgccactgcgaggcccactgggcacctcccttctgtgacaagtttggctttggaggaagcacagacagcggccccatccggcaagcagaagcaaggcaggaagctgcagagtccaacagggagcgcggccagggccaggagcccgtgggatcgcaggagcatgcgtctactgcctcactgacactcatctgagccctcccatgacatggagaccgtgaccagtgctgctgcagaggaggtcacgcgtccccaaggcctcctgtgactggcagcattgactctgtggctttgccatcgtttccatgacaacagacacaacacagttctcggggctcaggaggggaagtccagcctaccaggcacgtctgcagaaacagtgcaaggaagggcagcgacttcctggttgagcttctgctaaaacatggacatgcttcagtgctgctcctgagagagtagcaggttaccactctggcaggccccagccctgcagcaaggaggaagaggactcaaaagtctggcctttcactgagcctccacagcagtgggggagaagcaagggttgggcccagtgtcccctttccccagtgacacctcagccttggcagccctgatgactggtctctggctgcaacttaatgctctgatatggcttttagcatttattatatgaaaatagcagggttttagtttttaatttatcagagaccctgccacccattccatctccatccaagcaaactgaatggcaatgaaacaaactggagaagaaggtaggagaaagggcggtgaactctggctctttgctgtggacatgcgtgaccagcagtactcaggtttgagggtttgcagaaagccagggaacccacagagtcaccaacccttcatttaacaagtaagaatgttaaaaagtgaaaacaatgtaagagcctaactccatcccccgtggccattactgcataaaatagagtgcatttgaaatac

SEQ ID NO: 20619 - protein, 582 aa, Homo sapiens; identical to SEQ ID NO: 20613

SEQ ID NO: 20620 - DNA, 538 bp, Homo sapiens
tgccatttttttctgcctctttgttttcttggcctagtgaggttgtcagaaggattgttcagtggggtccctgggaaggaaaaggaggggaaagagaaaggtgatgggggtactctctcagtttacctatcatgtatcactttttatataaaggttttcctaatggcctagtccttggttagcacacttccctcacagattcccacacagaacctaagcccttgattactctattaagggctgtgatttcgggggggccctgagctgaactacaaattcctcaaggggaaggccctgtcctgtggcctcccccagatatttaacatggattgaaaccctgagttatggaagggcagccagagccagggagaggccacaggaaagaggaaggcaccatgggattgtccctgtgccgaggatgtacctccttcccccaccacccctgtcagtagtgctggtggggagtgttatccctgcatgccagaaagggaaaggccatccaggccgtacagccagtaccttcaggagcagagctggt

SEQ ID NO: 20621 - protein, 39 aa, Homo sapiens
MYLLPPPPLSVVLVGSVIPACQKGKGHPGRTASTFRSRA

SEQ ID NO: 20622 - DNA, 1167 bp, Homo sapiens
gactgcatcaaatgaccaacggtctgagtatgaggcacatcaggggcagaaccagagaagagaaagtacggtgatgtggctgcccaacaggaggtcagctcacccagacagcttcctccagctctgaaacagatcgactgagcaccagatgaagttggcatggatgggagatgtgatgtacaagagaaaagcaaaaattacttgagttatctccccgaagtcaaaagtaatgggacacgcagaccctcctgaaattctgagcagaaattgctgctacatttgaatcagattctaagagatcatcaacattagaaggtgcacatcataattcaaatctctgaagaggaagaaggaagatattgacttcagtcttcatttagtcctgttatgggacttccagacactgaaaaaactcatccctacagccggctggaggatattgtcctggaaggggcagctttcacacatggtttgaattcaattagccagctcctctgagagccactagagtaccatttaggacattgcttcttgaattctcatttgcagccttgcaaataattttcaaaggtcattagaccataaggagttttcattacccttcattcatgtcaacagcaaacacttactgattgagcgtccacttggtgccctatgctaggtgcttccaggtgcatccaaaaagggatgcagcacaaaaaattaaaatgactagaagcagcaacacatggaaggtaaaaatctttctaataagagcaatggaagaaacatttctacaaatgttaagttgtaagtcaaatgtttttaaaaagaaagaaatgacaaatttgattagacaaaaatgagaaactgcttgctgtggtctcaatgtgtccccccagattcatatgttaaaccttaattgccaatgtgagagtattacgaggtagggactttaggaggtgattaagtctctgccttcatgaatgggattagtgtccttacaaaagaggtgcaaggaagctgcccatccattccaccacataaggatgcatccaaaggtgccatctgtgaagcagagaatgccctcactagacatcaaactagacgtcaaacctaaattggccttgatcttgggcttcccaccctccagaactgtgagcaataaatttctattttttataaatt

SEQ ID NO: 20623 - protein, 30 aa, Homo sapiens
MDGRCDVQEKSKNYLSYLPEVKSNGTRRPS

SEQ ID NO: 20624 - DNA, 594 bp, Homo sapiens
cacagaccagggagcagcaatcaatactggacaccaggcagcttccacgcttgacagtgttgccagaccctcgcgtgggcaggagggcacagctctctaggaggcaacattatccactggagcatctagaagcacaagtacttccatgatggtcagaggcagaagaggatgcggagcagggtagaagactctcatgactacctgcacgccaccatcttccccggcctggcgcaattgccttcaggatatgtacagcatgacccacagggatttcacttcatggaatgcaaaaccaacctgcatgagctttgtttgaaaacaaaacaaaacaaaacgaaaacaaaacaaaacaaaacagagaaatcctatctataaaattactcttaatggaaattctgcctgtataaaattaaagtggcaggtgagaaccattttcagcttgcttatgggtctcttacagattttccttgaagtttcatgtgttctaattccctgatatggagggaagagactacagttgtgtttacctcgaattatcattcaaatagaggtggtgttttcccccagtaaaattactaaggtaaattgcctatt

SEQ ID NO: 20625 - protein, 68 aa, Homo sapiens [sequence omitted]

SEQ ID NO: 20626 - DNA, 1138 bp, Homo sapiens
ggcacttctctccagaagaccatgattctgttgctaaaaagaagcattcaaaggcattgttctccataaaataacttgttcaaacccaaagaacggtgcatttcagagaaggagatgcatatgcgatctaagagaatctatgataacttgccggaagttaaaaagaaaaaagaagaacaaaggaaaagggtgatcttacaaagtaacagactccgtgccgaagtcttcaaaaagcaattactggaccagctccttcaaaggaatgcggtctaaccacaggctgccctgctgaccacactacctggacctgggaggacttcgaatgctggataagccattaaacttagcattatcttcatcatgggaaaacacttattttactttcgattttttttttccataaaggaaaacatcacttcctgaattactgacccaagccaaacagaaacaataaccctcgagaaaataggtcaacaatctgttgtggggaaaccacctccatgtaacccactggatacagtccccttaatgtttttgcttctaaattgtaccttttgcttctgatttcttctcccctgctgtttcctgcccatcagagaggcctgatacaagcaagtttgtttacatccctggggaatcttttacatcaaacttttgggatccaaatccatctccttttaaatttcaatctcagcacctgccagttatgcaaatgccaaaatgtgggtcatcatatagtatatttgaaacctttctgaacatgtacaccacccaatgctagaggctgacttggaaaccggtgggtgcaatgcccgaggctgtggaacaatcagcccatctctttgtgacctggagcagtcagagggccctcagtcaccccgccccattcctcaccagagaaaagaatccatttctatggaagctctgacgtaacttcagtgttttctacaatactcctcctgccccgccccattaaaacagttcttttgttaagaaatagcctaatggtccaactttgctgtctgttcttccaaatgtttataatacacattatttataaatatgtctgtttgggaagctaagaacaagctagtttttacaacacaaatggaaataaatgcaattattataaaaattc

SEQ ID NO: 20627 - protein, 52 aa, Homo sapiens
MHMRSKRIYDNLPEVKKKKEEQRKRVILQSNRLRAEVFKKQLLDQLLQRNAV

SEQ ID NO: 20628 - DNA, 1573 bp, Homo sapiens
gcaatgtggaggacagatgggagaggagcacggctgggggctgaggcccagccggcaaggagagcgtggagtcactgtgaaggaggggctgcggctgcagagacgctcaggatccagggatgggtctttgagcagtgaagaggagattacacatgctgtgacttggttgtaaaaataaaggaatgtaagaagagtgaggaccccaccacacctgagccctccccagcagcaccctcgccagcaccccgcgatggagcagggagccctggcctgtccgaagactgttctgagtctcagcaaacgcctgcaagatctttgaccttgcaagaagcactggaagttcgtaagcctcagttcatttctcgctcacaagaacggctgaagaagcttgaacacatggtccagcagaggaaagcccagcggaaggaggacctgaggcagaagcagagcctccttcccatccgcaccagcaagaagcagttcacgattccccatcctctgagtgataacttgttcaaacccaaagaacggtgcatttcagagaaggagatgcatatgcgatctaagagaatctatgataacttgccggaagttaaaaagaaaaaagaagaacaaaggaaaagggtgatcttacaaagtaacagactccgtgccgaagtcttcaaaaagcaattactggaccagctccttcaaaggaatgcggtctaaccacaggctgccctgctgaccacactacctggacctgggaggacttcgaatgctggataagccattaaacttagcattatcttcatcatgggaaaacacttattttactttcgattttttttttccataaaggaaaacatcacttcctgaattactgacccaagccaaacagaaacaataaccctcgagaaaataggtcaacaatctgttgtggggaaaccacctccatgtaacccactggatacagtccccttaatgtttttgcttctaaattgtaccttttgcttctgatttcttctcccctgctgtttcctgcccatcagagaggcctgatacaagcaagtttgtttacatccctggggaatcttttacatcaaacttttgggatccaaatccatctccttttaaatttcaatctcagcacctgccagttatgcaaatgccaaaatgtgggtcatcatatagtatatttgaaacctttctgaacatgtacaccacccaatgctagaggctgacttggaaaccggtgggtgcaatgcccgaggctgtggaacaatcagcccatctctttgtgacctggagcagtcagagggccctcagtcaccccgccccattcctcaccagagaaaagaatccatttctatggaagctctgacgtaacttcagtgttttctacaatactcctcctgccccgccccattaaaacagttcttttgttaagaaatagcctaatggtccaactttgctgtctgttcttccaaatgtttataatacacattatttataaatatgtctgtttgggaagctaagaacaagctagtttttacaacacaaatggaaataaatgcaattattataaaaattc

SEQ ID NO: 20629 - protein, 103 aa, Homo sapiens
MVQQRKAQRKEDLRQKQSLLPIRTSKKQFTIPHPLSDNLFKPKERCISEKEMHMRSKRIYDNLPEVKKKKEEQRKRVILQSNRLRAEVFKKQLLDQLLQRNAV

SEQ ID NO: 20630 - DNA, 1593 bp, Homo sapiens
cttggagtggttcttttccattggaaaacacagaattggcaaatgtgggagctaaccaagtcactgtaagaaaaggggaaaaggaccatacaactcattgtcacgccagcgatcatgccaaccaactgtccattcacattcctggctggagttacagggcaggagattacacatgctgtgacttggttgtaaaaataaaggaatgtaagaagagtgaggaccccaccacacctgagccctccccagcagcaccctcgccagcaccccgcgatggagcagggagccctggcctgtccgaagactgttctgagtctcagcaaacgcctgcaagatctttgaccttgcaagaagcactggaagttcgtaagcctcagttcatttctcgctcacaagaacggctgaagaagcttgaacacatggtccagcagaggaaagcccagcggaaggaggacctgaggcagaagcagagcctccttcccatccgcaccagcaagaagcagttcacgattccccatcctctgagtgataacttgttcaaacccaaagaacggtgcatttcagagaaggagatgcatatgcgatctaagagaatctatgataacttgccggaagttaaaaagaaaaaagaagaacaaaggaaaagggtgatcttacaaagtaacagactccgtgccgaagtcttcaaaaagcaattactggaccagctccttcaaaggaatgcggtctaaccacaggctgccctgctgaccacactacctggacctgggaggacttcgaatgctggataagccattaaacttagcattatcttcatcatgggaaaacacttattttactttcgattttttttttccataaaggaaaacatcacttcctgaattactgacccaagccaaacagaaacaataaccctcgagaaaataggtcaacaatctgttgtggggaaaccacctccatgtaacccactggatacagtccccttaatgtttttgcttctaaattgtaccttttgcttctgatttcttctcccctgctgtttcctgcccatcagagaggcctgatacaagcaagtttgtttacatccctggggaatcttttacatcaaacttttgggatccaaatccatctccttttaaatttcaatctcagcacctgccagttatgcaaatgccaaaatgtgggtcatcatatagtatatttgaaacctttctgaacatgtacaccacccaatgctagaggctgacttggaaaccggtgggtgcaatgcccgaggctgtggaacaatcagcccatctctttgtgacctggagcagtcagagggccctcagtcaccccgccccattcctcaccagagaaaagaatccatttctatggaagctctgacgtaacttcagtgttttctacaatactcctcctgccccgccccattaaaacagttcttttgttaagaaatagcctaatggtccaactttgctgtctgttcttccaaatgtttataatacacattatttataaatatgtctgtttgggaagctaagaacaagctagtttttacaacacaaatggaaataaatgcaattattataaaaattc

SEQ ID NO: 20631 - protein, 103 aa, Homo sapiens; identical to SEQ ID NO: 20629

SEQ ID NO: 20632 - DNA, 3086 bp, Homo sapiens
attctgagcctagccacagaggtaaactccggacatttttttctttcatgtcgccaaatacatccttgtcattaaaagacctttgaaactgagtaaaatggctttgaaacctcagtagaatatgctcaaactgtctggagaaggattacgggacagctaccacagtagaagagatcaaattgcccttaaaaatctccagtctgatgtcacagaggcaaaatctgacttcaccaaggagaccctggcatcacaaaacacaaaaatgatttcatccatagtcatctcccagatgattgatgagaataagtcaagagaaaacagggcctccttgcccctaccgtgtgccattgctcagtctcgtgcacatcacgccaagcaatctctggctaaccgcagcggagtcaacattcacagagcatttgcgttacttccgggcagattaggaatcccggcaccgtcagatgagcgaggacctgaggcagagctgccgcccaaagaggagagaccctgtgggggcccccgcagagggtttgcatccatcaccatcacggccagacgcgtgggccccccagcccgcgccctggtgtgggggactgctggggactctctgtgccccaagtgcagggctgaggacacactgttccaggcgcccccggctctggccaatggcgcccatccaggtcggcatcagagatcttttgcctgcacagagttctccagaaacagctccgtggtgcggctgaaggttcccgaggcccacactgggttgtgtgagagacgcaagtactgggtcacccatgcagacgacaaagagaccagtttttctccagacaccccactgtcaggaaagagcccgctggtgttcagttcctgtgtccacctcagggtgtctcagcagtgtccagattcaatctattacgtagacaagtctctctccgtccccattgagccacctcaaattgccagccccaaaatgcacagatccgtcctgtcgctcaacctcaattgtagttcccacagattaacagcagatggagtagatggcctagtgaacagagagccaataagcgaagccctgaagcaggagctcctggagggagaccaggacctcgtaggccagcgctggaacccaggtttacaagaaagtcacttgaaggaaaccccatcgttgaggcgggtgcatttggggaccggcgcttgtccttggagtggttcttttccattggaaaacacagaattggcaaatgtgggagctaaccaagtcactgtaagaaaaggggaaaaggaccatacaactcattgtcacgccagcgatcatgccaaccaactgtccattcacattcctggctggagttacagggcagtacacacaaaagtattttctggaagcagcaagaggcaacaaggagaagtatgtatgactgtgtctgctcctccagtggaacagaagcccactagacatttccttcccattggggatagctctccaagcgatgactgtctgtctagagacctttctgagcccacagagagacgacatcaaagcttcctgaaacccagaatcctttttcctgggtttctttgccccttacaagatgtatgtgcatctctgcaggaagacaatggtgttcagatagaaagcaagttccccaaaggagattacacatgctgtgacttggttgtaaaaataaaggaatgtaagaagagtgaggaccccaccacacctgagccctccccagcagcaccctcgccagcaccccgcgatggagcagggagccctggcctgtccgaagactgttctgagtctcagcaaacgcctgcaagatctttgaccttgcaagaagcactggaagttcgtaagcctcagttcatttctcgctcacaagaacggctgaagaagcttgaacacatggtccagcagaggaaagcccagcggaaggaggacctgaggcagaagcagagcctccttcccatccgcaccagcaagaagcagttcacgattccccatcctctgagtgataacttgttcaaacccaaagaacggtgcatttcagagaaggagatgcatatgcgatctaagagaatctatgataacttgccggaagttaaaaagaaaaaagaagaacaaaggaaaagggtgatcttacaaagtaacagactccgtgccgaagtcttcaaaaagcaattactggaccagctccttcaaaggaatgcggtctaaccacaggctgccctgctgaccacactacctggacctgggaggacttcgaatgctggataagccattaaacttagcattatcttcatcatgggaaaacacttattttactttcgattttttttttccataaaggaaaacatcacttcctgaattactgacccaagccaaacagaaacaataaccctcgagaaaataggtcaacaatctgttgtggggaaaccacctccatgtaacccactggatacagtccccttaatgtttttgcttctaaattgtaccttttgcttctgatttcttctcccctgctgtttcctgcccatcagagaggcctgatacaagcaagtttgtttacatccctggggaatcttttacatcaaacttttgggatccaaatccatctccttttaaatttcaatctcagcacctgccagttatgcaaatgccaaaatgtgggtcatcatatagtatatttgaaacctttctgaacatgtacaccacccaatgctagaggctgacttggaaaccggtgggtgcaatgcccgaggctgtggaacaatcagcccatctctttgtgacctggagcagtcagagggccctcagtcaccccgccccattcctcaccagagaaaagaatccatttctatggaagctctgacgtaacttcagtgttttctacaatactcctcctgccccgccccattaaaacagttcttttgttaagaaatagcctaatggtccaactttgctgtctgttcttccaaatgtttataatacacattatttataaatatgtctgtttgggaagctaagaacaagctagtttttacaacacaaatggaaataaatgcaattattataaaaattc

SEQ ID NO: 20633 - protein, 699 aa, Homo sapiens; identical to SEQ ID NO: 2615

SEQ ID NO: 20634 - DNA, 947 bp, Homo sapiens
gagcgaggacctgaggcagagctgccgcccaaagaggagagaccctgtgggggcccccgcagagggtttgcatccatcaccatcacggccagacgcgtgggccccccagcccgcgccctggtgtgggggactgctggggactctctgtgccccaagtgcagggctgaggacacactgttccaggcgcccccggctctggccaatggcgcccatccaggtcggcatcagagatcttttgcctgcacagagttctccagaaacagctccgtggtgcggctgaaggttcccgaggcccacactgggttgtgtgagagacgcaagtactgggtcacccatgcagacgacaaagagaccagtttttctccagacaccccactgtcaggaaagagcccgctggtgttcagttcctgtgtccacctcagggtgtctcagcagtgtccagattcaatctattacgtagacaagtctctctccgtccccattgagccacctcaaattgccagccccaaaatgcacagatccgtcctgtcgctcaacctcaattgtagttcccacagattaacagcagatggagtagatggcctagtgaacagagagccaataagcgaagccctgaagcaggagctcctggagggagaccaggacctcgtaggccagcgctggaacccaggtttacaagaaagtcacttgaaggaaacccccattcctcaccagagaaaagaatccatttctatggaagctctgacgtaacttcagtgttttctacaatactcctcctgccccgccccattaaaacagttcttttgttaagaaatagcctaatggtccaactttgctgtctgttcttccaaatgtttataatacacattatttataaatatgtctgtttgggaagctaagaacaagctagtttttacaacacaaatggaaataaatgcaattattat

SEQ ID NO: 20635 - protein, 79 aa, Homo sapiens
MHRSVLSLNLNCSSHRLTADGVDGLVNREPISEALKQELLEGDQDLVGQRWNPGLQESHLKETPIPHQRKESISMEALT

SEQ ID NO: 20636 - DNA, 994 bp, Homo sapiens
ggcacttctctccagaagaccatgattctgttgctaaaaagaagcattcaaaggcattgttctccataaaataacttgttcaaacccaaagaacggtgcatttcagagaaggagatgcatatgcgatctaagagaatctatgataacttgccggaagttaaaaagaaaaaagaagaacaaaggaaaagggtgatcttacaaagtaacagactccgtgccgaagtcttcaaaaagcaattactggaccagctccttcaaaggaatgcggtctaaccacaggctgccctgctgaccacactacctggacctgggaggacttcgaatgctggataagccattaaacttagcattatcttcatcatgggaaaacacttattttactttcgattttttttttccataaaggaaaacatcacttcctgaattactgacccaagccaaacagaaacaataaccctcgagaaaataggtcaacaatctgttgtggggaaaccacctccatgtaacccactggatacagtccccttaatgtttttgcttctaaattgtaccttttgcttctgatttcttctcccctgctgtttcctgcccatcagagaggcctgatacaagcaagtttgtttacatccctggggaatcttttacatcaaacttttgggatccaaatccatctccttttaaatttcaatctcagcacctgccagttatgcaaatgccaaaatgtgggtcatcatatagtatatttgaaacctttctgaacatgtacaccacccaatgctagaggctgacttggaaaccggtgggtgcaatgcccgaggctgtggaacaatcagcccatctctttgtgacctggagcagtcagagggccctcagtcaccccgccccattcctcaccagagaaaagaatccatttctatggaagctctgacgtaacttcagtgttttctacaatactcctcctgccccgccccattaaaacagttcttttgttaag

SEQ ID NO: 20637 - protein, 52 aa, Homo sapiens; identical to SEQ ID NO: 20627

SEQ ID NO: 20638 - DNA, 1429 bp, Homo sapiens
gcaatgtggaggacagatgggagaggagcacggctgggggctgaggcccagccggcaaggagagcgtggagtcactgtgaaggaggggctgcggctgcagagacgctcaggatccagggatgggtctttgagcagtgaagaggagattacacatgctgtgacttggttgtaaaaataaaggaatgtaagaagagtgaggaccccaccacacctgagccctccccagcagcaccctcgccagcaccccgcgatggagcagggagccctggcctgtccgaagactgttctgagtctcagcaaacgcctgcaagatctttgaccttgcaagaagcactggaagttcgtaagcctcagttcatttctcgctcacaagaacggctgaagaagcttgaacacatggtccagcagaggaaagcccagcggaaggaggacctgaggcagaagcagagcctccttcccatccgcaccagcaagaagcagttcacgattccccatcctctgagtgataacttgttcaaacccaaagaacggtgcatttcagagaaggagatgcatatgcgatctaagagaatctatgataacttgccggaagttaaaaagaaaaaagaagaacaaaggaaaagggtgatcttacaaagtaacagactccgtgccgaagtcttcaaaaagcaattactggaccagctccttcaaaggaatgcggtctaaccacaggctgccctgctgaccacactacctggacctgggaggacttcgaatgctggataagccattaaacttagcattatcttcatcatgggaaaacacttattttactttcgattttttttttccataaaggaaaacatcacttcctgaattactgacccaagccaaacagaaacaataaccctcgagaaaataggtcaacaatctgttgtggggaaaccacctccatgtaacccactggatacagtccccttaatgtttttgcttctaaattgtaccttttgcttctgatttcttctcccctgctgtttcctgcccatcagagaggcctgatacaagcaagtttgtttacatccctggggaatcttttacatcaaacttttgggatccaaatccatctccttttaaatttcaatctcagcacctgccagttatgcaaatgccaaaatgtgggtcatcatatagtatatttgaaacctttctgaacatgtacaccacccaatgctagaggctgacttggaaaccggtgggtgcaatgcccgaggctgtggaacaatcagcccatctctttgtgacctggagcagtcagagggccctcagtcaccccgccccattcctcaccagagaaaagaatccatttctatggaagctctgacgtaacttcagtgttttctacaatactcctcctgccccgccccattaaaacagttcttttgttaag

SEQ ID NO: 20639 - protein, 103 aa, Homo sapiens; identical to SEQ ID NO: 20629

SEQ ID NO: 20640 - DNA, 2942 bp, Homo sapiens
attctgagcctagccacagaggtaaactccggacatttttttctttcatgtcgccaaatacatccttgtcattaaaagacctttgaaactgagtaaaatggctttgaaacctcagtagaatatgctcaaactgtctggagaaggattacgggacagctaccacagtagaagagatcaaattgcccttaaaaatctccagtctgatgtcacagaggcaaaatctgacttcaccaaggagaccctggcatcacaaaacacaaaaatgatttcatccatagtcatctcccagatgattgatgagaataagtcaagagaaaacagggcctccttgcccctaccgtgtgccattgctcagtctcgtgcacatcacgccaagcaatctctggctaaccgcagcggagtcaacattcacagagcatttgcgttacttccgggcagattaggaatcccggcaccgtcagatgagcgaggacctgaggcagagctgccgcccaaagaggagagaccctgtgggggcccccgcagagggtttgcatccatcaccatcacggccagacgcgtgggccccccagcccgcgccctggtgtgggggactgctggggactctctgtgccccaagtgcagggctgaggacacactgttccaggcgcccccggctctggccaatggcgcccatccaggtcggcatcagagatcttttgcctgcacagagttctccagaaacagctccgtggtgcggctgaaggttcccgaggcccacactgggttgtgtgagagacgcaagtactgggtcacccatgcagacgacaaagagaccagtttttctccagacaccccactgtcaggaaagagcccgctggtgttcagttcctgtgtccacctcagggtgtctcagcagtgtccagattcaatctattacgtagacaagtctctctccgtccccattgagccacctcaaattgccagccccaaaatgcacagatccgtcctgtcgctcaacctcaattgtagttcccacagattaacagcagatggagtagatggcctagtgaacagagagccaataagcgaagccctgaagcaggagctcctggagggagaccaggacctcgtaggccagcgctggaacccaggtttacaagaaagtcacttgaaggaaaccccatcgttgaggcgggtgcatttggggaccggcgcttgtccttggagtggttcttttccattggaaaacacagaattggcaaatgtgggagctaaccaagtcactgtaagaaaaggggaaaaggaccatacaactcattgtcacgccagcgatcatgccaaccaactgtccattcacattcctggctggagttacagggcagtacacacaaaagtattttctggaagcagcaagaggcaacaaggagaagtatgtatgactgtgtctgctcctccagtggaacagaagcccactagacatttccttcccattggggatagctctccaagcgatgactgtctgtctagagacctttctgagcccacagagagacgacatcaaagcttcctgaaacccagaatcctttttcctgggtttctttgccccttacaagatgtatgtgcatctctgcaggaagacaatggtgttcagatagaaagcaagttccccaaaggagattacacatgctgtgacttggttgtaaaaataaaggaatgtaagaagagtgaggaccccaccacacctgagccctccccagcagcaccctcgccagcaccccgcgatggagcagggagccctggcctgtccgaagactgttctgagtctcagcaaacgcctgcaagatctttgaccttgcaagaagcactggaagttcgtaagcctcagttcatttctcgctcacaagaacggctgaagaagcttgaacacatggtccagcagaggaaagcccagcggaaggaggacctgaggcagaagcagagcctccttcccatccgcaccagcaagaagcagttcacgattccccatcctctgagtgataacttgttcaaacccaaagaacggtgcatttcagagaaggagatgcatatgcgatctaagagaatctatgataacttgccggaagttaaaaagaaaaaagaagaacaaaggaaaagggtgatcttacaaagtaacagactccgtgccgaagtcttcaaaaagcaattactggaccagctccttcaaaggaatgcggtctaaccacaggctgccctgctgaccacactacctggacctgggaggacttcgaatgctggataagccattaaacttagcattatcttcatcatgggaaaacacttattttactttcgattttttttttccataaaggaaaacatcacttcctgaattactgacccaagccaaacagaaacaataaccctcgagaaaataggtcaacaatctgttgtggggaaaccacctccatgtaacccactggatacagtccccttaatgtttttgcttctaaattgtaccttttgcttctgatttcttctcccctgctgtttcctgcccatcagagaggcctgatacaagcaagtttgtttacatccctggggaatcttttacatcaaacttttgggatccaaatccatctccttttaaatttcaatctcagcacctgccagttatgcaaatgccaaaatgtgggtcatcatatagtatatttgaaacctttctgaacatgtacaccacccaatgctagaggctgacttggaaaccggtgggtgcaatgcccgaggctgtggaacaatcagcccatctctttgtgacctggagcagtcagagggccctcagtcaccccgccccattcctcaccagagaaaagaatccatttctatggaagctctgacgtaacttcagtgttttctacaatactcctcctgccccgccccattaaaacagttcttttgttaag

SEQ ID NO: 20641 - protein, 699 aa, Homo sapiens; identical to SEQ ID NO: 2615

SEQ ID NO: 20642 - DNA, 2903 bp, Homo sapiens
gggaagatggccatgtgcaggtggaggcagagattagagaggggctgtcccaagccgagggacacagaggatgccagacaccacgggacactgagaagggcaaggaagggtcctcccctagggccttcagagggagcacggtcctgacacctggatttctggcctccagaactgggaaggagtaaatccctgttgtatccagctgctccctttgtagtcacttttcacagcagcgctgggaacgaacgcaggcaccaatccagcttgggggccatgtggggtagcagcggatcgggacttccttctaagagaagcgatcttgagccgtgtcacgggtgaggagttaggagttagctcagtggggaaaaggtgaaggcagcactcacggtcatcaagccagcccctgtgggaagcaggctgggtttaaggatttctaacctgggctccttgaactcccagggtccccctacatgtgtgcttcaattttgcaccttttcttggggagaaacgaatcccttgcatttgagttttggaggaccatgtggccttcacggtcacaaactggcaatgtcaagaaggtttggcaggaccggctgggagatgaggctggtggggtcaccagcttgattgtgaccttgctgacaccagcagggcagggaggtgaactgacgcaatggagcagagcctttgtctcaggagcaaaccagccttggctttcagttggatgttggaggattacgggacagctaccacagtagaagagatcaaattgcccttaaaaatctccagtctgatgtcacagaggcaaaatctgacttcaccaaggagaccctggcatcacaaaacacaaaaatgatttcatccatagtcatctcccagatgattgatgagaataagtcaagagaaaacagggcctccttgcccctaccgtgtgccattgctcagtctcgtgcacatcacgccaagcaatctctggctaaccgcagcggagtcaacattcacagagcatttgcgttacttccgggcagattaggaatcccggcaccgtcagatgagcgaggacctgaggcagagctgccgcccaaagaggagagaccctgtgggggcccccgcagagggtttgcatccatcaccatcacggccagacgcgtgggccccccagcccgcgccctggtgtgggggactgctggggactctctgtgccccaagtgcagggctgaggacacactgttccaggcgcccccggctctggccaatggcgcccatccaggtcggcatcagagatcttttgcctgcacagagttctccagaaacagctccgtggtgcggctgaaggttcccgaggcccacactgggttgtgtgagagacgcaagtactgggtcacccatgcagacgacaaagagaccagtttttctccagacaccccactgtcaggaaagagcccgctggtgttcagttcctgtgtccacctcagggtgtctcagcagtgtccagattcaatctattacgtagacaagtctctctccgtccccattgagccacctcaaattgccagccccaaaatgcacagatccgtcctgtcgctcaacctcaattgtagttcccacagattaacagcagatggagtagatggcctagtgaacagagagccaataagcgaagccctgaagcaggagctcctggagggagaccaggacctcgtaggccagcgctggaacccaggtttacaagaaagtcacttgaaggaaaccccatcgttgaggcgggtgcatttggggaccggcgcttgtccttggagtggttcttttccattggaaaacacagaattggcaaatgtgggagctaaccaagtcactgtaagaaaaggggaaaaggaccatacaactcattgtcacgccagcgatcatgccaaccaactgtccattcacattcctggctggagttacagggcagtacacacaaaagtattttctggaagcagcaagaggcaacaaggagaagtatgtatgactgtgtctgctcctccagtggaacagaagcccactagacatttccttcccattggggatagctctccaagcgatgactgtctgtctagagacctttctgagcccacagagagacgacatcaaagcttcctgaaacccagaatcctttttcctgggtttctttgccccttacaagatgtatgtgcatctctgcaggaagacaatggtgttcagatagaaagcaagttccccaaaggagattacacatgctgtgacttggttgtaaaaataaaggaatgtaagaagagtgaggaccccaccacacctgagccctccccagcagcaccctcgccagcaccccgcgatggagcagggagccctggcctgtccgaagactgttctgagtctcagcaaacgcctgcaagatctttgaccttgcaagaagcactggaagttcgtaagcctcagttcatttctcgctcacaagaacggctgaagaagcttgaacacatggtccagcagaggaaagcccagcggaaggaggacctgaggcagaagcagagcctccttcccatccgcaccagcaagaagcagttcacgattccccatcctctgagtgataacttgttcaaacccaaagaacggtgcatttcagagaaggagatgcatatgcgatctaagagaatctatgataacttgccggaagttaaaaagaaaaaagaagaacaaaggaaaagggtgatcttacaaagtaacagactccgtgccgaagtcttcaaaaagcaattactggaccagctccttcaaaggaatgcggtctaaccacaggctgccctgctgaccacactacctggacctgggaggacttcgaatgctggataagccattaaacttagcattatcttcatcatggg

SEQ ID NO: 20643 - protein, 652 aa, Homo sapiens
MISSIVISQMIDENKSRENRASLPLPCAIAQSRAHHAKQSLANRSGVNIHRAFALLPGRLGIPAPSDERGPEAELPPKEERPCGGPRRGFASITITARRVGPPARALVWGTAGDSLCPKCRAEDTLFQAPPALANGAHPGRHQRSFACTEFSRNSSVVRLKVPEAHTGLCERRKYWVTHADDKETSFSPDTPLSGKSPLVFSSCVHLRVSQQCPDSIYYVDKSLSVPIEPPQIASPKMHRSVLSLNLNCSSHRLTADGVDGLVNREPISEALKQELLEGDQDLVGQRWNPGLQESHLKETPSLRRVHLGTGACPWSGSFPLENTELANVGANQVTVRKGEKDHTTHCHASDHANQLSIHIPGWSYRAVHTKVFSGSSKRQQGEVCMTVSAPPVEQKPTRHFLPIGDSSPSDDCLSRDLSEPTERRHQSFLKPRILFPGFLCPLQDVCASLQEDNGVQIESKFPKGDYTCCDLVVKIKECKKSEDPTTPEPSPAAPSPAPRDGAGSPGLSEDCSESQQTPARSLTLQEALEVRKPQFISRSQERLKKLEHMVQQRKAQRKEDLRQKQSLLPIRTSKKQFTIPHPLSDNLFKPKERCISEKEMHMRSKRIYDNLPEVKKKKEEQRKRVILQSNRLRAEVFKKQLLDQLLQRNAV

SEQ ID NO: 20644 - DNA, 2971 bp, Homo sapiens
aagttgagattcggcatctgtgcaccacacacatcacacctgctggtgacgaggccattacctttttgaagacttcggcacggagtctgttactttggtagaagactctcatgactacctgcacgccaccatcttccccggcctggcgcaattgccttcaggatatgtacagcatgacccacagggatttcacttcatggaatgcaaaaccaacctgcatgagctttgtttgaaaacaaaacaaaacaaaacgaaaacaaaacaaaacaaaacagagaaatcctatctataaaattactcttaatggaaattctgcctgtataaaattaaagtggcagccatctgtggaatcccactgctgaatgaccgttgcacatagcagcttgtttcagaaccctgtcagatgactttgtgctgggcaccaagtggcattgttacagatgccggggtacacacacggagacagctccaggcaaggtgcattgttaggcaagcttcctgtgaggcaaagctagccacagatggaagcctgcacccaaccctactgcccagaggaaccccaggaccctcagccatcccttcctggaattgctcaacatagaggatgcagctgggcggcaggtagcttggggcaagttcttagccctgcttgtccactgcctggaaacagacttggtgctattacggagtgcaaccagccctttggattgcgtgggagctgggtgaggcctgtgactgctggctgtccccacttccctgacaacctgcatgactcagcagagggagccataatcctcctagaaaaggaaatttgaacatagagacacagacgcagggaggatggccatgtggagacagaggcagagactgtagtgccgcatctacaaaccaaggaacatcaaggattgcaggaagccgccaggagcagggagggaggctggacacgggattgaccactgagcctctagaaagtaaccaaccctgtggaaacctcggttttgacttctggcctctagaactgcaagaaatctccacaagccacctgcagcttaccactcagaggatggggaatcgtgaactgcttcttgctggtgcggatgggaaggaggctctgcttctgcctcaggtcctccttccgctgggctttcctctgctggaccatgtgttcaagcttcttcagccgttcttgtgagcgagaaatgaactgaggcttacgaacttccagtgcttcctatgcaaagcaaagaaaatacgtcatttttaagagcagtgacacagaaaggcaacgcatctgtctgatgcagccaagaagccgatggcaagcacaacactcagagaccaaaagccacggtgcaaaagtacgtcacgcttttcttgcacatctttgtgtaaagaaggtaacaggcatgttgacaacacaggtcctgggggtcaggcctggccagcgccgaggcccctgctgcagcaggattgaccggcaactggcatcaaagctgggagtgcagaggcaacgtctgcccattcatctttctaccctgctgagtcatttgttcccaaaagacgatccaaaagccctacattctgtattccaaagagacatgggagtggagggcatggaggtgctgagtcacttgcttctgttgcacttggaagccccaagaagcacagacacagatcatccactcagcgtgaaaaacgtgctctttcaggaggcaccacaactgcggctgaaggaaacagctcctcctcctgggtagaaagagctgggaggaaacctttgcctatacagaaagttctgtgagctccacaaaccatgtcagaagtccctatgtctccactcccacctccatgcactaagccacccacacaagtctcctgaacaagactaactgccattctgctccatcccagatgccgggctaggtgcttgatgtgtattcatcacctcgtggagtcccacaactgttcaggaaggcaggaatatttctttccatttgacagatgcaaaaactgaggctcatggtagtttggtagatcacatggtaacaccctatccacgggaaccccattcttttcctgcactgccttttatggtcttaacttcctattccttgagtgtctctgctcaagttgtccccagcctgaagtaccacccatagccattggctcaagttccatctaccccaggaatccctgttgaaatgccctgttgagccagagcatggtgcttcaccgatgggcttgagcaacagtgagtcatatgtttacctccgtgctaggctgtgagctccaggaagtcatgggccatgtctcattgacaatgcatcactcacacagtaggagtcctgcatgtatatgctcagcaaaggctcactgggcatgctgccatgactgaaactttcctctgcccccttcctcttccttgggagctcagagtgcccaggcggaagaagtgtgggctcagtctgtatcacatatgtgtccctggcagctacactgggggagaagtcttcttggccagctccccacatggtgccagccaccaggaacagagaaccacaaggtacaagtcactggatgtgctgaagcttcaagagagttccatgcctaaagagataacccctaggaacagcctggtggctcaggtttagctgctgccttggctgtccaccccaccaagaatggccttagagactttgggggcaccatgaatgcctcacccaggtcccaccgaggccccctgggtacaggagccagccaatggagccatctccacaactgcaactgcagggagatttgcaaccttattaagtgccttccaagaaggtgtggctagctgtgcaatacagttagcagaggattcctctgaggttgtttgccttcctaatttttatttctctgtatttttttaaactttataaaatgtgtgcatactacattttataaaacaattgggaaaagatgccaaact

SEQ ID NO: 20645 - protein, 97 aa, Homo sapiens
MEACTQPYCPEEPQDPQPSLPGIAQHRGCSWAAGSLGQVLSPACPLPGNRLGAITECNQPFGLRGSWVRPVTAGCPHFPDNLHDSAEGAIILLEKEI

SEQ ID NO: 20646 - DNA, 2035 bp, Homo sapiens
ctctcacacatgccctccctcgatggcccccagctcttgtaggacaagccctcatggcagagctagatggcaccctaggggccatacaggtgcgtgcactccttgcctcgcggatgaggaagatgagcccagaggaggagctgacatggctgagtggccaggtgggatctggagcctagtgtccttgccgtctggacccctcccagcatatcatgctgtgtcctactaaggctcccaaaatggggacaaacttttcatctttcagcttctcccagtgcaccttcttgctgcctaagccctgactctctgcttaggtttcaaaaaatgagacaactcatgagagaaaagaaaatggtcagatccgcaatgcatggaaaaatatctctttatgtgtgtcatctcctcaagactcccaacaaagcctatgccagcctctctcttacagaggaacaaacagaggccaggaggttacgtggctcgtccaaggctagacagcattaaaatgtggtggcaccaagagtcaacctggaccaggcgtcaaaactcaagctgttctacttttaccttctcctaatcatgtacagtgattattcatattgcaaactcgcagctttagtcttactggaggggtgacacctggattacgggacagctaccacagtagaagagatcaaattgcccttaaaaatctccagtctgatgtcacagaggcaaaatctgacttcaccaaggagaccctggcatcacaaaacacaaaaatgatttcatccatagtcatctcccagatgattgatgagaataagtcaagagaaaacagggcctccttgcccctaccgtgtgccattgctcagtctcgtgcacatcacgccaagcaatctctggctaaccgcagcggagtcaacattcacagagcatttgcgttacttccgggcagattaggaatcccggcaccgtcagatgagcgaggacctgaggcagagctgccgcccaaagaggagagaccctgtgggggcccccgcagagggtttgcatccatcaccatcacggccagacgcgtgggccccccagcccgcgccctggtgtgggggactgctggggactctctgtgccccaagtgcagggctgaggacacactgttccaggcgcccccggctctggccaatggcgcccatccaggtcggcatcagagatcttttgcctgcacagagttctccagaaacagctccgtggtgcggctgaaggttcccgaggcccacactgggttgtgtgagagacgcaagtactgggtcacccatgcagacgacaaagagaccagtttttctccagacaccccactgtcaggaaagagcccgctggtgttcagttcctgtgtccacctcagggtgtctcagcagtgtccagattcaatctattacgtagacaagtctctctccgtccccattgagccacctcaaattgccagccccaaaatgcacagatccgtcctgtcgctcaacctcaattgtagttcccacagattaacagcagatggagtagatggcctagtgaacagagagccaataagcgaagccctgaagcaggagctcctggagggagaccaggacctcgtaggccagcgctggaacccaggtttacaagaaagtcacttgaaggaaaccccatcgttgaggcgggtgcatttggggaccggcgcttgtccttggagtggttcttttccattggaaaacacagaattggcaaatgtgggagctaaccaagtcactgtaagaaaaggggaaaaggaccatacaactcattgtcacgccagcgatcatgccaaccaactgtccattcacattcctggctggagttacagggcagacttattacaagaaggacaacataagcagctatcaatgttccaaagataaatcccactttagtggttaaagagattgctcaagctaagcacttcgtcttccttattgatgatgattccagaaatacaccactgcattgttgtatgttaccccagttaaagcacatcctcattttt

SEQ ID NO: 20647 - protein, 383 aa, Homo sapiens
MISSIVISQMIDENKSRENRASLPLPCAIAQSRAHHAKQSLANRSGVNIHRAFALLPGRLGIPAPSDERGPEAELPPKEERPCGGPRRGFASITITARRVGPPARALVWGTAGDSLCPKCRAEDTLFQAPPALANGAHPGRHQRSFACTEFSRNSSVVRLKVPEAHTGLCERRKYWVTHADDKETSFSPDTPLSGKSPLVFSSCVHLRVSQQCPDSIYYVDKSLSVPIEPPQIASPKMHRSVLSLNLNCSSHRLTADGVDGLVNREPISEALKQELLEGDQDLVGQRWNPGLQESHLKETPSLRRVHLGTGACPWSGSFPLENTELANVGANQVTVRKGEKDHTTHCHASDHANQLSIHIPGWSYRADLLQEGQHKQLSMFQR

SEQ ID NO: 20648 - DNA, 566 bp, Homo sapiens
aggctggaaggtggaagcctgactcattctgagcctagccacagaggtaaactccggacatttttttctttcatgtcgccaaatacatccttgtcattaaaagacctttgaaactgagtaaaatggctttgaaacctcagtagaatatgctcaaactgtctggagaaggattacgggacagctaccacagtagaagagatcaaattgcccttaaaaatctccagtctgatgtcacagaggcaaaatctgacttcaccaaggtttagagcttgtccctgggcgtgcgctagaaggctgccataagatgatgaaacactccagggactgccctgctgccctgtgactgtggctgccgagaccctggcatcacaaaacacaaaaatgatttcatccatagtcatctcccagatgattgatgagaataagtcaagagaaaacagggcctccttgcccctaccgtgtgccattgctcagtctcgtgcacatcacgccaagcaatctctggctaaccgcagcggagtcaacattcacagagcatttgcgttacttccgggcagattaggaat

SEQ ID NO: 20649 - protein, 39 aa, Homo sapiens
MLKLSGEGLRDSYHSRRDQIALKNLQSDVTEAKSDFTKV

SEQ ID NO: 20650 - DNA, 3086 bp, Homo sapiens
gagattcatcttagatgctgcgtacgtacaccagtcagttcttcctttttatttctggctagtcattcgttgtcaaggtagcatggtaaccaacgcctgtagcctggatgcccagaggccctcgatctgtcctgaggattttggaacacagaccagctgggcatttttgtgcatgcaagacctgccttggcaatgatcttaagatgtcactgtagcgtttacatcttttatttcaagatttaaataactaggaagtagctaatgtaattcactgctgagaagaaaggcgagctcctagattcctttccaaagcgatctcctcctaatgaacttctctggactagggaagagagaagcccctcccattcgcttctactggggcttgttaggccatcgccttgggggccggctgatcagcggcagccagcagccggcggcttcggcaggcaggaacaaggacagcctgtggctactgcagccccactgcccggccatgcttcatgatgggggagagtgccttgggaggaatatacaggcaaatcatgttagcatcacagagcccacttaattccgtatgggttggtatttggggaagaaatcgaggacgaattggtgttggacccaaagctgggcagggaccagtgtgcatggcaaggttttaatgccagtaagtttttcagggtgattttttttctgtccctgagtcagtggaatagaatggaaatgccatgtctagctactttagggagcacagtgtgaagaagacagcctcctctaagctagcactgtttgtgtaatatgtggtccttagacattaaaatgaagccctttgtcaccaactgtagagccccccaaaacaccctcatttggtgtttttgttccattttaaaccatgaatggcatccgctccctccagtactgatgtgaggtttttctgtgttggatcaaaaccaaatgctgttttatgtcaacgtaaggaaggaaactagcaaatgcatgaggtcaatctccatggcacacttccaccccaggggctgtacgagaggaaaaaaatgtgcttcatgtcccaaccaaaagcattctctgtctgaggactgttgcccaagtgtgaagtaggagactcgtgcaattcaaaggcacctatgtgatgcccatgtggagcccttttcttagccaggcacgacaggtatggagccggctctgggaagtgggatctagaatgacaacccttggcacagggctaaggagctttaggagtgatgaaatctcattgtaccactgcaaacagaagctgcatccctgcctgggaaggattaggtcgcctcctaggcaggagcaaacatttggtggaaaggactaggaggttggctgcttgctcttctctttcagcagtgacatctccaccctgcctgtcccacctctccagaaaggtaggtctgggtactaaagctcaagtggactagaggctcccaaagcttctccccatgccatctccccattggctgctgggttcagtggtggccgccccttgggtaccaggggctcctggttctacaatgagaagctgcaggttacagctgtaagttttgtcctcatgttaacccccttatgctgtctcctccaataatgcatgtggtttggtctctacaggactcccagaggcctatggactggagctattaacatcctgcagatgggagccactctctcactgtgatcaccaaggtacccagggcctccggaggccacaaagaatggataattgcaacccacaggtctccttcagattttccccaagcccttctggtcagcaaatgctctatggtggggagtggtgtgaggccttggtccatttcattgctgacattagccctgcaccagcgggagaacgtttcttcctttaatcaccccaagattagcctgcagttgcctctttctgttggatatttgaataacaagcttgatgaggccacttaactccctccaattacagctaaagatttcctagatgaaagaccttgatccactgcctttcatgattcagcactggattttctgttccatgcagccttctattggaataattttgtgaaatgaaggcaacaaagtattgttttcttaatcaaagagaacttcataaaaattgtgctccttgactgctaatttgtcctgcattgttaccgatgcttttcttatgatttttgttttgcactgaacagccccctggctgagagaaaaccccgaagcagttaagataccaggaaaggaagacttgaaaattgtgagtctttctcagtagaggaggcagtgtgctgttatatgctgatgcagctccttgtcttggactcataactgacagaacagcatgtggacctcaccgctccttggacttcgagtggcgctactctaacgctgagtcctgacctggatccctgtttgcttgcctagacctaaggcggtggtgcagaccttcccccaccccacataccatcgccttctggaatgtggctttgtggaactgaggctgagacaatcacagtgccccattcttctggtcatgtgacaggtctggacctggtcatgtggcaaagtcgaatctaagtcacatcaaagcagggagagttaaagcaaatcttttctctcttgttgtggagctggaatatgagcccagaagcttccagaacacatggtcctgccctcataaagaagctcaagtgagggaacaaaatcgacttaggtagcagcgagcatggatggggcctggctacatcaagttctcagatcctgttgtccccacccaccccctgtaacttgccaattttatccatcaagcatcctctcctctctcccaacttgtctgagttctgtttctgtcattgtcaccaagagagctttgatgagtaagaaatcccaacattccacgggagtcttggtggtttaaatttttaagtgagtcctcacttgttaaagtcttattcctgttagagggcacttccatagtccagaaggtggggaattcctataggtgacctgtggtctctctaagcaatttgaccaggactatttaataaaatattttaaaaatg

SEQ ID NO: 20651 - protein, 80 aa, Homo sapiens
MNFSGLGKREAPPIRFYWGLLGHRLGGRLISGSQQPAASAGRNKDSLWLLQPHCPAMLHDGGECLGRNIQANHVSITEPT

SEQ ID NO: 20652 - DNA, 1875 bp, Homo sapiens
atgcgccttgctgctgcctcccagctgggagcctctgccggagccgccgcctccgtcgcacagtcgggaggctttgcagtgaacttcgaccacttccagatccttcgggccattgggaagggcagctttggcaaggtgtgcattgtgcagaagcgggacacggagaagatgtacgccatgaagtacatgaacaagcagcagtgcatcgagcgcgacgaggtccgcaacgtcttccgggagctggagatcctgcaggagatcgagcacgtcttcctggtgaacctctggtactccttccaggacgaggaggacatgttcatggtcgtggacctgctactgggcggggacctgcgctaccacctgcagcagaacgtgcagttctccgaggacacggtgaggctgtacatctgcgagatggcactggctctggactacctgcgcggccagcacatcatccacagagatgtcaagcctgacaacattctcctggatgagagaggacatgcacacctgaccgacttcaacattgccaccatcatcaaggacggggagcgggcgacggcattagcaggcaccaagccgtacatggctccggagatcttccactcttttgtcaacggcgggaccggctactccttcgaggtggactggtggtcggtgggggtgatggcctatgagctgctgcgaggatggaggccctatgacatccactccagcaacgccgtggagtccctggtgcagctgttcagcaccgtgagcgtccagtatgtccccacgtggtccaaggagatggtggccttgctgcggaagctcctcactgtgaaccccgagcaccggctctccagcctccaggacgtgcaggcagccccggcgctggccggcgtgctgtgggaccacctgagcgagaagagggtggagccgggcttcgtgcccaacaaaggccgtctgcactgcgaccccacctttgagctggaggagatgatcctggagtccaggcccctgcacaagaagaagaagcgtctggccaagaacaagtcccgggacaacagcagggacagctcccagtccgccccacggagcaagtccaagccatccacccagaggcaagggagctgggccttggcatcctcgggcttgggagaatgactatcttcaagactgcctcgatgccatccagcaagacttcgtgatttttaacagagaaaagctgaagaggagccaggacctcccgagggagcctctccccgcccctgagtccagggatgctgcggagcctgtggaggacgaggcggaacgctccgccctgcccatgtgcggccccatttgcccctcggccgggagcggctaggccgggacgcccgtggtcctcaccccttgagctgctttggagactcggctgccagagggagggccatgggccgaggcctggcattcacgttcccacccagcctggctggcggtgcccacagtgccccggacacatttcacacctcaggctcgtggtggtgcaggggacaagaggctgtgggtgcaggggacacctgtggagggcatttcccgtgggcccccgagacccgcctagatggaggaagcgctgctgggcgccctcttaccgctcacggggagctggggccatggatgggacaggagtctttgtccctgctcagcccggaggctgtgcacggccctcgtcacaaggtgacccttgcagcacaggccgcgggtgccccaggctcggctcaggtcttggaggtcaagggcatgggttggggtagtgggtggggaggtgaatgttttctagagattcaaactgctccagcaatttctgtagttttcacctctgagaattacaatgtgagaaccgctcgatgttgc

SEQ ID NO: 20653 - protein, 381 aa, Homo sapiens
MRLAAASQLGASAGAAASVAQSGGFAVNFDHFQILRAIGKGSFGKVCIVQKRDTEKMYAMKYMNKQQCIERDEVRNVFRELEILQEIEHVFLVNLWYSFQDEEDMFMVVDLLLGGDLRYHLQQNVQFSEDTVRLYICEMALALDYLRGQHIIHRDVKPDNILLDERGHAHLTDFNIATIIKDGERATALAGTKPYMAPEIFHSFVNGGTGYSFEVDWWSVGVMAYELLRGWRPYDIHSSNAVESLVQLFSTVSVQYVPTWSKEMVALLRKLLTVNPEHRLSSLQDVQAAPALAGVLWDHLSEKRVEPGFVPNKGRLHCDPTFELEEMILESRPLHKKKKRLAKNKSRDNSRDSSQSAPRSKSKPSTQRQGSWALASSGLGE

SEQ ID NO: 20654 - DNA, 2017 bp, Homo sapiens
actttgcagttagagaggcgctcacctgtgccgcccgagtgcgagtgaggctcctgccccacaggtggcggggcccggccgctcagaggctcagtctccttggtgaccgcgcggtgtccatcctctgctcacccatgtgcgctggaggcagggccaggccgttgtgcaaagacctgccctgccaggaacgagtgcgctgctgagtcctgtagataaagccgccaaccccggggactggtgtctcctgagtgaccgtgcagccgtgggcgccatagaaagcagagaaggcagtgaacttcgaccacttccagatccttcgggccattgggaagggcagctttggcaaggtgtgcattgtgcagaagcgggacacggagaagatgtacgccatgaagtacatgaacaagcagcagtgcatcgagcgcgacgaggtccgcaacgtcttccgggagctggagatcctgcaggagatcgagcacgtcttcctggtgaacctctggtactccttccaggacgaggaggacatgttcatggtcgtggacctgctactgggcggggacctgcgctaccacctgcagcagaacgtgcagttctccgaggacacggtgaggctgtacatctgcgagatggcactggctctggactacctgcgcggccagcacatcatccacagagatgtcaagcctgacaacattctcctggatgagagaggacatgcacacctgaccgacttcaacattgccaccatcatcaaggacggggagcgggcgacggcattagcaggcaccaagccgtacatggctccggagatcttccactcttttgtcaacggcgggaccggctactccttcgaggtggactggtggtcggtgggggtgatggcctatgagctgctgcgaggatggaggccctatgacatccactccagcaacgccgtggagtccctggtgcagctgttcagcaccgtgagcgtccagtatgtccccacgtggtccaaggagatggtggccttgctgcggaagctcctcactgtgaaccccgagcaccggctctccagcctccaggacgtgcaggcagccccggcgctggccggcgtgctgtgggaccacctgagcgagaagagggtggagccgggcttcgtgcccaacaaaggccgtctgcactgcgaccccacctttgagctggaggagatgatcctggagtccaggcccctgcacaagaagaagaagcgtctggccaagaacaagtcccgggacaacagcagggacagctcccagtccgagaatgactatcttcaagactgcctcgatgccatccagcaagacttcgtgatttttaacagagaaaagctgaagaggagccaggacctcccgagggagcctctccccgcccctgagtccagggatgctgcggagcctgtggaggacgaggcggaacgctccgccctgcccatgtgcggccccatttgcccctcggccgggagcggctaggccgggacgcccgtggtcctcaccccttgagctgctttggagactcggctgccagagggagggccatgggccgaggcctggcattcacgttcccacccagcctggctggcggtgcccacagtgccccggacacatttcacacctcaggctcgtggtggtgcaggggacaagaggctgtgggtgcaggggacacctgtggagggcatttcccgtgggcccccgagacccgcctagatggaggaagcgctgctgggcgccctcttaccgctcacggggagctggggccatggatgggacaggagtctttgtccctgctcagcccggaggctgtgcacggccctcgtcacaaggtgacccttgcagcacaggccgcgggtgccccaggctcggctcaggtcttggaggtcaagggcatgggttggggtagtgggtggggaggtgaatgttttctagagattcaaactgctccagcaatttctgtagttttcacctctgagaattacaatgtgagaaccgctcgatgttgc

SEQ ID NO: 20655 - protein, 369 aa, Homo sapiens
MYAMKYMNKQQCIERDEVRNVFRELEILQEIEHVFLVNLWYSFQDEEDMFMVVDLLLGGDLRYHLQQNVQFSEDTVRLYICEMALALDYLRGQHIIHRDVKPDNILLDERGHAHLTDFNIATIIKDGERATALAGTKPYMAPEIFHSFVNGGTGYSFEVDWWSVGVMAYELLRGWRPYDIHSSNAVESLVQLFSTVSVQYVPTWSKEMVALLRKLLTVNPEHRLSSLQDVQAAPALAGVLWDHLSEKRVEPGFVPNKGRLHCDPTFELEEMILESRPLHKKKKRLAKNKSRDNSRDSSQSENDYLQDCLDAIQQDFVIFNREKLKRSQDLPREPLPAPESRDAAEPVEDEAERSALPMCGPICPSAGSG

SEQ ID NO: 20656 - DNA, 2128 bp, Homo sapiens
ctacggggcgggttccaccgcccagaagagcgcacggcgggcgctgccggccccgagcgctcccgctaccactgccgctcccggccctgccggccggccatgccccgagttccggctgccgcgcgcacccagacccggcgatgaggagtggcgccgagcgcaggggcagcagcgccgcggcgtccccgggctcgccgccccccggccgcgcgcgccccgccggctccgacgcgccctcggccctgccgccgcccgctgctggccagccccgggcccgggactcgggcgatgtccgctcgcagccgcgccccctgtttcagtggagcaagtggaagaagaggatgggctcgtccatgtcggcggccaccgcgcggaggccggtgtttgacgacaaggaggacgtgaacttcgaccacttccagatccttcgggccattgggaagggcagctttggcaaggtgtgcattgtgcagaagcgggacacggagaagatgtacgccatgaagtacatgaacaagcagcagtgcatcgagcgcgacgaggtccgcaacgtcttccgggagctggagatcctgcaggagatcgagcacgtcttcctggtgaacctctggtactccttccaggacgaggaggacatgttcatggtcgtggacctgctactgggcggggacctgcgctaccacctgcagcagaacgtgcagttctccgaggacacggtgaggctgtacatctgcgagatggcactggctctggactacctgcgcggccagcacatcatccacagagatgtcaagcctgacaacattctcctggatgagagaggacatgcacacctgaccgacttcaacattgccaccatcatcaaggacggggagcgggcgacggcattagcaggcaccaagccgtacatggctccggagatcttccactcttttgtcaacggcgggaccggctactccttcgaggtggactggtggtcggtgggggtgatggcctatgagctgctgcgaggatggaggccctatgacatccactccagcaacgccgtggagtccctggtgcagctgttcagcaccgtgagcgtccagtatgtccccacgtggtccaaggagatggtggccttgctgcggaagctcctcactgtgaaccccgagcaccggctctccagcctccaggacgtgcaggcagccccggcgctggccggcgtgctgtgggaccacctgagcgagaagagggtggagccgggcttcgtgcccaacaaaggccgtctgcactgcgaccccacctttgagctggaggagatgatcctggagtccaggcccctgcacaagaagaagaagcgtctggccaagaacaagtcccgggacaacagcagggacagctcccagtccgagaatgactatcttcaagactgcctcgatgccatccagcaagacttcgtgatttttaacagagaaaagctgaagaggagccaggacctcccgagggagcctctccccgcccctgagtccagggatgctgcggagcctgtggaggacgaggcggaacgctccgccctgcccatgtgcggccccatttgcccctcggccgggagcggctaggccgggacgcccgtggtcctcaccccttgagctgctttggagactcggctgccagagggagggccatgggccgaggcctggcattcacgttcccacccagcctggctggcggtgcccacagtgccccggacacatttcacacctcaggctcgtggtggtgcaggggacaagaggctgtgggtgcaggggacacctgtggagggcatttcccgtgggcccccgagacccgcctagatggaggaagcgctgctgggcgccctcttaccgctcacggggagctggggccatggatgggacaggagtctttgtccctgctcagcccggaggctgtgcacggccctcgtcacaaggtgacccttgcagcacaggccgcgggtgccccaggctcggctcaggtcttggaggtcaagggcatgggttggggtagtgggtggggaggtgaatgttttctagagattcaaactgctccagcaatttctgtagttttcacctctgagaattacaatgtgagaaccgctcgatgttgc

SEQ ID NO: 20657 - protein, 486 aa, Homo sapiens; identical to SEQ ID NO: 2617

SEQ ID NO: 20658 - DNA, 2157 bp, Homo sapiens
atccgtttttccgcgcccgcggccttgaaggggtggtggtcgacgggcaagtagagaccgcgagggtctggaggggcgaccggcctggcacagaggggaaggaagagagcgggatgctaagtgccgtctggggagccggagggcccggggcgggcggggctgctcgaggacagccgagcagaaaagaattgctgctgaggcaccacctttggagcggtcctcgctgcctgtccttcccgctgggctcactccccgcgcgtcctcaggcgtcctgccgaacagccctgtgccctccaggtgtgcattgtgcagaagcgggacacggagaagatgtacgccatgaagtacatgaacaagcagcagtgcatcgagcgcgacgaggtccgcaacgtcttccgggagctggagatcctgcaggagatcgagcacgtcttcctggtgaacctctggtactccttccaggacgaggaggacatgttcatggtcgtggacctgctactgggcggggacctgcgctaccacctgcagcagaacgtgcagttctccgaggacacggtgaggctgtacatctgcgagatggcactggctctggactacctgcgcggccagcacatcatccacagagatgtcaagcctgacaacattctcctggatgagagaggacatgcacacctgaccgacttcaacattgccaccatcatcaaggacggggagcgggcgacggcattagcaggcaccaagccgtacatgggtgagcccgagctggggttccagatgggagctggcttcctccaggtgggaaggacaagacctcggtggcttctctgtcccaccctggaggcagcctggtctcgggatgtggcctcaaggtgccggccctgtgcccacgggtccgggctgtgaccccgtggcagctgtttttccttctttctgtcggaaagctccggagatcttccactcttttgtcaacggcgggaccggctactccttcgaggtggactggtggtcggtgggggtgatggcctatgagctgctgcgaggatggaggccctatgacatccactccagcaacgccgtggagtccctggtgcagctgttcagcaccgtgagcgtccagtatgtccccacgtggtccaaggagatggtggccttgctgcggaagctcctcactgtgaaccccgagcaccggctctccagcctccaggacgtgcaggcagccccggcgctggccggcgtgctgtgggaccacctgagcgagaagagggtggagccgggcttcgtgcccaacaaaggccgtctgcactgcgaccccacctttgagctggaggagatgatcctggagtccaggcccctgcacaagaagaagaagcgtctggccaagaacaagtcccgggacaacagcagggacagctcccagtccgagaatgactatcttcaagactgcctcgatgccatccagcaagacttcgtgatttttaacagagaaaagctgaagaggagccaggacctcccgagggagcctctccccgcccctgagtccagggatgctgcggagcctgtggaggacgaggcggaacgctccgccctgcccatgtgcggccccatttgcccctcggccgggagcggctaggccgggacgcccgtggtcctcaccccttgagctgctttggagactcggctgccagagggagggccatgggccgaggcctggcattcacgttcccacccagcctggctggcggtgcccacagtgccccggacacatttcacacctcaggctcgtggtggtgcaggggacaagaggctgtgggtgcaggggacacctgtggagggcatttcccgtgggcccccgagacccgcctagatggaggaagcgctgctgggcgccctcttaccgctcacggggagctggggccatggatgggacaggagtctttgtccctgctcagcccggaggctgtgcacggccctcgtcacaaggtgacccttgcagcacaggccgcgggtgccccaggctcggctcaggtcttggaggtcaagggcatgggttggggtagtgggtggggaggtgaatgttttctagagattcaaactgctccagcaatttctgtagttttcacctctgagaattacaatgtgagaaccgctcgatgttgc

SEQ ID NO: 20659 - protein, 257 aa, Homo sapiens
MWPQGAGPVPTGPGCDPVAAVFPSFCRKAPEIFHSFVNGGTGYSFEVDWWSVGVMAYELLRGWRPYDIHSSNAVESLVQLFSTVSVQYVPTWSKEMVALLRKLLTVNPEHRLSSLQDVQAAPALAGVLWDHLSEKRVEPGFVPNKGRLHCDPTFELEEMILESRPLHKKKKRLAKNKSRDNSRDSSQSENDYLQDCLDAIQQDFVIFNREKLKRSQDLPREPLPAPESRDAAEPVEDEAERSALPMCGPICPSAGSG

SEQ ID NO: 20660 - DNA, 247 bp, Homo sapiens
tgctgccacacactttccccaggtcctcctgcactcagcagcagattttccaggctccaggcaccatgtgtcggtcagatgaggccaggcacgtaatcagctcacttgaagagaccctgtgcagcaccctgtgcataccaccgtgtgcacacacatgcacggagacacagacacatgcacagagctgcacccacaggcacatgcatgcacacacagacacacacacgatgtgacacatgcacacacg

SEQ ID NO: 20661 - protein, 55 aa, Homo sapiens
MCRSDEARHVISSLEETLCSTLCIPPCAHTCTETQTHAQSCTHRHMHAHTDTHTM

SEQ ID NO: 20662 - DNA, 997 bp, Homo sapiens
gcggccttgaaggggtggtggtcgacgggcaagtagagaccgcgagggtctggaggggcgaccggcctggcacagaggggaaggaagagagcgggatgctaagtgccgtctggggagccggagggcccggggcgggcggggctgctcgaggacagccgagcagaaaagaattgctgctgaggcaccacctttggagcggtcctcgctgcctgtccttcccgctgggctcactccccgcgtctctcctggggcttcctggagccacttcccacaggagctgcttgtccccaaatcttgcctcaggacttgctgccaggggaacgcagactcagagcgtcctctttggagaagtaaggctgcctctggacggaggagtgaggggggcgaggaaacgcagtcttctgagagcacaccccaggactgggattttgccaggaagatgtggaatggtgtggaaagacaagaagctgcagccttcaggctgccatgaaaaagctgggggtgtgttctgtggcccatcaagagggggtgtgtaatgaattgttaatgaatttctcagatgagccaaagtggtgaacttgtctcagtacccagggagactcagactcatccccagctcttggcctccattttcccagctgctgtgattggagtgggtccctggaattcatatgctggaaatttggtccaggtgtgggtgtgttgggaggtggggtttaaggtgtggttaggccattaagagattaatgctgctctttagggactgggctaattcttgagggagtgagtggcttcccgctctctccggacagcattaactgccacaggttgggttattataacatgaggccacccctcatgttttgtcccactcccccttccacttcgcttctgtgtcatgatgcaggacaaaagcaccaccagaaactgttgccgttctcttgggcttcccagccttcaaaactgagtcaagtaaacatctttcctgtataaatca

SEQ ID NO: 20663 - protein, 146 aa, Homo sapiens
MLSAVWGAGGPGAGGAARGQPSRKELLLRHHLWSGPRCLSFPLGSLPASLLGLPGATSHRSCLSPNLASGLAARGTQTQSVLFGEVRLPLDGGVRGARKRSLLRAHPRTGILPGRCGMVWKDKKLQPSGCHEKAGGVFCGPSRGGV

SEQ ID NO: 20664 - DNA, 555 bp, Homo sapiens
ggggtggtggtcgacgggcaagtagagaccgcgagggtctggaggggcgaccggcctggcacagaggggaaggaagagagcgggatgctaagtgccgtctggggagccggagggcccggggcgggcggggctgctcgaggacagccgagcagaaaagaattgctgctgaggcaccacctttggagcggtcctcgctgcctgtccttcccgctgggctcactccccgcgtctctcctggggcttcctggagccacttcccacaggagctgcttgtccccaaatcttgcctcaggacttgctgccaggggaacgcagactcagagcgtcctctttggagaagtaaggctgcctctggacggaggagtgaggggggcgaggaaacgcagtcttctgagagcacaccccaggactgggattttgccaggaagatgtggaatggtgtggaaagacaagaagctgcagccttcaggctgccatgaaaaagctgggggtgtgttctgtggcccatcaagagggggtgtgtaatgaattgttaatgaatttctcagatgagcc

SEQ ID NO: 20665 - protein, 146 aa, Homo sapiens; identical to SEQ ID NO: 20663

SEQ ID NO: 20666 - DNA, 639 bp, Homo sapiens
cgcacgcggccaacggtagcatccgtttttccgcgcccgcggccttgaaggggtggtggtcgacgggcaagtagagaccgcgagggtctggaggggcgaccggcctggcacagaggggaaggaagagagcgggatgctaagtgccgtctggggagccggagggcccggggcgggcggggctgctcgaggacagccgagcagaaaagaattgctgctgaggcaccacctttggagcggtcctcgctgcctgtccttcccgctgggctcactccccgcgtctctcctggggcttcctggagccacttcccacaggagctgcttgtccccaaatcttgcctcaggacttgctgccaggggaacgcagactcagagcgtcctctttggagaagtaaggctgcctctggacggaggagtgaggggggcgaggaaacgcagaagctgaaagcacaaccagtaccttctcaggagcgtggggaggccagccacccgggcagagcaaggagagaatgaggagtgacatgggtgttgccgtgagtggcgaaggggatggaagatttcagcacgatgctatttctaacaagtttcagcattccagtatctcttttcacaaataaaacatttactaaccatttgagcgta

SEQ ID NO: 20667 - protein, 102 aa, Homo sapiens
MLSAVWGAGGPGAGGAARGQPSRKELLLRHHLWSGPRCLSFPLGSLPASLLGLPGATSHRSCLSPNLASGLAARGTQTQSVLFGEVRLPLDGGVRGARKRRS

SEQ ID NO: 20668 - DNA, 533 bp, Homo sapiens
ggggtggtggtcgacgggcaagtagagaccgcgagggtctggaggggcgaccggcctggcacagaggggaaggaagagagcgggatgctaagtgccgtctggggagccggagggcccggggcgggcggggctgctcgaggacagccgagcagaaaagaattgctgctgaggcaccacctttggagcggtcctcgctgcctgtccttcccgctgggctcactccccgcgtctctcctggggcttcctggagccacttcccacaggagctgcttgtccccaaatcttgcctcaggacttgctgccaggggaacgcagactcagagcgtcctctttggagaagaagctgaaagcacaaccagtaccttctcaggagcgtggggaggccagccacccgggcagagcaaggagagaatgaggagtgacatgggtgttgccgtgagtggcgaaggggatggaagatttcagcacgatgctatttctaacaagtttcagcattccagtatctcttttcacaaataaaacatttactaacc

SEQ ID NO: 20669 - protein, 144 aa, Homo sapiens
MLSAVWGAGGPGAGGAARGQPSRKELLLRHHLWSGPRCLSFPLGSLPASLLGLPGATSHRSCLSPNLASGLAARGTQTQSVLFGEEAESTTSTFSGAWGGQPPGQSKERMRSDMGVAVSGEGDGRFQHDAISNKFQHSSISFHK

SEQ ID NO: 20670 - DNA, 1020 bp, Homo sapiens
cgtaccggcgtctccatggcgaccgcgttggctgggtggcctccattgtcgggctgctgctctcagcggcggggctcgccagcgcttcagtgggcggggacgcggcaggtgactccagaccaaggaggatgagctgctgtccctggaagagaacggatggagggaagcagctcctacgaagttccctctgtggctgctgctgatctggaggagggtgctggtcagactaggagcttgcctgccaccccctccaaagatgttcacaagggtgttggaggcatcatcttttcctcctcaccgattttagacttgagtgaaagtggtctgtgccgtttggaggaggtctttagaatccccagccttcaacaattgcatctgcaaaggaatgccctgtgtgtgattcctcaagatttctttcagttgcttccgaacctgacttggctggacctccggtacaatagaattaaagcgcttccttctgggattggagctcaccagcatttgaaaactttgcttttagaaagaaatcctatcaaaatgttacctgtggagctggctcgttgtgcagaagggattggtggctatccagcgcttcctgcggatgtgggcagtagaacactctctccccagaaatccaacttctcaagaggctccaccggttagagagatgaccctccgtgacctcccgagcccaggactggagttgtctggagaccacgcgtctaaccaaggagctgtgaacgctcaggacccagagggggctgtgatgaaagagaaggccagctttctcccacctgtggaaaagccagacctgagtgaactcaggaagtctgcggactcctcagagaactggcccagcgaggaggagatcaggcgcttttggaagctgaggcaggagattgttgagcacgtgaaggcagacgttctgggagatcagctcttgacgagggaattacctccaaatctcaaggcggccttgaacattgagaaagaactaccaaagccaagacacgttttcag

SEQ ID NO: 20671 - protein, 168 aa, Homo sapiens
MEGSSSYEVPSVAAADLEEGAGQTRSLPATPSKDVHKGVGGIIFSSSPILDLSESGLCRLEEVFRIPSLQQLHLQRNALCVIPQDFFQLLPNLTWLDLRYNRIKALPSGIGAHQHLKTLLLERNPIKMLPVELARCAEGIGGYPALPADVGSRTLSPQKSNFSRGSTG

SEQ ID NO: 20672 - DNA, 1721 bp, Homo sapiens
cgtaccggcgtctccatggcgaccgcgttggctgggtggcctccattgtcgggctgctgctctcagcggcggggctcgccagcgcttcagtgggcggggacgcggcaggtgactccagaccaaggaggatgagctgctgtccctggaagagaacggatggagggaagcagctcctacgaagttccctctgtggctgctgctgatctggaggagggtgctggtcagactaggagcttgcctgccaccccctccaaagatgttcacaagggtgttggaggcatcatcttttcctcctcaccgattttagacttgagtgaaagtggtctgtgccgtttggaggaggtctttagaatccccagccttcaacaattgcatctgcaaaggaatgccctgtgtgtgattcctcaagatttctttcagttgcttccgaacctgacttggctggacctccggtacaatagaattaaagcgcttccttctgggattggagctcaccagcatttgaaaactttgcttttagaaagaaatcctatcaaaatgttacctgtggagctggggagcgtaaccacgctgaaagcactgaacctaagacactgccctctggaattccctcctcagctcgttgtgcagaagggattggtggctatccagcgcttcctgcggatgtgggcagtagaacactctctccccagaaatccaacttctcaagaggctccaccggttagagagatgaccctccgtgacctcccgagcccaggactggagttgtctggagaccacgcgtctaaccaaggagctgtgaacgctcaggacccagagggggctgtgatgaaagagaaggccagctttctcccacctgtggaaaagccagacctgagtgaactcaggaagtctgcggactcctcagagaactggcccagcgaggaggagatcaggcgcttttggaagctgaggcaggagattgttgagcacgtgaaggcagacgttctgggagatcagctcttgacgagggaattacctccaaatctcaaggcggccttgaacattgagaaagaactaccaaagccaagacacgttttcagaaggaagacagcctcctccaggagcatcttacccgacctcttgtcaccgtaccaaatggcgatccgagcaaaaagactggaagagagccgagcggcggcgctccgagagctccaggagaagcaggctctgatggagcagcagagacgagtattccaggccctgacacggtcatcagggaggttcattcttgtgttgctgtgactgccgccagtgccaccaccttgcgaggtgtgttggccgatggactcggtgtcctcagtgtcttctctgtcctccagctccactgaccacctggcttcacccctccctgggccccaggagtccggctggcatggaccacagccacagcacccccgtgcccctcacttggtggttggctttggccagcgggggcccccagcaggaggtcgaggaggaagggagagcgagggcctcgtctttactttcccggcttctttgtgagctgcctggagctggccgagtccagcctctccctccttctgggttccgacaatctctccttccctggtctgtcctgtgggcggctgcagcccggccctgactggcacagggctcttgcaccgcccctgtggctcacctgctccctccccaacatgaataaaccctcctgaagccac

SEQ ID NO: 20673 - protein, 375 aa, Homo sapiens
MEGSSSYEVPSVAAADLEEGAGQTRSLPATPSKDVHKGVGGIIFSSSPILDLSESGLCRLEEVFRIPSLQQLHLQRNALCVIPQDFFQLLPNLTWLDLRYNRIKALPSGIGAHQHLKTLLLERNPIKMLPVELGSVTTLKALNLRHCPLEFPPQLVVQKGLVAIQRFLRMWAVEHSLPRNPTSQEAPPVREMTLRDLPSPGLELSGDHASNQGAVNAQDPEGAVMKEKASFLPPVEKPDLSELRKSADSSENWPSEEEIRRFWKLRQEIVEHVKADVLGDQLLTRELPPNLKAALNIEKELPKPRHVFRRKTASSRSILPDLLSPYQMAIRAKRLEESRAAALRELQEKQALMEQQRRVFQALTRSSGRFILVLL

SEQ ID NO: 20674 - DNA, 1816 bp, Homo sapiens
cgtaccggcgtctccatggcgaccgcgttggctgggtggcctccattgtcgggctgctgctctcagcggcggggctcgccagcgcttcagtgggcggggacgcggcaggtgactccagaccaaggaggatgagctgctgtccctggaagagaacggatggagggaagcagctcctacgaagttccctctgtggctgctgctgatctggaggagggtgctggtcagactaggagcttgcctgccaccccctccaaagatgttcacaagggtgttggaggcatcatcttttcctcctcaccgattttagacttgagtgaaagtggtctgtgccgtttggaggaggtctttagaatccccagccttcaacaattgcatctgcaaaggaatgccctgtgtgtgattcctcaagatttctttcagttgcttccgaacctgacttggctggacctccggtacaatagaattaaagcgcttccttctgggattggagctcaccagcatttgaaaactttgcttttagaaagaaatcctatcaaaatgttacctgtggagctggggagcgtaaccacgctgaaagcactgaacctaagacactgccctctggaattccctcctcagctcgttgtgcagaagggattggtggctatccagcgcttcctgcggatgtgggcagtagaacactctctccccagaaatccaacttctcaagaggctccaccggttagagagatgaccctccgtgacctcccgagcccaggactggagttgtctggagaccacgcgtctaaccaaggagctgtgaacgctcaggacccagagggggctgtgatgaaagagaaggccagctttctcccacctgtggaaaagccagacctgagtgaactcaggaagtctgcggactcctcagagaactggcccagcgaggaggagatcaggcgcttttggaagctgaggcaggagattgttgagcacgtgaaggcagacgttctgggagatcagctcttgacgagggaattacctccaaatctcaaggcggccttgaacattgagaaagaactaccaaagccaagacacgttttcaggacaagggtccctaggaaacaggctctgcagagactacatgagagaaaaactcgaatcatgggcgtggtagggcgtgcgcctacacatatgggagaaggaagacagcctcctccaggagcatcttacccgacctcttgtcaccgtaccaaatggcgatccgagcaaaaagactggaagagagccgagcggcggcgctccgagagctccaggagaagcaggctctgatggagcagcagagacgagtattccaggccctgacacggtcatcagggaggttcattcttgtgttgctgtgactgccgccagtgccaccaccttgcgaggtgtgttggccgatggactcggtgtcctcagtgtcttctctgtcctccagctccactgaccacctggcttcacccctccctgggccccaggagtccggctggcatggaccacagccacagcacccccgtgcccctcacttggtggttggctttggccagcgggggcccccagcaggaggtcgaggaggaagggagagcgagggcctcgtctttactttcccggcttctttgtgagctgcctggagctggccgagtccagcctctccctccttctgggttccgacaatctctccttccctggtctgtcctgtgggcggctgcagcccggccctgactggcacagggctcttgcaccgcccctgtggctcacctgctccctccccaacatgaataaaccctcctgaagccac

SEQ ID NO: 20675 - protein, 383 aa, Homo sapiens
MEGSSSYEVPSVAAADLEEGAGQTRSLPATPSKDVHKGVGGIIFSSSPILDLSESGLCRLEEVFRIPSLQQLHLQRNALCVIPQDFFQLLPNLTWLDLRYNRIKALPSGIGAHQHLKTLLLERNPIKMLPVELGSVTTLKALNLRHCPLEFPPQLVVQKGLVAIQRFLRMWAVEHSLPRNPTSQEAPPVREMTLRDLPSPGLELSGDHASNQGAVNAQDPEGAVMKEKASFLPPVEKPDLSELRKSADSSENWPSEEEIRRFWKLRQEIVEHVKADVLGDQLLTRELPPNLKAALNIEKELPKPRHVFRTRVPRKQALQRLHERKTRIMGVVGRAPTHMGEGRQPPPGASYPTSCHRTKWRSEQKDWKRAERRRSESSRRSRL

SEQ ID NO: 20676 - DNA, 6425 bp, Homo sapiens
cgtaccggcgtctccatggcgaccgcgttggctgggtggcctccattgtcgggctgctgctctcagcggcggggctcgccagcgcttcagtgggcggggacgcggcaggtgactccagaccaaggaggatgagctgctgtccctggaagagaacggatggagggaagcagctcctacgaagttccctctgtggctgctgctgatctggaggagggtgctggtcagactaggagcttgcctgccaccccctccaaagatgttcacaagggtgttggaggcatcatcttttcctcctcaccgattttagacttgagtgaaagtggtctgtgccgtttggaggaggtctttagaatccccagccttcaacaattgcatctgcaaaggaatgccctgtgtgtgattcctcaagatttctttcagttgcttccgaacctgacttggctggacctccggtacaatagaattaaagcgcttccttctgggattggagctcaccagcatttgaaaactttgcttttagaaagaaatcctatcaaaatgttacctgtggagctggggagcgtaaccacgctgaaagcactgaacctaagacactgccctctggaattccctcctcagctcgttgtgcagaagggattggtggctatccagcgcttcctgcggatgtgggcagtagaacactctctccccagaaatccaacttctcaagaggctccaccggttagagagatgaccctccgtgacctcccgagcccaggactggagttgtctggagaccacgcgtctaaccaaggagctgtgaacgctcaggacccagagggggctgtgatgaaagagaaggccagctttctcccacctgtggaaaagccagacctgagtgaactcaggaagtctgcggactcctcagagaactggcccagcgaggaggagatcaggcgcttttggaagctgaggcaggagattgttgagcacgtgaaggcagacgttctgggagatcagctcttgacgagggaattacctccaaatctcaaggcggccttgaacattgagaaagaactaccaaagccaagacacgttttcagaaggaagacagcctcctccaggagcatcttacccgacctcttgtcaccgtaccaaatggcgatccgagcaaaaagactggaagagagccgagcggcggcgctccgagagctccaggagaagcaggctctgatggagcagcagagacgagagaaaagggcactgcaggagtggagagagcgagcccagaggatgaggaagaggaaggaagagctcagcaaactcctgcctccgcggaggagcatggtggcatcaaagattccctctgccacagatctgatagataacaggaaagtaccactgaatccgcctggaaaaatgaaaccaagcaaagagaaatcgccacaagcaagtaaagaaatgagtgccctgcaggagagaaatttagaagagaagataaaacagcacgtcctccaaatgcgtgagcaaagaagattccatggccaggccccactggaggagatgaggaaggctgccgaggatctggaaattgccacagagctacaggatgaagtattgaagctaaaattgggattaaccttgaacaaagatcgtcgacgggcggccctcactggaaacctttcgcttggcctgccggcagcacagcctcaaaatacattttttaacacaaaatatggagaatcaggaaatgttcgcagataccagtgacaccaggtggctggactgatggagacgtcttcagacaggagccgctcagtcttctttcccgggcgtcgcctcctgtgtggtgccggaagagcgccaggttcagtgttaccctgagggctgatttcgcgcagcctgttgttttccttagacaggtccacgtccctctcctgaggctgtggaagatttcagccgtattaaaagaaaggacactgtgagcacgtggtctcgccttcccttcttcctgcaggttcccgccaagccatgtgacagagtgctcacactcaggcacttgcctctctcctgtcctggagcccttgttacaaaagtactcacagctttccttcacttagttatttgagtgtgggagaggagaccaggtcacccgattcccgccaagccggaagtccctgcagcaccacctttggctaggagggaggggtgacagccaaaaagggcttcgggggagtggttaccctgctccctgcccagtgacaagccctcctttcccctgggggccctcctttcccctgctccctgcccagctacggggccctcctttcagccttgaccccttcctggttgctaccactcaggctgccactcagtggactccaccccagggacacggcagggtctgcagacctccccatgctagatcagccgtatttcatgctctgtctgcccaggctgtgtagattctgtgtgacttagtctcttgtgctgagtgtttgcttggatcttgaaaacatctttggtttgatttctttaacagaggtgagactattcagactttgtttatttttgtgttaattttggtaaatatggtttcagtgagtttcctcatttcatccaagttgtgcaatgtatcagcataaagttcctcttattttcagtatctttaggatccgtaataatgtcccctcttttattcttgacctggtgttcttcatcattcttgctatggatttatcaattttgttcctcttttccaaaagccccaggttttggcttcactggatttgctgtttgtcttctgtctcatgggtctctgcgccctgcacttcgtactttccgagagtttaactggtgcttagagagaaatgcatcacttccaaacccatgtattagagaagaagggcgtgaaatttatcacctaagctttccattcaggaagctagaaaaggtgtcagtgacctgttgcggcccagcggctggagcagcagacgtttgccatttctcacgcctgagggcaggcgttggagcagctcagccggcgttgctggtcagggtctcccgtgaggctggagtcagccgtgggttgagctgctctcctctgaaggtttaactgggcttggggctcagcttccaaggtgctcacctggttgttgatcagagagcgtgtccgttgtgatcccagtcctttgaaactgtgaagcctcgccccgcggcctgccgcaggatatgttttggtaaatgtagactgtgcacttgagaagaatgtattttgagttgttgggtacattgttttgtgtgtgtcaggtgacattgactaatcctgttgctcagagctcctgtacccttactgactgacttaagcctggtttctcagttactgagagaggcctgtgaacagttctagctatgatcatgaacatgtgttttcttcttagttatgtgagtttttgctatacgtgttttggggctattttgtcagatgcctacaaatttaggattgttttatcttcctgtcgaactgaccttgtcattattatgaactatttctcttcgcctctccttttcacttcttgccttctgtggattttgtctgatactaatccaggcacactgctgctgttttggtcagcgttttcataatgcatcttcttccctccttctactgtactggatttaaagcgcaccttatagagacatcatatactcgggactccttttctttctctagctgccagttctgtgtttcagttacagtgtttggccctcacatttaaggtgcgtgtgcgtacggcggattccgtgcccatctcatgtttttattccctttattcttcttttgctgctttctgatagtgatcaatttttttatttatatctcttgtattagagttttagtaatatcttttaatattattctcttgggtgttgccttagagatttcatacatgcccttgagttcattagcatttcctgaatgagccaatgaccctgagaaggtccctcccatctgccagttccctgccattgatgctgttgctctcgtccgcctcccttccacaggtaagcacgcaagacacaggtaccgtgtgccccaacggtgtcttgactcgctgttcctagacatcagtgtttgcttcactttacccatcccgatgctcttccttcctgcagcttcatgctccaatgagggctgattttcatttagctaaataacttttttttaagtatttctttgtatcatggttatgctttgactggccgtaagttctctcagcttttgtttgtctgaaaataaatttagttcgcctttattctgcacaggacagaattctaggtggatgatttttgccattcccagaactttaaagatgggctccactgtcttctggctcccatgtgttttgttaaaaattcagtgttcaggccgggtgctgtggctcacgcctgtaatcccagcactttgggaggccgaggcgagtggatcacgaggtcaggagatcgagaccatcctggctaacacggtgaaaccccgtctctactaaaaaatacaaaaaattagccgggcgtggtggctgtagtcgcagctactcaggaggctgaggcgggagaatggcgtgaacccaggagacggagcttgcagtgagccgagatcgcgccactgcactccagcctgggcgacagagcgagactccgtctcaaaaaaaaaaaaaaaagattcaatgttcattgttatttgttgctcctttgaaggtaatgggtcttttttctttgtcttaaaattgtttctccttatctttggttttcagcagtctgtgctgtgcctggatgtaattttctttttacgtatttttcttggaatatacagaactcaaatctgggagttagcatctttcatcagttttggaaaattcttagccattttttttttttttactattttttcccctgttctccctcttctccctgagacttcagttttgtgtgtgtgtgcacatgtgtgtatgcattcgtgcgtacgagtgtgtgcatgtgtgcgcccgtgtgtatgtgcatatgtgagtgtgtgtggctgtaacctgcacgtctcttctgtcatgtgttctatttttcattcctctctgtacatcaggctagatgcctcctgtctacgtggttttagatttacgaatcctgtcttctgttgtgtcccacagaaaaacccatgaggttttttaacattaaaaacagcagctttatgatagagaaaaaaacacaaacatagacgattgtaccattgcactcagaagaaacatcccaggccctgagcagcgtgtctttcctcggccgagtcaggcttcctggtgagcctcagggagtgcatggtctcagatgccatccttctcttctccagcatttccactcacctccgtgttcttggggagtgcgtggtgtcagatcccatcctgctcctctccagagtttccggtcacctccgtgttctcagggagtgcgtggtcttggatgccatcctgctcatctccagcatttcctctcacctccgtgttctcggggagtgcgtggtgtcagatcccatcctgctcatctccagcatttcctctcacctctgtgttctcggggagtgcgtggtgtcagatcccatcctgctcctctccagcatttcctctcacctccgtgttctcggggagtgcgtggtgtcagatcccatcctgctcctctccagagtttcctctcacctccgtgttctcggggagtgcgtggtctcagatcccatcctgctcctctccagagtttcctctcacctccgtgttctcagggagtgcgtggtcttggatgccatcctgctcatctccagcatttcctctcacctccgtgttctcggggagtgcgtggtgtcagatcccatcctgctcctctccagcatttcctctcacctccgagctctcggggagtgcgtggtctcagatcccatcctgctcctctccagagtttcctctcacctccgtgttctcgttctcatctctgccggaattccacatctgctcgtgcatgccatccaccttttccactagatccttttacatcatcattataatgatttttttttaataagtgttttctttcagttttaaatttcagatgttgtgtttttcaggtctaaggtgtctggtaattttttgtggatgccgattctctgttgaaattctccatcttttcatttcctttatatctcttttcttcttttttctataatatattacatttttctaataagtttttagtgagtgtccagcattgtataagttgacccttgaacaagagtttgaattataagggtccacttataagtggatttttaaaaaaatatatattgcaaaaatttttggaaatttgcaacaatttgaaaaactttgcagatgagccacatagcctagaaatatctg

SEQ ID NO: 20677 - protein, 530 aa, Homo sapiens; identical to SEQ ID NO: 2619

SEQ ID NO: 20678 - DNA, 2358 bp, Homo sapiens
accgcgttggctgggtggcctccattgtcgggctgctgctctcagcggcggggctcgccagcgcttcagtgggcggggacgcggcaggtgactccagaccaaggaggatgagctgctgtccctggaagagaacggatggagggaagcagctcctacgaagttccctctgtggctgctgctgatctggaggagggtgctggtcagactaggagcttgcctgccaccccctccaaagatgttcacaagggtgttggaggcatcatcttttcctcctcaccgattttagacttgagtgaaagtggtctgtgccgtttggaggaggtctttagaatccccagccttcaacaattgcatctgcaaaggaatgccctgtgtgtgattcctcaagatttctttcagttgcttccgaacctgacttggctggacctccggtacaatagaattaaagcgcttccttctgggattggagctcaccaggagcgtaaccacgctgaaagcactgaacctaagacactgccctctggaattccctcctcagctcgttgtgcagaagggattggtggctatccagcgcttcctgcggatgtgggcagtagaacactctctccccagaaatccaacttctcaagaggctccaccggttagagagatgaccctccgtgacctcccgagcccaggactggagttgtctggagaccacgcgtctaaccaaggagctgtgaacgctcaggacccagagggggctgtgatgaaagagaaggccagctttctcccacctgtggaaaagccagacctgagtgaactcaggaagtctgcggactcctcagagaactggcccagcgaggaggagatcaggcgcttttggaagctgaggcaggagattgttgagcacgtgaaggcagacgttctgggagatcagctcttgacgagggaattacctccaaatctcaaggcggccttgaacattgagaaagaactaccaaagccaagacacgttttcaggacaagggtccctaggaaacaggctctgcagagactacatgagagaaaaactcgaatcatgggcgtggtagggcgtgcgcctacacatatgggagaaggaagacagcctcctccaggagcatcttacccgacctcttgtcaccgtaccaaatggcgatccgagcaaaaagactggaagagagccgagcggcggcgctccgagagctccaggagaagcaggctctgatggagcagcagagacgagagaaaagggcactgcaggagtggagagagcgagcccagaggatgaggaagaggaaggaagagctcagcaaactcctgcctccgcggaggagcatggtggcatcaaagattccctctgccacagatctgatagataacaggaaagtaccactgaatccgcctggaaaaatgaaaccaagcaaagagaaatcgccacaagcaagtaaagaaatgagtgccctgcaggagagaaatttagaagagaagataaaacagcacgtcctccaaatgcgtgagcaaagaagattccatggccaggccccactggaggagatgaggaaggctgccgaggatctggaaattggaggccgatattcatggggatccaaggcctcctgaccaggagcctcctaagcagaactgctcacggaagtggctcctatatatttggaatgttaaccatcctctcagccaccgccagtgctgtttattcactcagcatacgctgatgcccacctcctggtacttggagtatcctgggctgtgggagagacgcaggaatgaaggaaagtgctttgctgcccgaactgctgcctggccagcccatccagctgtagaaggacacagctgctgtccctggcagtgaacctggatacccgtgtccccacccttcctgcagccataaggattctggcctgtcctctcaagctacccaaggcccctggctggtggcctcttccaggccacagagctacaggatgaagtattgaagctaaaattgggattaaccttgaacaaagatcgtcgacgggcggccctcactggaaacctttcgcttggcctgccggcagcacagcctcaaaatacattttttaacacaaaatatggagaatcaggaaatgttcgcagataccagtgacaccaggtggctggactgatggagacgtcttcagacaggagccgctcagtcttctttcccgggcgtcgcctcctgtgtggtgccggaagagcgccaggttcagtgttaccctgagggctgatttcgcgcagcctgttgttttccttagacaggtccacgtccctctcctgaggctgtggaagatttcagccgtattaaaagaaaggacactgtga

SEQ ID NO: 20679 - protein, 214 aa, Homo sapiens
MWAVEHSLPRNPTSQEAPPVREMTLRDLPSPGLELSGDHASNQGAVNAQDPEGAVMKEKASFLPPVEKPDLSELRKSADSSENWPSEEEIRRFWKLRQEIVEHVKADVLGDQLLTRELPPNLKAALNIEKELPKPRHVFRTRVPRKQALQRLHERKTRIMGVVGRAPTHMGEGRQPPPGASYPTSCHRTKWRSEQKDWKRAERRRSESSRRSRL

SEQ ID NO: 20680 - DNA, 2114 bp, Homo sapiens
agctcgctgagccctcgaggcgggcggcggcaggaaggtggtgcctcggcccgtcgtgccctgtcgcctagctccagccgcgatgctgaccgcaaaggctgcccttctgaggcctggaatgtgaggcccagagcgtcggacccaactcagcctcgcccggatggggaaatcgaggcagggagcgggggtgggcgtgcgtggggatcccttgaaggcagcctcggaaaccccacggagcctgcgctgcctgggccctgtgtgactccagaccaaggaggatgagctgctgtccctggaagagaacggatggagggaagcagctcctacgaagttccctctgtggctgctgctgatctggaggagggtgctggtcagactaggagcttgcctgccaccccctccaaagatgttcacaagggtgttggaggcatcatcttttcctcctcaccgattttagacttgagtgaaagtggtctgtgccgtttggaggaggtctttagaatccccagccttcaacaattgcatctgcaaaggaatgccctgtgtgtgattcctcaagatttctttcagttgcttccgaacctgacttggctggacctccggtacaatagaattaaagcgcttccttctgggattggagctcaccagcatttgaaaactttgcttttagaaagaaatcctatcaaaatgttacctgtggagctggggagcgtaaccacgctgaaagcactgaacctaagacactgccctctggaattccctcctcagctcgttgtgcagaagggattggtggctatccagcgcttcctgcggatgtgggcagtagaacactctctccccagaaatccaacttctcaagaggctccaccggttagagagatgaccctccgtgacctcccgagcccaggactggagttgtctggagaccacgcgtctaaccaaggagctgtgaacgctcaggacccagagggggctgtgatgaaagagaaggccagctttctcccacctgtggaaaagccagacctgagtgaactcaggaagtctgcggactcctcagagaactggcccagcgaggaggagatcaggcgcttttggaagctgaggcaggagattgttgagcacgtgaaggcagacgttctgggagatcagctcttgacgagggaattacctccaaatctcaaggcggccttgaacattgagaaagaactaccaaagccaagacacgttttcagaaggaagacagcctcctccaggagcatcttacccgacctcttgtcaccgtaccaaatggcgatccgagcaaaaagactggaagagagccgagcggcggcgctccgagagctccaggagaagcaggctctgatggagcagcagagacgagagaaaagggcactgcaggagtggagagagcgagcccagaggatgaggaagaggaaggaagagctcagcaaactcctgcctccgcggaggagcatggtggcatcaaagattccctctgccacagatctgatagataacaggaaagtaccactgaatccgcctggaaaaatgaaaccaagcaaagagaaatcgccacaagcaagtaaagaaatgagtgccctgcaggagagaaatttagaagagaagataaaacagcacgtcctccaaatgcgtgagcaaagaagattccatggccaggccccactggaggagatgaggaaggctgccgaggatctggaaattgccacagagctacaggatgaagtattgaagctaaaattgggattaaccttgaacaaagatcgtcgacgggcggccctcactggaaacctttcgcttggcctgccggcagcacagcctcaaaatacattttttaacacaaaatatggagaatcaggaaatgttcgcagataccagtgacaccaggtggctggactgatggagacgtcttcagacaggagccgctcagtcttctttcccgggcgtcgcctcctgtgtggtgccggaagagcgccaggttcagtgttaccctgagggctgatttcgcgcagcctgttgttttccttagacaggtccacgtccctctcctgaggctgtggaagatttcagccgtattaaaagaaaggacactgtga

SEQ ID NO: 20681 - protein, 530 aa, Homo sapiens; identical to SEQ ID NO: 2619

SEQ ID NO: 20682 - DNA, 1767 bp, Homo sapiens
aacttacccatccaaacccaaagaatggactcagagaacagtggaagaaagactttttaatgacggtcttgcaagattgggtgtctgatgggcaggcacacccagcagggttacaacaagccatttatcccctggaaatacagatatggatataaatacatataataatcaattgcatctgcaaaggaatgccctgtgtgtgattcctcaagatttctttcagttgcttccgaacctgacttggctggacctccggtacaatagaattaaagcgcttccttctgggattggagctcaccagcatttgaaaactttgcttttagaaagaaatcctatcaaaatgttacctgtggagctggggagcgtaaccacgctgaaagcactgaacctaagacactgccctctggaattccctcctcagctcgttgtgcagaagggattggtggctatccagcgcttcctgcggatgtgggcagtagaacactctctccccagaaatccaacttctcaagaggctccaccggttagagagatgaccctccgtgacctcccgagcccaggactggagttgtctggagaccacgcgtctaaccaaggagctgtgaacgctcaggacccagagggggctgtgatgaaagagaaggccagctttctcccacctgtggaaaagccagacctgagtgaactcaggaagtctgcggactcctcagagaactggcccagcgaggaggagatcaggcgcttttggaagctgaggcaggagattgttgagcacgtgaaggcagacgttctgggagatcagctcttgacgagggaattacctccaaatctcaaggcggccttgaacattgagaaagaactaccaaagccaagacacgttttcagaaggaagacagcctcctccaggagcatcttacccgacctcttgtcaccgtaccaaatggcgatccgagcaaaaagactggaagagagccgagcggcggcgctccgagagctccaggagaagcaggctctgatggagcagcagagacgagagaaaagggcactgcaggagtggagagagcgagcccagaggatgaggaagaggaaggaagagctcagcaaactcctgcctccgcggaggagcatggtggcatcaaagattccctctgccacagatctgatagataacaggaaagtaccactgaatccgcctggaaaaatgaaaccaagcaaagagaaatcgccacaagcaagtaaagaaatgagtgccctgcaggagagaaatttagaagagaagataaaacagcacgtcctccaaatgcgtgagcaaagaagattccatggccaggccccactggaggagatgaggaaggctgccgaggatctggaaattgccacagagctacaggatgaagtattgaagctaaaattgggattaaccttgaacaaagatcgtcgacgggcggccctcactggaaacctttcgcttggcctgccggcagcacagcctcaaaatacattttttaacacaaaatatggagaatcaggaaatgttcgcagataccagtgacaccaggtggctggactgatggagacgtcttcagacaggagccgctcagtcttctttcccgggcgtcgcctcctgtgtggtgccggaagagcgccaggttcagtgttaccctgagggctgatttcgcgcagcctgttgttttccttagacaggtccacgtccctctcctgaggctgtggaagatttcagccgtattaaaagaaaggacactgtga

SEQ ID NO: 20683 - protein, 468 aa, Homo sapiens
MDINTYNNQLHLQRNALCVIPQDFFQLLPNLTWLDLRYNRIKALPSGIGAHQHLKTLLLERNPIKMLPVELGSVTTLKALNLRHCPLEFPPQLVVQKGLVAIQRFLRMWAVEHSLPRNPTSQEAPPVREMTLRDLPSPGLELSGDHASNQGAVNAQDPEGAVMKEKASFLPPVEKPDLSELRKSADSSENWPSEEEIRRFWKLRQEIVEHVKADVLGDQLLTRELPPNLKAALNIEKELPKPRHVFRRKTASSRSILPDLLSPYQMAIRAKRLEESRAAALRELQEKQALMEQQRREKRALQEWRERAQRMRKRKEELSKLLPPRRSMVASKIPSATDLIDNRKVPLNPPGKMKPSKEKSPQASKEMSALQERNLEEKIKQHVLQMREQRRFHGQAPLEEMRKAAEDLEIATELQDEVLKLKLGLTLNKDRRRAALTGNLSLGLPAAQPQNTFFNTKYGESGNVRRYQ

SEQ ID NO: 20684 - DNA, 645 bp, Homo sapiens
gctgctgatcgtagagaacaccacggcagacatctctgtccctgtcttttagtttcattttaatgattgagttgggctgagtcccccagaccagacatggctctggctatttgctcagtaagcaggcgatttcgggggctgccgagggccaggtgctgcggcaggcactggagaaacggccgagacactgagtgtggggccccggaattcagaccatgtcaaaggctttgggatagaaacagtggtgtgctgggtcagcagcagagtgccggctcttcaggaagtcagttccggctccaaaggccgccggaaggagtcctggttcttttctttctgattcttttgtctactgtttacatcttttaaggcaattgcatctgcaaaggaatgccctgtgtgtgattcctcaagatttctttcagttgcttccgaacctgacttggctggacctccggtacaatagaattaaagcgcttccttctgggattggagctcaccagtaagttgtttatgtttccagattttaaaaatcatcttttcagtgcacgagtgcctgttctttcgctccttgtcctttactcttgattaaatttttacctcggaatagaaacatttaatagtatttttaaagccagctaagaggtt

SEQ ID NO: 20685 - protein, 89 aa, Homo sapiens
MALAICSVSRRFRGLPRARCCGRHWRNGRDTECGAPEFRPCQRLWDRNSGVLGQQQSAGSSGSQFRLQRPPEGVLVLFFLILLSTVYIF

SEQ ID NO: 20686 - DNA, 2660 bp, Homo sapiens
atagagcctgggccacctgcccttccaaaagcagcaggttaaaggccagtgcccagcacgcaccccaggtgacccctgtcccagagcacaggccatgcctgccctctctgctctactgagacagtcactgctgttcccgtgcagatggggaagacgagggacagtcactgctgttcccgtgcagacggggaagatgagggtggaaggtcatgcagcgtgggggggcgggccagcctcctgggacgtggccaccgggcatgctgcttggctgtggcctcccaagatgtgctgctggtgtgaggctttgcacagggcaggccgtggaatgggatgggcctttctcctctgggcgaagtgtttggtttcagagggaagaccaggcagggcttccagttgtgtttcttaaactgctttgatgcaagggtcatggtgaggagttgtcatgttctggaacctggctggctctcagtcctgggctcagagcccctatctccagcctggttttccccaggtgttttcactgggaggaaacaccaggcacacctgtcagctccctctcatgggcagggagagggagtccccagcaccgtgcgaccccaccatgttactggctatcccctctgctgtcctgcgggcttccctcaagggggacccagtatctgaccctgcctgaatgtgtctgtggaggccaggcgccttctgatggccttgcctgccccgccccctgctcccacatcacccagcgatgggattccgacctgctgcagcaccaccccatgcacctgaactccaggcacgtcacatcgtccagcccgggcgagctgctggccaggccccctgcttccgcgggcatctctgtccaggtcagacaagggtgcggcattggtctcaagcaggtcgggtgcagctgccgaggctgcacgtccttcaggtgcatttcccaagccgactgtcaagcgtcccgggaaagtagctggctggcagtgggcgcgttgggacagtgtcctgctgccatccacacatcttcattacgtgtcctgaaatcaacagtcaagactggactctggggtgactgcagcttctagtcgtgctaattgttcagatgagcggatgatccacaggccctccttttacatttcacatgttgtatgaattaccgtcacagggttttgttaaacattcagctaaaaacactctgtaattttagaaggaagacagcctcctccaggagcatcttacccgacctcttgtcaccgtaccaaatggcgatccgagcaaaaagactggaagagagccgagcggcggcgctccgagagctccaggagaagcaggctctgatggagcagcagagacgagagaaaagggcactgcaggagtggagagagcgagcccagaggatgaggaagaggaaggaagagctcagcaaactcctgcctccgcggaggagcatggtggcatcaaagattccctctgccacagatctgatagataacaggaaagtaccactgaatccgcctggaaaaatgaaaccaagcaaagagaaatcgccacaagcaagtaaagaaatgagtgccctgcaggagagaaatttagaagagaagataaaacagcacgtcctccaaatgcgtgagcaaagaagattccatggccaggccccactggaggagatgaggaaggctgccgaggatctggaaattgccacagagctacaggatgaagtattgaagctaaaattgggattaaccttgaacaaagatcgtcgacgggcggccctcactggaaacctttcgcttggcctgccggcagcacagcctcaaaatacattttttaacacaaaatatggagaatcaggaaatgttcgcagataccagtgacaccaggtggctggactgatggagacgtcttcagacaggagccgctcagtcttctttcccgggcgtcgcctcctgtgtggtgccggaagagcgccaggttcagtgttaccctgagggctgatttcgcgcagcctgttgttttccttagacaggtccacgtccctctcctgaggctgtggaagatttcagccgtattaaaagaaaggacactgtgagcacgtggtctcgccttcccttcttcctgcaggttcccgccaagccatgtgacagagtgctcacactcaggcacttgcctctctcctgtcctggagcccttgttacaaaagtactcacagctttccttcacttagttatttgagtgtgggagaggagaccaggtcacccgattcccgccaagccggaagtccctgcagcaccacctttggctaggagggaggggtgacagccaaaaagggcttcgggggagtggttaccctgctccctgcccagtgacaagccctcctttcccctgggggccctcctttcccctgctccctgcccagctacggggccctcctttcagccttgaccccttcctggttgctaccactcaggctgccactcagtggactccaccccagggacacggcagggtctgcagacctccccatgctagatcagccgtatttcatgctctgtctgcccaggctgtgtagattctgtgtgacttagtctcttgtgctgagtgtttgcttggatcttgaaaacatctttggtttgatttctttaacagaggtgagactattc

SEQ ID NO: 20687 - protein, 241 aa, Homo sapiens
MNYRHRVLLNIQLKTLCNFRRKTASSRSILPDLLSPYQMAIRAKRLEESRAAALRELQEKQALMEQQRREKRALQEWRERAQRMRKRKEELSKLLPPRRSMVASKIPSATDLIDNRKVPLNPPGKMKPSKEKSPQASKEMSALQERNLEEKIKQHVLQMREQRRFHGQAPLEEMRKAAEDLEIATELQDEVLKLKLGLTLNKDRRRAALTGNLSLGLPAAQPQNTFFNTKYGESGNVRRYQ

SEQ ID NO: 20688 - DNA, 2620 bp, Homo sapiens
ggcgggggcggcctgggacgcggcgggagcatggagccgcgcgccggctgccggctgccggtgcgggtggagcaggtcgtcaacggcgcgctggtggtcacggtgagctgcggcgagcggagcttcgcggggatcctgctggactgcacgaaaaagtccggcctctttggcctacccccgttggctccgctgccccaggtcgatgagtcccctgtcaacgacagccatggccgggctcccgaggagggggatgcagaggtgatgcagctggggtccagctccccccctcctgcccgcggggttcagccccccgagaccacccgccccgagccacccccgcccctcgtgccgccgctgcccgccggaagcctgcccccgtaccctccctacttcgaaggcgcccccttccctcacccgctgtggctccgggacacgtacaagctgtgggtgccccagccgccgcccaggaccatcaagcgcacgcggcggcgtctgtcccgcaaccgcgacccggggcgcctcatcctcagcaccatccgcctgcggccgcgccaggtgctctgtgagaagtgcaagagcacgctgagccccccggaggccagccccggacccccagccgcgcccagggcccgcaggaggctgggcagcggcccggacagggagctccgcaagccggaggagccggagaacggcgagcccacggctgcggccaccgccaggaggagcaagagggagaggcgcgaggaggacagggccccggcagagcaggtcccgcggagcccggtcatcaagatctcctacagcacgccccagggcaagggagaggtggtcaagatcccctcccgcgtgcacggctctctggagcccttccgtccccagcaggccccgcaggacgacggcagccaggaccccgaggtgctggacagagagtcccgggaccggccgtcctgcgcgccctcggcctccatccccaagttgaaactgacacggcctgtgccggccggcgcggacctgccgccccctaagatccgcctgaagccccaccgtctgggggacagcgagcacgagcccgtgtaccgggccgagctggtgggggagctgaacgggtacctgcgggacagctcgccggcgccctgtgcggacggccctgccggtgggctggcggacttgtcttctggaagttcgggtgaggacgatgacttcaagagctgtccccagggtccacagggacgcgagggcttggcttttctcgtcagctgccctgaggggagagcggactgtgccagtgagtcggcgtgcagcagcgacagcctggacgaggccagatcgtccggctcggaagggacgccggcagacacgggtgacctctcgcctggccacggcgcgtcagcgccctcggtgtccagagaggctcgccaaacggtgccgcccctgacggtcaggctgcacacacagagcgtgtcggagtgcatcacggaggacggcaggactgtggccgtgggggacatcgtctggggtaagatccatggttttccttggtggccggcgcgtgttcttgacatcagtctcggccagaaggaggacggagagccgtcttggcgagaagcgaaggtctcgtggtttggttctccgactacgtcgttcttgtctatttcaaaactctcccctttctctgaatttttcaaactgagatttaatcgtaagaagaaggggatgtatcggaaagctataaccgaggctgcaaatgccgcaagacacgtggccccggaaatcagggagctcttaacccagtttgaaacgtaactggttccctgaccaggtcaccgacgatgagggcgcacctgctgtcctggagcttccgatctctgttcggggaccctgtgagccttctggccggctgcgtgcagagcccactgggcacggtggtcggcctggtgtgaggccccccggggaccggcagtgtgtccagggaggggatggccctgagcccagcggctcctcccgctgagtgtatttcttcccaccactcagcgcatggctgccctggctcacgaggcagtcgggactcgtgacttgctggctgctggctgctgctgcctcgcgcgctggggttccatggaggaactgggcctgccgccccggcctcacctgctgcccgcatgctggggtcccatggaggaaccaggcctggcgccccggcctcgcccagcggctggtgtgggcagctgttccctgcctcgcagtgtcctggaggcagctgtctcgcagactcagcttggtctcccgcaggcttcagaaaaacccaattgcacgtgtgggattcttccccagcccttgggtgcggggtctctgtgcacttgagagctgggggacccacccaccgtctcccactccaagttcatcccagagcgtggggcccgctgggcacctggcacctggcctgcagatgctgctacgagtgaccagtgctgtgtggaggaggccaagggcggcccctgggaaaccgggcttcaacagtacaaggaaaagaaacttgctctgttttgtaagagcgtgttccttttcctcttttttgtcactttaaagaccaaaaagaataaagaaagaaaagaaaaaaatt

SEQ ID NO: 20689 - protein, 590 aa, Homo sapiens
MEPRAGCRLPVRVEQVVNGALVVTVSCGERSFAGILLDCTKKSGLFGLPPLAPLPQVDESPVNDSHGRAPEEGDAEVMQLGSSSPPPARGVQPPETTRPEPPPPLVPPLPAGSLPPYPPYFEGAPFPHPLWLRDTYKLWVPQPPPRTIKRTRRRLSRNRDPGRLILSTIRLRPRQVLCEKCKSTLSPPEASPGPPAAPRARRRLGSGPDRELRKPEEPENGEPTAAATARRSKRERREEDRAPAEQVPRSPVIKISYSTPQGKGEVVKIPSRVHGSLEPFRPQQAPQDDGSQDPEVLDRESRDRPSCAPSASIPKLKLTRPVPAGADLPPPKIRLKPHRLGDSEHEPVYRAELVGELNGYLRDSSPAPCADGPAGGLADLSSGSSGEDDDFKSCPQGPQGREGLAFLVSCPEGRADCASESACSSDSLDEARSSGSEGTPADTGDLSPGHGASAPSVSREARQTVPPLTVRLHTQSVSECITEDGRTVAVGDIVWGKIHGFPWWPARVLDISLGQKEDGEPSWREAKVSWFGSPTTSFLSISKLSPFSEFFKLRFNRKKKGMYRKAITEAANAARHVAPEIRELLTQFET

SEQ ID NO: 20690 - DNA, 1797 bp, Homo sapiens
tcatcctcagcaccatccgcctgcggccgcgccaggtgctctgtgagaagtgcaagagcacgctgagccccccggaggccagccccggacccccagccgcgcccagggcccgcaggaggctgggcagcggcccggacagggagctccgcaagccggaggagccggagaacggcgagcccacggctgcggccaccgccaggaggagcaagagggagaggcgcgaggaggacagggccccggcagagcaggtcccgcggagcccggtcatcaagatctcctacagcacgccccagggcaagggagaggtggtcaagatcccctcccgcgtgcacggctctctggagcccttccgtccccagcaggccccgcaggacgacggcagccaggaccccgaggtgctggacagagagtcccgggaccggccgtcctgcgcgccctcggcctccatccccaagttgaaactgacacggcctgtgccggccggcgcggacctgccgccccctaagatccgcctgaagccccaccgtctgggggacagcgagcacgagcccgtgtaccgggccgagctggtgggggagctgaacgggtacctgcgggacagctcgccggcgccctgtgcggacggccctgccggtgggctggcggacttgtcttctggaagttcgggtgaggacgatgacttcaagagctgtccccagggtccacagggacgcgagggcttggcttttctcgtcagctgccctgaggggagagcggactgtgccagtgagtcggcgtgcagcagcgacagcctggacgaggccagatcgtccggctcggaagggacgccggcagacacgggtgacctctcgcctggccacggcgcgtcagcgccctcggtgtccagagaggctcgccaaacggtgccgcccctgacggtcaggctgcacacacagagcgtgtcggagtgcatcacggaggacggcaggactgtggccgtgggggacatcgtctggggtcaccgacgatgagggcgcacctgctgtcctggagcttccgatctctgttcggggaccctgtgagccttctggccggctgcgtgcagagcccactgggcacggtggtcggcctggtgtgaggccccccggggaccggcagtgtgtccagggaggggatggccctgagcccagcggctcctcccgctgagtgtatttcttcccaccactcagcgcatggctgccctggctcacgaggcagtcgggactcgtgacttgctggctgctggctgctgctgcctcgcgcgctggggttccatggaggaactgggcctgccgccccggcctcacctgctgcccgcatgctggggtcccatggaggaaccaggcctggcgccccggcctcgcccagcggctggtgtgggcagctgttccctgcctcgcagtgtcctggaggcagctgtctcgcagactcagcttggtctcccgcaggcttcagaaaaacccaattgcacgtgtgggattcttccccagcccttgggtgcggggtctctgtgcacttgagagctgggggacccacccaccgtctcccactccaagttcatcccagagcgtggggcccgctgggcacctggcacctggcctgcagatgctgctacgagtgaccagtgctgtgtggaggaggccaagggcggcccctgggaaaccgggcttcaacagtacaaggaaaagaaacttgctctgttttgtaagagcgtgttccttttcctcttttttgtcactttaaagaccaaaaagaataaagaaagaaaagaaaaaaatt

SEQ ID NO: 20691 - protein, 108 aa, Homo sapiens
MAALAHEAVGTRDLLAAGCCCLARWGSMEELGLPPRPHLLPACWGPMEEPGLAPRPRPAAGVGSCSLPRSVLEAAVSQTQLGLPQASEKPNCTCGILPQPLGAGSLCT

SEQ ID NO: 20692 - DNA, 300 bp, Homo sapiens
ccaggactgacgccacagcctgcagctcctccccaagcccagccccagcccttgcccttcaatcctgagaccctgagatgcatgggtggggctttcatccgctggggaggctgagacccggggggccacagctggttcctggactccaaagcccaggacccttccaaatcctgcctggacggcaccgtggccaggaccccagccagcacttcccttttctgcgagggttttctgtttctttgattataaaataacccctgttggtggggggaaaaaattagcaaaataaagaaaagcaaa

SEQ ID NO: 20693 - protein, 58 aa, Homo sapiens
MHGWGFHPLGRLRPGGPQLVPGLQSPGPFQILPGRHRGQDPSQHFPFLRGFSVSLIIK

SEQ ID NO: 20694 - DNA, 1422 bp, Homo sapiens
ggaccctgggccactgcaccccaccaggacggcaggactgaaaaggccactgacctgctcatctgacacctgagggccgctggagacccagggacactcctgctgcggctcatgtttggaagctgtccggaggcgggacttcctcttcctccaggggccgccgtccggaggcgggacttcctcttcctcggggacaactgtctttttctcttaaggccttggactgcctggatgaggctataatatggtcagtactctgctctacccaaagtctcctgattgaaatattaacctcatccaagaaacaccctcacagcgacgtctacactggtgtttgaccaaatagctggggaccgtggcctggtcgagctgacacaaaagtaaccatcacagctgctgctatggtctgaatgttgatgtcacccccagattcatttgttagaacttaagccccaaggcgatggcatcactggtgggctttgggagatgaggaggatatgaatgggaccagtagcctcataagagttttgagggtcctggttgcccttccccaccctcccgtccctgccactgggtgaggacacagcaagaagccgccgtcctgggagcagagagcagaaagcagccctcaccagacgctgaatctgctggggcctcggtcctggacgtcccagcctccagaactgagcgatgaaattctggttacaaattgccccctctgaggtattttgttttagcagaaggaacagacgaggatgaccaccgaggcccttctcaggctgccgcgggtctccaggatggggacagtcagctggggccaaccgagctgcatgtggtcaagggcccatgcatgtgaccagggcccgcctcccacgtcacccagtgcaccctcagcatgggacacggacctagacactgccggggtctccgtccttgcaggcactgccaggcgcccctccctgggagaagctgcagctctgaggctacggtcttgcaggtcagccaccacctggctttgtggtctgttatgcccggcctagtgtccagggtggtgacatttatttgaacaaagaccagtctccaccaccaaagtcatggctctgctgttgcttccagaaccaaagaaaggctggcttctgggctgggcgtggtgattcacgcctgtaatcccagcactttgggaggccgagacgggcagatcacgaggccaggagttcgagaccatcttggctaacatggtgaaaccctatctctactaaaaatacaaaaaaaattagctgggtgtggtggcacgtgcctgtaatctcagcaactcaggaggctgaggcaggagaatggcttcaacctcggaggcggaggttgcagtgagccaagatcgcaccactgcaccccagcgtgggcaacagagcaagacgctgtctc

SEQ ID NO: 20695 - protein, 94 aa, Homo sapiens
MTTEALLRLPRVSRMGTVSWGQPSCMWSRAHACDQGPPPTSPSAPSAWDTDLDTAGVSVLAGTARRPSLGEAAALRLRSCRSATTWLCGLLCPA

SEQ ID NO: 20696 - DNA, 612 bp, Homo sapiens
gggctccccggcttcctgcctctctgaattcctcctccagaccctcaaggctccctgctcattccctctggggtcctgaggtctccaagggccactctggcttcccccctgcagacccaccctcctaggggaacagggtgaccccacacagacactgatgggacaagagaaccagccctgcagaaagcctccagcgtgtccatgggcccagtgcctggcgtgtcctccctgggagcttgctggacgcatgaccaggattctgggagggcagaggacagaccacaggcacccaggataactcagtacacatgggttctcagcttcctgttcacagagaaacctcagacaagaagcacgtcgcccatttctcatcaaggccaaccccagaccacgagagcgctttctctgcgtcagccccagcaccccagcgcccctgcctccgggcgcccgcggcctccgcactccagtggcccagacctggctgaggcagctcccgtggtagatcaagcctcacaggcggctggaagagccagttctgggctgggcctgtgggaacaggcgtctgttagtcagggtttcaggaatgcggccttcgaagcctgaagcggggaa

SEQ ID NO: 20697 - protein, 133 aa, Homo sapiens
MGPVPGVSSLGACWTHDQDSGRAEDRPQAPRITQYTWVLSFLFTEKPQTRSTSPISHQGQPQTTRALSLRQPQHPSAPASGRPRPPHSSGPDLAEAAPVVDQASQAAGRASSGLGLWEQASVSQGFRNAAFEA

SEQ ID NO: 20698 - DNA, 1260 bp, Homo sapiens
ccaggatctgccaggactgggaagggaggcaggaggcttctctgggtataaagcagctgaaatgtggagtttcctcccaggagctgagagcgtgtccatgggcccagtgcctggcgtgtcctccctgggagcttgctggacgcatgaccaggattctgggagggcagaggacagaccacaggcacccaggataactcagtacacatgggttctcagcttcctgttcacagagaaacctcagacaagaagcacgtcgcccatttctcatcaaggccaaccccagaccacgagagcgctttctctgcgtcagccccagcaccccagcgcccctgcctccgggcgcccgcggcctccgcactccagtggcccagacctggctgaggcagctcccgtggtagatcaagcctcacaggcggctggaagagccagttctgggctgggcctgtgggaacaggcgtctgttagtcagggtttcaggaatgcggccttcgaagcctgaagcggggaatggcggctctgggccctcaaggggcaggcggtgagcctgggaggccaggccgggctgacccaaggggagaggaccctctccgcccactgccgctggccctgggcaggtctagagcctgggggtctccagaggcacaatcccttatctccgggagaaggcagagggcagaggcaggaaacaaatctcctgtcaaaattcctaattaaaatactaagtaagtgatggctccaggctgaaacaccggacactgagagaataagggaaaatcagccccgacagccagggctaacaagacggttaattacagcccgagaagaacgttaacagtattaattctaaccacaaaggaggaaaagagaagaccacccttgccccagtccggcctggcccctcccacccttgccccagtccggcctggcccctcccacccttgccccagtccggcctggcccctcccacccttgcccagcccctgcttggcccctcccactcgtcccaacccttcgtgtcaccgccaacccttgccccagtcctgcccggcccctcccacccttgccccagtcctgcccggcccctcccacccttgccccagtccggcctggcccctcccacccttgccccagtccggcctggcccctcccacccttgccccagcccctgcctggtcctgcccacctcaccccagcacttcctatgggactcacgcctttgtctcgggcttttggttttcaaaataaattataagttttaat

SEQ ID NO: 20699 - protein, 145 aa, Homo sapiens; identical to SEQ ID NO: 2623

SEQ ID NO: 20700 - DNA, 679 bp, Homo sapiens
caggagaggggtttagagcacagcctccctctccagggtcaggttcacgggagctgttgggggctccttccctcgcagcagtgaccactccaaggaccacggcctggacatgagcggcagcggtgagctgggagctgctggcctggagtctagatgaatataggcagcagccaaaggccacagtcacgacaaacctacacactctcaccactgtcatctcatattgtcctaaaatttccagccagtgcaaaaaaacatgaaaaagaaaaaatacagccattggaaaagaggaaaagtaattgttattagctgatgatgtgaatgtcttcctgaaaaccttaagagaaccaactggaaaacaaccagaaatgagagcatggagttaggcaaccgccgatctgctttctgtcacttgggcgagtttttcccgtcctgggatttcatatctctggaatcctgcagtacgtagccctctgtctggcttcctcgctccgtgtaatgttcttgagattcatccatgcagctgtgtatacctgcagtgattgtttctcttgttgaattgctgagaagggttccatcgtatgccttttccagtttatttgttcatctgttgttagacatttgagttatttccagcttgggactcttatgaacaaaactgctataaacatgcatattc

SEQ ID NO: 20701 - protein, 51 aa, Homo sapiens [sequence omitted]

SEQ ID NO: 20702 - DNA, 3076 bp, Homo sapiens
gtcggcggcggctgcgggaactttcccagcggatctaatggctgcgcgcgggccgctgtgaggcgcggcggcgagcgacgggcgcggggccgcggagcagcgagcgagcgagcgagcgcgaggccggagccccggccaggcccggccgacccgccgagcccgcgatgcgccccggggccgccccccggcgcagctgacgccccgcggccccgcgaagaccccggccggccggtcccggaggaagcggccgccgccgccgccgcccagcccagcgcccgcgccgcccgggcaccatggcggggaaggcggccgccccgggcaccgcggtgctgctggtcacggccaacgtgggctcgctcttcgacgacccagaaaacctgcagaagaactggcttcgggaattttaccaggtcgtgcacacacacaagccgcacttcatggccttgcactgtcaggagtttggagggaagaactacgaggcctccatgtcccacgtggacaagttcgtcaaagaactattgtcgagtgatgcgatgaaagaatataacagggctcgagtctacctggatgaaaactacaaatcccaggagcacttcacggcactaggaagcttttattttcttcatgagtccttaaaaaacatctaccagtttgactttaaagctaagaagtatagaaaggtcgctggcaaagagatctactcggataccttagagagcacgcccatgctggagaaggagaagtttccgcaggactacttccccgagtgcaaatggtcaagaaaaggcttcatccggacgaggtggtgcattgcagactgtgcctttgacttggtgaatatccatcttttccatgatgcttccaatctggtcgcctgggaaacaagcccttccgtgtactcgggaatccggcacaaggcactgggctacgtgctggacagaatcattgatcagcgattcgagaaggtttcctactttgtatttggtgatttcaacttccggctggattccaagtccgtcgtggagacgctctgcacaaaagccaccatgcagacggtccgggccgccgacaccaatgaagtggtgaagctcatatttcgtgagtcggacaacgaccggaaggttatgctccagttagaaaagaaactcttcgactacttcaaccaggaggttttccgagacaacaacggcaccgcgctcttggagtttgacaaggagttgtctgtctttaaggacagactgtatgaactggacatctcgttccctcccagctacccgtacagtgaggacgcccgccagggtgagcagtacatgaacacccggtgcccagcctggtgtgaccgcatcctcatgtccccgtctgccaaggagctggtgctgcgggtgagtgtgtgctgccccagccctgggcacagagggatgtggagcgctgggtctggtctggcccagccctggtgacagggccccaggggtggggtcggagagcgaggagaaggttgtcacctatgaccacattgggcccaacgtctgcatgggagaccacaagcccgtgttcctggccttccgaatcatgcccggggcaggtaaacctcatgcccatgtgcacaagtgttgtgtcgtgcagtgacgtggtgggaagagatgccagcgccacgagaggacacttcgtgagcctccctgtagccgtggaccgaatacgcactcttgaaagctgcatcgagaacccgcccaagcgccacctgctagacggccagccccacacttcgcttcagcctccggaccattccggagcagcctcacatacctcactgtctcgtctgtctatgtgacattaagtagaaatattggttttttttttttttttttaaataagtcacagtcctgttgtcaaaactctaatagacagcaaagagggtctgtaccgtagacttcacagttttcagtttttaatgattgccagtggaggggcttcttcagcacagagaccccccactgtgtccagggaccccctctgccaggtggaggtgtgtccaggggctggggaagccgagacgggcactccctctgccggccggcagcgtggccctgagcatggcaagggggtctgtctctgccgatgctccttccgcggcactgactctgcgccgtgtcacatggtttttgaatcacactgcagctgctttccatttttatatatatataaatatatataaatatatactttttaaaaataatttataaatcttaccaaaacttatgctaaatatactttccagtatgaacgcacaggagagtcccatcagcaggcggcattggagtctaggagctcagctgtgtgtccatcaacacacaaattcgtaaaaaacacacatggcctcgccatcgtgggtaaaatcggccccacagcacgtctgcaccagcgggccgttactcccatgccgttcttctgtgtaatattaagaactgaatgtgaagtttatagctagcctgggtgtaccttttaagaattttgtaaaccgtttgtctgtcttttgttactgttttatggtgccaagtatcctacgttacaacaataatatcatgggagaaatagaaatagcctagtttgcttccaatagaaactgcttttaacatgggctgtatataaaaatattaaagagaaacaaaactgtacatttcctcattgctccgctacagacaacccatgtcataaccttgttgcaaatatttttctcctatagcagtaagtacagcattagaaggtgattagagagtctgttgatgaaacacaaatgtatgttttattgattttactttagaacactacagagttcctggaccgggtgaaggcattagctgggtgtttgtgtgggataaatactaccactgcaagtgactgctgtccgctgcggaatctgttcttggtggaagcacaggtccgtgtcgctgctgtggttgccgctgtccgcggttcaacacggagtccgccccgcgggtttcagctgttggtcgttctgaggggcctttggaagtgaccggtctggttcctaagcaataaaattgaccgtggtgaaaat

SEQ ID NO: 20703 - protein, 387 aa, Homo sapiens
MAGKAAAPGTAVLLVTANVGSLFDDPENLQKNWLREFYQVVHTHKPHFMALHCQEFGGKNYEASMSHVDKFVKELLSSDAMKEYNRARVYLDENYKSQEHFTALGSFYFLHESLKNIYQFDFKAKKYRKVAGKEIYSDTLESTPMLEKEKFPQDYFPECKWSRKGFIRTRWCIADCAFDLVNIHLFHDASNLVAWETSPSVYSGIRHKALGYVLDRIIDQRFEKVSYFVFGDFNFRLDSKSVVETLCTKATMQTVRAADTNEVVKLIFRESDNDRKVMLQLEKKLFDYFNQEVFRDNNGTALLEFDKELSVFKDRLYELDISFPPSYPYSEDARQGEQYMNTRCPAWCDRILMSPSAKELVLRVSVCCPSPGHRGMWSAGSGLAQPW

SEQ ID NO: 20704 - DNA, 1431 bp, Homo sapiens
gcgcgggccgctgtgaggcgcggcggcgagcgacgggcgcggggccgcggagcagcgagcgagcgagcgagcgcgaggccggagccccggccaggcccggccgacccgccgagcccgcgatgcgccccggggccgccccccggcgcagctgacgccccgcggccccgcgaagaccccggccggccggtcccggaggaagcggccgccgccgccgccgcccagcccagcgcccgcgccgcccgggcaccatggcggggaaggcggccgccccgggcaccgcggtgctgctggtcacggccaacgtgggctcgctcttcgacgacccagaaaacctgcagaagaactggcttcgggaattttaccaggtcgtgcacacacacaagccgcacttcatggccttgcactgtcaggagtttggagggaagaactacgaggcctccatgtcccacgtggacaagttcgtcaaagaactattgtcgagtgatgcgatgaaagaatataacagggctcgagtctacctggatgaaaactacaaatcccaggagcacttcacggcactaggaagcttttattttcttcatgagtccttaaaaaacatctaccagtttgactttaaagctaagaagtatagaaaggtcgctggcaaagagatctactcggataccttagagagcacgcccatgctggagaaggagaagtttccgcaggactacttccccgagtgcaaatggtcaagaaaaggcttcatccggacgaggtggtgcattgcagactgtgcctttgacttggtgaatatccatcttttccatgatgcttccaatctggtcgcctgggaaacaagcccttccgtgtactcgggaatccggcacaaggcactgggctacgtgctggacagaatcattgatcagcgattcgagaaggtttcctactttgtatttggtgatttcaacttccggctggattccaagtccgtcgtggagacgctctgcacaaaagccaccatgcagacggtccgggccgccgacaccaatgaagtggtgaagctcatatttcgtgagtcggacaacgaccggaaggttatgctccagttagaaaagaaactcttcgactacttcaaccaggaggttttccgagacaacaacggcaccgcgctcttggagtttgacaaggagttgtctgtctttaaggacagactgtatgaactggacatctcgttccctcccagctacccgtacagtgaggacgcccgccagggtgagcagtacatgaacacccggtgcccagcctggtgtgaccgcatcctcatgtccccgtctgccaaggagctggtgctgcgggtgagtgtgtgctgccccagccctgggcacagagggatgtggagcgctgggtctggtctggcccagccctggtgacagggccccaggggtgggg

SEQ ID NO: 20705 - protein, 387 aa, Homo sapiens; identical to SEQ ID NO: 20703

SEQ ID NO: 20706 - DNA, 2783 bp, Homo sapiens
ccccgcggccccgcgaagaccccggccggccggtcccggaggaagcggccgccgccgccgccgcccagcccagcgcccgcgccgcccgggcaccatggcggggaaggcggccgccccgggcaccgcggtgctgctggtcacggccaacgtgggctcgctcttcgacgacccagaaaacctgcagaagaactggcttcgggaattttaccaggtcgtgcacacacacaagccgcacttcatggccttgcactgtcaggagtttggagggaagaactacgaggcctccatgtcccacgtggacaagttcgtcaaagaactattgtcgagtgatgcgatgaaagaatataacagggctcgagtctacctggatgaaaactacaaatcccaggagcacttcacggcactaggaagcttttattttcttcatgagtccttaaaaaacatctaccagtttgactttaaagctaagaagtatagaaaggtcgctggcaaagagatctactcggataccttagagagcacgcccatgctggagaaggagaagtttccgcaggactacttccccgagtgcaaatggtcaagaaaaggcttcatccggacgaggtggtgcattgcagactgtgcctttgacttggtgaatatccatcttttccatgatgcttccaatctggtcgcctgggaaacaagcccttccgtgtactcgggaatccggcacaaggcactgggctacgtgctggacagaatcattgatcagcgattcgagaaggtttcctactttgtatttggtgatttcaacttccggctggattccaagtccgtcgtggagacgctctgcacaaaagccaccatgcagacggtccgggccgccgacaccaatgaagtggtgaagctcatatttcgtgagtcggacaacgaccggaaggttatgctccagttagaaaagaaactcttcgactacttcaaccaggaggttttccgagacaacaacggcaccgcgctcttggagtttgacaaggagttgtctgtctttaaggacagactgtatgaactggacatctcgttccctcccagctacccgtacagtgaggacgcccgccagggtgagcagtacatgaacacccggtgcccagcctggtgtgaccgcatcctcatgtccccgtctgccaaggagctggtgctgcggtcggagagcgaggagaaggttgtcacctatgaccacattgggcccaacgtctgcatgggagaccacaagcccgtgttcctggccttccgaatcatgcccggggcaggtaaacctcatgcccatgtgcacaagtgttgtgtcgtgcagtgacgtggtgggaagagatgccagcgccacgagaggacacttcgtgagcctccctgtagccgtggaccgaatacgcactcttgaaagctgcatcgagaacccgcccaagcgccacctgctagacggccagccccacacttcgcttcagcctccggaccattccggagcagcctcacatacctcactgtctcgtctgtctatgtgacattaagtagaaatattggttttttttttttttttttaaataagtcacagtcctgttgtcaaaactctaatagacagcaaagagggtctgtaccgtagacttcacagttttcagtttttaatgattgccagtggaggggcttcttcagcacagagaccccccactgtgtccagggaccccctctgccaggtggaggtgtgtccaggggctggggaagccgagacgggcactccctctgccggccggcagcgtggccctgagcatggcaagggggtctgtctctgccgatgctccttccgcggcactgactctgcgccgtgtcacatggtttttgaatcacactgcagctgctttccatttttatatatatataaatatatataaatatatactttttaaaaataatttataaatcttaccaaaacttatgctaaatatactttccagtatgaacgcacaggagagtcccatcagcaggcggcattggagtctaggagctcagctgtgtgtccatcaacacacaaattcgtaaaaaacacacatggcctcgccatcgtgggtaaaatcggccccacagcacgtctgcaccagcgggccgttactcccatgccgttcttctgtgtaatattaagaactgaatgtgaagtttatagctagcctgggtgtaccttttaagaattttgtaaaccgtttgtctgtcttttgttactgttttatggtgccaagtatcctacgttacaacaataatatcatgggagaaatagaaatagcctagtttgcttccaatagaaactgcttttaacatgggctgtatataaaaatattaaagagaaacaaaactgtacatttcctcattgctccgctacagacaacccatgtcataaccttgttgcaaatatttttctcctatagcagtaagtacagcattagaaggtgattagagagtctgttgatgaaacacaaatgtatgttttattgattttactttagaacactacagagttcctggaccgggtgaaggcattagctgggtgtttgtgtgggataaatactaccactgcaagtgactgctgtccgctgcggaatctgttcttggtggaagcacaggtccgtgtcgctgctgtggttgccgctgtccgcggttcaacacggagtccgccccgcgggtttcagctgttggtcgttctgaggggcctttggaagtgaccggtctggttcctaagcaataaaattgaccgtggtgaaaat

SEQ ID NO: 20707 - protein, 412 aa, Homo sapiens; identical to SEQ ID NO: 2625

SEQ ID NO: 20708 - DNA, 2923 bp, Homo sapiens
ccccgcggccccgcgaagaccccggccggccggtcccggaggaagcggccgccgccgccgccgcccagcccagcgcccgcgccgcccgggcaccatggcggggaaggcggccgccccgggcaccgcggtgctgctggtcacggccaacgtgggctcgctcttcgacgacccagaaaacctgcagaagaactggcttcgggaattttaccaggtcgtgcacacacacaagccgcacttcatggccttgcactgtcaggagtttggagggaagaactacgaggcctccatgtcccacgtggacaagttcgtcaaagaactattgtcgagtgatgcgatgaaagaatataacagggctcgagtctacctggatgaaaactacaaatcccaggagcacttcacggcactaggaagcttttattttcttcatgagtccttaaaaaacatctaccagtttgactttaaagctaagaagtatagaaaggtcgctggcaaagagatctactcggataccttagagagcacgcccatgctggagaaggagaagtttccgcaggactacttccccgagtgcaaatggtcaagaaaaggcttcatccggacgaggtggtgcattgcagactgtgcctttgacttggtgaatatccatcttttccatgatgcttccaatctggtcgcctgggaaacaagcccttccgtgtactcgggaatccggcacaaggcactgggctacgtgctggacagaatcattgatcagcgattcgagaaggtttcctactttgtatttggtgatttcaacttccggctggattccaagtccgtcgtggagacgctctgcacaaaagccaccatgcagacggtccgggccgccgacaccaatgaagtggtgaagctcatatttcgtgagtcggacaacgaccggaaggttatgctccagttagaaaagaaactcttcgactacttcaaccaggaggttttccgagacaacaacggcaccgcgctcttggagtttgacaaggagttgtctgtctttaaggacagactgtatgaactggacatctcgttccctcccagctacccgtacagtgaggacgcccgccagggtgagcagtacatgaacacccggtgcccagcctggtgtgaccgcatcctcatgtccccgtctgccaaggagctggtgctgcggtcggagagcgaggagaaggttgtcacctatgaccacattgggcccaacgtctgcatgggagaccacaagcccgtgttcctggccttccgaatcatgcccggggcaggtaaacctcatgcccatgtgcacaagtgttgtgtcgtgcagtgacgtggtgggaagagatgccagcgccacgagaggacacttcgtgagcctccctgtagccgtggaccgaatacgcactcttgaaagctgcatcgagaacccgcccaagcgccacctgctagacggccagccccacacttcgcttcagcctccggaccattccggagcagcctcacatacctcactgtctcgtctgtctatgtgacattaagtagaaatattggttttttttttttttttttaaataagtcacagtcctgttgtcaaaactctaatagacagcaaagagggtctgtaccgtagacttcacagttttcagtttttaatgattgccagtggaggggcttcttcagcacagagaccccccactgtgtccagggaccccctctgccaggtggaggtgtgtccaggggctggggaagccgagacgggcactccctctgccggccggcagcgtggccctgagcatggcaagggggtctgtctctgccgatgctccttccgcggcactgactctgcgccgtgtcacatggtttttgaatcacactgcagctgctttccatttttatatatatataaatatatataaatatatactttttaaaaataatttataaatcttaccaaaacttatgctaaatatactttccagtatgaacgcacaggagagtcccatcagcaggcggcattggagtctaggagctcagctgtgtgtccatcaacacacaaattcgtaaaaaacacacatggcctcgccatcgtgggtaaaatcggccccacagcacgtctgcaccagcgggccgttactcccatgccgttcttctgtgtaatattaagaactgaatgtgaagtttatagctagcctgggtgtaccttttaagaattttgtaaaccgtttgtctgtcttttgttactgttttatggtgccaagtatcctacgttacaacaataatatcatgggagaaatagaaatagcctagtttgcttccaatagaaactgcttttaacatgggctgtatataaaaatattaaagagaaacaaaactgtacatttcctcattgctccgctacagacaacccatgtcataaccttgttgcaaatatttttctcctatagcagtaagtacagcattagaaggtgattagagagtctgttgatgaaacacaaatgtatgttttattgattttactttagaacactacagagttcctggaccgggtgaaggcattagctgggtgtttgtgtgggataaatactaccactgcaagtgactgctgtccgctgcggaatctgttcttggtggaagcacaggtccgtgtcgctgctgtggttgccgctgtccgcggttcaacacggagtccgccccgcgggtttcagctgttggtcgttctgaggggcctttggaagtgaccggtctggttcctaagcaataaaattgaccgtggtgaaaatagtcccgtgttgctttttcttcctttcccttctcctgccacctttgaaatgctaactcaggggagcggcctcctgtatagcctgttatttgagatcaagctcattagaaatcctggaatttcactgtatcacacgctgtc

SEQ ID NO: 20709 - protein, 412 aa, Homo sapiens; identical to SEQ ID NO: 2625

SEQ ID NO: 20710 - DNA, 367 bp, Homo sapiens
cggccgccccgggcaccgcggtgctgctggtcacggccaacgtgggctcgctcttcgacgacccagaaaacctgcagaagaactggcttcgggaattttaccaggtcgtgcacacacacaagccgcacttcatggccttgcactgtcaggagtttggagggaagaactacgaggcctccatgtcccacgtggacaagttcgtcaaagaactattgtcgagtgatgcgatgaaagaatataacagggctcgagtctacctggatgaaaactacaaatcccaggagcacttcacggggcttattcagatgaaaaagaaaaacaccactgggggagcagcaaattagacattgcagaagaaaagagaagg

SEQ ID NO: 20711 - protein, 70 aa, Homo sapiens
MALHCQEFGGKNYEASMSHVDKFVKELLSSDAMKEYNRARVYLDENYKSQEHFTGLIQMKKKNTTGGAAN

SEQ ID NO: 20712 - DNA, 568 bp, Homo sapiens
agagtttggaatgtccctgcgtattttatagagtgagatggtacatatctaaagatttattttaattcttaaaaaaattttgttttgttttgttttcgagtcaaggtctcagctctgttgtccaggctggtgtgcatggcatggtcacggcttactgcagccttgaccttctgggcacaagggatcctcctgcctcagtctccctgagtgctgggattacaggcatgcaccaccacacctggccagttttaagtctgaccctaaacaactcaaggaataagccaaaggcttctctgaagcactttcatccagtcacttttaaccccatagtttgtggcaacacactccctgatgtgcacagtttgtaaggtatttggagtttatgggcccacctcaacacaaccttcccagatagctttggatttgtgtgtttagacagtggaacagatccaggccgaggcattaccttttggcccagatgtctaaaacaggcaagacaaaagccttcctgtgtgtgttgcgccgttgtgtgtgggtctccgtgcatgtgtgtatgtgaatgcgtgtg

SEQ ID NO: 20713 - protein, 75 aa, Homo sapiens [sequence omitted]

SEQ ID NO: 20714 - DNA, 4908 bp, Homo sapiens
agaggggaaaagaacgtcaggagagtgaacgggagcaaataaaacgctgtccattctgactggaagggccagagccgtgtctaagggcgggggccgggaggtggcccgcggtggtgtctctaccaggacgaggcctggggtatctgaagaggggatgacgtccaggcgctttgctaaagggaagccagaagggtatgagttgctagggtcagagatggggctttcggctcgagtctttccctgcagggcagagagtccgaagagcccgagaaggcagggaggacagtgggcctggtccttccccggccggcagagggagtcccgagatggaacgtccagctctcctctaacgaaaagcgtttgcatggctgtctcgccaattctgtacctcccggggctgaggaagagccgaggtgactagaagctagcgacaagtgccggccacctccgacgccaggcgccgggcttggagcccgacgggccgaattctcgcgagagcggccgccgccatttttccattgattgcagcgggctgggggaggggccgacgacgaaggcggctgtggtagcggcggcggcggcggcggagccctgggtcggtgtctgcgcgctggtgtctgaggcccaggctgaggcctccgctattgctggagcgcaggcggcggagaggatgactgccgctgccattctctcttgagctagcgagccgccgccaccctccaccctcccccggcagggcggagaggagcggccggagtcagcgatggtgcccggcgaggagaaccaactggtcccgaaagaggcaccactggatcataccagtgacaagtcacttctcgacgctaattttgagccaggaaagaagaactttctgcatttgacagataaagatggtgaacaacctcaaatactgctggaggattccagtgctggggaagacagtgttcatgacaggtttataggtccgcttccaagagaaggttctgggggttctaccagtgattatgtcagccaaagctactcctactcatctattttgaataaatcagaaactggatatgtgggactagtaaaccaagcaatgacttgctatttgaatagccttttgcaaacactttttatgactcctgaatttaggaatgcattatataagtgggaatttgaagaatctgaagaagatccagtgacaagtattccataccaacttcaaaggctttttgttttgttacaaaccagcaaaaagagagcaattgaaaccacagatgttacaaggagctttggatgggatagtagtgaggcttggcagcagcatgatgtacaagaactatgcagagtcatgtttgatgctttggaacagaaatggaagcaaacagaacaggctgatcttataaatgagctatatcaaggcaagctgaaggactacgtgagatgtctggaatgtggttatgagggctggcgaatcgacacatatcttgatattccattggtcatccgaccttatgggtccagccaagcatttgctagtgtggaagaagcattgcatgcatttattcagccagagattctggatggcccaaatcagtatttttgtgaacgttgtaagaagaagtgtgatgcacggaagggccttcggtttttgcattttccttatctgctgaccttacagctgaaaagattcgattttgattatacaaccatgcataggattaaactgaatgatcgaatgacatttcccgaggaactagatatgagtacttttattgatgttgaagatgagaaatctcctcagactgaaagttgcactgacagtggagcagaaaatgaaggtagttgtcacagtgatcagatgagcaacgatttctccaatgatgatggtgttgatgaaggaatctgtcttgaaaccaatagtggaactgaaaagatctcaaaatctggacttgaaaagaattccttgatctatgaacttttctctgttatggttcattctgggagcgctgctggtggtcattattatgcatgtataaagtcattcagtgatgagcagtggtacagcttcaatgatcaacatgtcagcaggataacacaagaggacattaagaaaacacatggtggatcttcaggaagcagaggatattattctagtgctttcgcaagttccacaaatgcatatatgctgatctatagactgaaggatccagccagaaatgcaaaatttctagaagtggatgaatacccagaacatattaaaaacttggtgcagaaagagagagagttggaagaacaagaaaagagacaacgagaaattgagcgcaatacatgcaagataaaattattctgtttgcatcctacaaaacaagtaatgatggaaaataaattggaggttcataaggataagacattaaaggaagcagtagaaatggcttataagatgatggatttagaagaggtaatacccctggattgctgtcgccttgttaaatatgatgagtttcatgattatctagaacggtcatatgaaggagaagaagatacaccaatggggcttctactaggtggcgtcaagtcaacatatatgtttgatctgctgttggagacgagaaagcctgatcaggttttccaatcttataaacctggagaagtgatggtgaaagttcatgttgttgatctaaaggcagaatctgtagctgctcctataactgttcgtgcttacttaaatcagacagttacagaattcaaacaactgatttcaaaggccatccatttacctgctgaaacaatgagaatagtgctggaacgctgctacaatgatttgcgtcttctcagtgtctccagtaaaaccctgaaagctgaaggattttttagaagtaacaaggtgtttgttgaaagctccgagactttggattaccagatggcctttgcagactctcatttatggaaactcctggatcggcatgcaaatacaatcagattatttgttttgctacctgaacaatccccagtatcttattccaaaaggacagcataccagaaagctggaggcgattctggtaatgtggatgatgactgtgaaagagtcaaaggacctgtaggaagcctaaagtctgtggaagctattctagaagaaagcactgaaaaactcaaaagcttgtcactgcagcaacagcaggatggagataatggggacagcagcaaaagtactgagacaagtgactttgaaaacatcgaatcacctctcaatgagagggactcttcagcatcagtggataatagagaacttgaacagcatattcagacttctgatccagaaaattttcagtctgaagaacgatcagactcagatgtgaataatgacaggagtacaagttcagtggacagtgatattcttagctccagtcatagcagtgatactttgtgcaatgcagacaatgctcagatccctttggctaatggacttgactctcacagtatcacaagtagtagaagaacgaaagcaaatgaagggaaaaaagaaacatgggatacagcagaagaagactctggaactgatagtgaatatgatgagagtggcaagagtaggggagaaatgcagtacatgtatttcaaagctgaaccttatgctgcagatgaaggttctggggaaggacataaatggttgatggtgcatgttgataaaagaattactctggcagctttcaaacaacatttagagccctttgttggagttttgtcctctcacttcaaggtctttcgagtgtatgccagcaatcaagagtttgagagcgtccggctgaatgagacactttcatcattttctgatgacaataagattacaattagactggggagagcacttaaaaaaggagaatacagagttaaagtataccagcttttggtcaatgaacaagagccatgcaagtttctgctagatgctgtgtttgctaaaggaatgactgtacggcaatcaaaagaggaattaattcctcagctcagggagcaatgtggtttagagctcagtattgacaggtttcgtctaaggaaaaaaacatggaagaatcctggcactgtctttttggattatcatatttatgaagaagatattaatatttccagcaactgggaggttttccttgaagttcttgatggggtagagaagatgaagtccatgtcacagcttgcagttttgtcaagacggtggaagccttcagagatgaagttggatcccttccaggaggttgtattggaaagcagtagtgtggacgaattgcgagagaagcttagtgaaatcagtgggattcctttggatgatattgaatttgctaagggtagaggaacatttccctgtgatatttctgtccttgatattcatcaggatttagactggaatcctaaagtttctaccctgaatgtctggcctctttatatctgtgatgatggtgcggtcatattttatagggataaaacagaagaattaatggaattgacagatgagcaaagaaatgaactgatgaaaaaagaaagcagtcgactccagaagactggacatcgtgtaacatactcacctcgtaaagagaaagcactaaaaatatatctggatggagcaccaaataaagatctgactcaagactgactctgatagtgtagcattttccctgggggagttttggttttaattagatggttcactaccactgggtagtgccattttggccggacatggttggggtaacccagtgacaccagcactgattggactgccctacaccaatcagaagctcagtgcccaatgggccactgttttgactcggaatcatgttgtgcactatagtcaaatgtactgtaaagtgaaaagggatgtgcaaaaaaataaaaaaaaacaacaaaaaaagctaaccttctattagaaaaggg

SEQ ID NO: 20715 - protein, 1287 aa, Homo sapiens; identical to SEQ ID NO: 2627

SEQ ID NO: 20716 - DNA, 5024 bp, Homo sapiens
agaggggaaaagaacgtcaggagagtgaacgggagcaaataaaacgctgtccattctgactggaagggccagagccgtgtctaagggcgggggccgggaggtggcccgcggtggtgtctctaccaggacgaggcctggggtatctgaagaggggatgacgtccaggcgctttgctaaagggaagccagaagggtatgagttgctagggtcagagatggggctttcggctcgagtctttccctgcagggcagagagtccgaagagcccgagaaggcagggaggacagtgggcctggtccttccccggccggcagagggagtcccgagatggaacgtccagctctcctctaacgaaaagcgtttgcatggctgtctcgccaattctgtacctcccggggctgaggaagagccgaggtgactagaagctagcgacaagtgccggccacctccgacgccaggcgccgggcttggagcccgacgggccgaattctcgcgagagcggccgccgccatttttccattgattgcagcgggctgggggaggggccgacgacgaaggcggctgtggtagcggcggcggcggcggcggagccctgggtcggtgtctgcgcgctggtgtctgaggcccaggctgaggcctccgctattgctggagcgcaggcggcggagaggatgactgccgctgccattctctcttgagctagcgagccgccgccaccctccaccctcccccggcagggcggagaggagcggccggagtcagcgatggtgcccggcgaggagaaccaactggtcccgaaagaggcaccactggatcataccagtgacaagtcacttctcgacgctaattttgagccaggaaagaagaactttctgcatttgacagataaagatggtgaacaacctcaaatactgctggaggattccagtgctggggaagacagtgttcatgacaggtttataggtccgcttccaagagaaggttctgggggttctaccagtgattatgtcagccaaagctactcctactcatctattttgaataaatcagaaactggatatgtgggactagtaaaccaagcaatgacttgctatttgaatagccttttgcaaacactttttatgactcctgaatttaggaatgcattatataagtgggaatttgaagaatctgaagaagatccagtgacaagtattccataccaacttcaaaggctttttgttttgttacaaaccagcaaaaagagagcaattgaaaccacagatgttacaaggagctttggatgggatagtagtgaggcttggcagcagcatgatgtacaagaactatgcagagtcatgtttgatgctttggaacagaaatggaagcaaacagaacaggctgatcttataaatgagctatatcaaggcaagctgaaggactacgtgagatgtctggaatgtggttatgagggctggcgaatcgacacatatcttgatattccattggtcatccgaccttatgggtccagccaagcatttgctagtgtggaagaagcattgcatgcatttattcagccagagattctggatggcccaaatcagtatttttgtgaacgttgtaagaagaagtgtgatgcacggaagggccttcggtttttgcattttccttatctgctgaccttacagctgaaaagattcgattttgattatacaaccatgcataggattaaactgaatgatcgaatgacatttcccgaggaactagatatgagtacttttattgatgttgaagatgagaaatctcctcagactgaaagttgcactgacagtggagcagaaaatgaaggtagttgtcacagtgatcagatgagcaacgatttctccaatgatgatggtgttgatgaaggaatctgtcttgaaaccaatagtggaactgaaaagatctcaaaatctggacttgaaaagaattccttgatctatgaacttttctctgttatggttcattctgggagcgctgctggtggtcattattatgcatgtataaagtcattcagtgatgagcagtggtacagcttcaatgatcaacatgtcagcaggataacacaagaggacattaagaaaacacatggtggatcttcaggaagcagaggatattattctagtgctttcgcaagttccacaaatgcatatatgctgatctatagactgaaggatccagccagaaatgcaaaatttctagaagtggatgaatacccagaacatattaaaaacttggtgcagaaagagagagagttggaagaacaagaaaagagacaacgagaaattgagcgcaatacatgcaagataaaattattctgtttgcatcctacaaaacaagtaatgatggaaaataaattggaggttcataaggataagacattaaaggaagcagtagaaatggcttataagatgatggatttagaagaggtaatacccctggattgctgtcgccttgttaaatatgatgagtttcatgattatctagaacggtcatatgaaggagaagaagatacaccaatggggcttctactaggtggcgtcaagtcaacatatatgtttgatctgctgttggagacgagaaagcctgatcaggttttccaatcttataaacctggagaagtgatggtgaaagttcatgttgttgatctaaaggcagaatctgtagctgctcctataactgttcgtgcttacttaaatcagacagttacagaattcaaacaactgatttcaaaggccatccatttacctgctgaaacaatgagaatagtgctggaacgctgctacaatgatttgcgtcttctcagtgtctccagtaaaaccctgaaagctgaaggattttttagaagtaacaaggtgtttgttgaaagctccgagactttggattaccagatggcctttgcagactctcatttatggaaactcctggatcggcatgcaaatacaatcagattatttgttttgctacctgaacaatccccagtatcttattccaaaaggacagcataccagaaagctggaggcgattctggtaatgtggatgatgactgtgaaagagtcaaaggacctgtaggaagcctaaagtctgtggaagctattctagaagaaagcactgaaaaactcaaaagcttgtcactgcagcaacagcaggatggagataatggggacagcagcaaaagtactgagacaagtgactttgaaaacatcgaatcacctctcaatgagagggactcttcagcatcagtggataatagagaacttgaacagcatattcagacttctgatccagaaaattttcagtctgaagaacgatcagactcagatgtgaataatgacaggagtacaagttcagtggacagtgatattcttagctccagtcatagcagtgatactttgtgcaatgcagacaatgctcagatccctttggctaatggacttgactctcacagtatcacaagtagtagaagaacgaaagcaaatgaagggaaaaaagaaacatgggatacagcagaagaagactctggaactgatagtgaatatgatgagagtggcaagagtaggggagaaatgcagtacatgtatttcaaagctgaaccttatgctgcagatgaaggttctggggaaggacataaatggttgatggtgcatgttgataaaagaattactctggcagctttcaaacaacatttagagccctttgttggagttttgtcctctcacttcaaggtctttcgagtgtatgccagcaatcaagagtttgagagcgtccggctgaatgagacactttcatcattttctgatgacaataagattacaattagactggggagagcacttaaaaaaggagaatacagagttaaagtataccagcttttggtcaatgaacaagagccatgcaagtttctgctagatgctgtgtttgctaaaggaatgactgtacggcaatcaaaagaggaattaattcctcagctcagggagcaatgtggtttagagctcagtattgacaggtttcgtctaaggaaaaaaacatggaagaatcctggcactgtctttttggattatcatatttatgaagaagatattaatatttccagcaactgggaggttttccttgaagttcttgatggggtagagaagatgaagtccatgtcacagcttgcagttttgtcaagacggtggaagccttcagagatgaagttggatcccttccaggaggttgtattggaaagcagtagtgtggacgaattgcgagagaagcttagtgaaatcagtgggattcctttggatgatattgaatttgctaagggtagaggaacatttccctgtgatatttctgtccttgatattcatcaggatttagactggaatcctaaagtttctaccctgaatgtctggcctctttatatctgtgatgatggtgcggtcatattttatagggataaaacagaagaattaatggaattgacagatgagcaaagaaatgaactgatgaaaaaagaaagcagtcgactccagaagactggacatcgtgtaacatactcacctcgtaaagagaaagcactaaaaatatatctggatggagcaccaaataaagatctgactcaagactgactctgatagtgtagcattttccctgggggagttttggttttaattagatggttcactaccactgggtagtgccattttggccggacatggttggggtaacccagtgacaccagcactgattggactgccctacaccaatcagaagctcagtgcccaatgggccactgttttgactcggaatcatgttgtgcactatagtcaaatgtactgtaaagtgaaaagggatgtgcaaaaaaataaaaaaaaacaacaaaaaaagctaaccttctattagaaaaggggacaggggaatgagtaaacttcttttattgcggacaaatgtgcacatagccgctagtaaaactagcctcaaacaggatgctcatagcttaataataaaagctgtgcaaaggccatg

SEQ ID NO: 20717 - protein, 1287 aa, Homo sapiens; identical to SEQ ID NO: 2627

SEQ ID NO: 20718 - DNA, 5401 bp, Homo sapiens
agaggggaaaagaacgtcaggagagtgaacgggagcaaataaaacgctgtccattctgactggaagggccagagccgtgtctaagggcgggggccgggaggtggcccgcggtggtgtctctaccaggacgaggcctggggtatctgaagaggggatgacgtccaggcgctttgctaaagggaagccagaagggtatgagttgctagggtcagagatggggctttcggctcgagtctttccctgcagggcagagagtccgaagagcccgagaaggcagggaggacagtgggcctggtccttccccggccggcagagggagtcccgagatggaacgtccagctctcctctaacgaaaagcgtttgcatggctgtctcgccaattctgtacctcccggggctgaggaagagccgaggtgactagaagctagcgacaagtgccggccacctccgacgccaggcgccgggcttggagcccgacgggccgaattctcgcgagagcggccgccgccatttttccattgattgcagcgggctgggggaggggccgacgacgaaggcggctgtggtagcggcggcggcggcggcggagccctgggtcggtgtctgcgcgctggtgtctgaggcccaggctgaggcctccgctattgctggagcgcaggcggcggagaggatgactgccgctgccattctctcttgagctagcgagccgccgccaccctccaccctcccccggcagggcggagaggagcggccggagtcagcgatggtgcccggcgaggagaaccaactggtcccgaaagaggcaccactggatcataccagtgacaagtcacttctcgacgctaattttgagccaggaaagaagaactttctgcatttgacagataaagatggtgaacaacctcaaatactgctggaggattccagtgctggggaagacagtgttcatgacaggtttataggtccgcttccaagagaaggttctgggggttctaccagtgattatgtcagccaaagctactcctactcatctattttgaataaatcagaaactggatatgtgggactagtaaaccaagcaatgacttgctatttgaatagccttttgcaaacactttttatgactcctgaatttaggaatgcattatataagtgggaatttgaagaatctgaagaagatccagtgacaagtattccataccaacttcaaaggctttttgttttgttacaaaccagcaaaaagagagcaattgaaaccacagatgttacaaggagctttggatgggatagtagtgaggcttggcagcagcatgatgtacaagaactatgcagagtcatgtttgatgctttggaacagaaatggaagcaaacagaacaggctgatcttataaatgagctatatcaaggcaagctgaaggactacgtgagatgtctggaatgtggttatgagggctggcgaatcgacacatatcttgatattccattggtcatccgaccttatgggtccagccaagcatttgctagtgtggaagaagcattgcatgcatttattcagccagagattctggatggcccaaatcagtatttttgtgaacgttgtaagaagaagtgtgatgcacggaagggccttcggtttttgcattttccttatctgctgaccttacagctgaaaagattcgattttgattatacaaccatgcataggattaaactgaatgatcgaatgacatttcccgaggaactagatatgagtacttttattgatgttgaagatgagaaatctcctcagactgaaagttgcactgacagtggagcagaaaatgaaggtagttgtcacagtgatcagatgagcaacgatttctccaatgatgatggtgttgatgaaggaatctgtcttgaaaccaatagtggaactgaaaagatctcaaaatctggacttgaaaagaattccttgatctatgaacttttctctgttatggttcattctgggagcgctgctggtggtcattattatgcatgtataaagtcattcagtgatgagcagtggtacagcttcaatgatcaacatgtcagcaggataacacaagaggacattaagaaaacacatggtggatcttcaggaagcagaggatattattctagtgctttcgcaagttccacaaatgcatatatgctgatctatagactgaaggatccagccagaaatgcaaaatttctagaagtggatgaatacccagaacatattaaaaacttggtgcagaaagagagagagttggaagaacaagaaaagagacaacgagaaattgagcgcaatacatgcaagataaaattattctgtttgcatcctacaaaacaagtaatgatggaaaataaattggaggttcataaggataagacattaaaggaagcagtagaaatggcttataagatgatggatttagaagaggtaatacccctggattgctgtcgccttgttaaatatgatgagtttcatgattatctagaacggtcatatgaaggagaagaagatacaccaatggggcttctactaggtggcgtcaagtcaacatatatgtttgatctgctgttggagacgagaaagcctgatcaggttttccaatcttataaacctggagaagtgatggtgaaagttcatgttgttgatctaaaggcagaatctgtagctgctcctataactgttcgtgcttacttaaatcagacagttacagaattcaaacaactgatttcaaaggccatccatttacctgctgaaacaatgagaatagtgctggaacgctgctacaatgatttgcgtcttctcagtgtctccagtaaaaccctgaaagctgaaggattttttagaagtaacaaggtgtttgttgaaagctccgagactttggattaccagatggcctttgcagactctcatttatggaaactcctggatcggcatgcaaatacaatcagattatttgttttgctacctgaacaatccccagtatcttattccaaaaggacagcataccagaaagctggaggcgattctggtaatgtggatgatgactgtgaaagagtcaaaggacctgtaggaagcctaaagtctgtggaagctattctagaagaaagcactgaaaaactcaaaagcttgtcactgcagcaacagcaggatggagataatggggacagcagcaaaagtactgagacaagtgactttgaaaacatcgaatcacctctcaatgagagggactcttcagcatcagtggataatagagaacttgaacagcatattcagacttctgatccagaaaattttcagtctgaagaacgatcagactcagatgtgaataatgacaggagtacaagttcagtggacagtgatattcttagctccagtcatagcagtgatactttgtgcaatgcagacaatgctcagatccctttggctaatggacttgactctcacagtatcacaagtagtagaagaacgaaagcaaatgaagggaaaaaagaaacatgggatacagcagaagaagactctggaactgatagtgaatatgatgagagtggcaagagtaggggagaaatgcagtacatgtatttcaaagctgaaccttatgctgcagatgaaggttctggggaaggacataaatggttgatggtgcatgttgataaaagaattactctggcagctttcaaacaacatttagagccctttgttggagttttgtcctctcacttcaaggtctttcgagtgtatgccagcaatcaagagtttgagagcgtccggctgaatgagacactttcatcattttctgatgacaataagattacaattagactggggagagcacttaaaaaaggagaatacagagttaaagtataccagcttttggtcaatgaacaagagccatgcaagtttctgctagatgctgtgtttgctaaaggaatgactgtacggcaatcaaaagaggaattaattcctcagctcagggagcaatgtggtttagagctcagtattgacaggtttcgtctaaggaaaaaaacatggaagaatcctggcactgtctttttggattatcatatttatgaagaagatattaatatttccagcaactgggaggttttccttgaagttcttgatggggtagagaagatgaagtccatgtcacagcttgcagttttgtcaagacggtggaagccttcagagatgaagttggatcccttccaggaggttgtattggaaagcagtagtgtggacgaattgcgagagaagcttagtgaaatcagtgggattcctttggatgatattgaatttgctaagggtagaggaacatttccctgtgatatttctgtccttgatattcatcaggatttagactggaatcctaaagtttctaccctgaatgtctggcctctttatatctgtgatgatggtgcggtcatattttatagggataaaacagaagaattaatggaattgacagatgagcaaagaaatgaactgatgaaaaaagaaagcagtcgactccagaagactggacatcgtgtaacatactcacctcgtaaagagaaagcactaaaaatatatctggatggagcaccaaataaagatctgactcaagactgactctgatagtgtagcattttccctgggggagttttggttttaattagatggttcactaccactgggtagtgccattttggccggacatggttggggtaacccagtgacaccagcactgattggactgccctacaccaatcagaagctcagtgcccaatgggccactgttttgactcggaatcatgttgtgcactatagtcaaatgtactgtaaagtgaaaagggatgtgcaaaaaaataaaaaaaaacaacaaaaaaagctaaccttctattagaaaaggggacaggggaatgagtaaacttcttttattgcggacaaatgtgcacatagccgctagtaaaactagcctcaaacaggatgctcatagcttaataataaaagctgtgcaaaggccatgaatgaatgaattttctgtttatttcactgatgcacacattacctcattgacaattcagaagtaaatccaacgtgtgttgactcttggaaagcagcaaaaacaggagctgaagaaaagaaattcttggaaccagccgtaacccagtaaggaattgtgaagttgtgtttttattttgtttcattttttgcagagtattaagaacattattctggaacatcagaacgtttcccttagaccgatcccagcaggtggcagctcagattgctgcagtgttgtaattataactgattgtacttaagttatggatgtagagaatatgtttcattcatttattcagcatgtaaataaaattgatcctgttgagttatcataattgc

SEQ ID NO: 20719 - protein, 1287 aa, Homo sapiens; identical to SEQ ID NO: 2627

SEQ ID NO: 20720 - DNA, 5976 bp, Homo sapiens
agaggggaaaagaacgtcaggagagtgaacgggagcaaataaaacgctgtccattctgactggaagggccagagccgtgtctaagggcgggggccgggaggtggcccgcggtggtgtctctaccaggacgaggcctggggtatctgaagaggggatgacgtccaggcgctttgctaaagggaagccagaagggtatgagttgctagggtcagagatggggctttcggctcgagtctttccctgcagggcagagagtccgaagagcccgagaaggcagggaggacagtgggcctggtccttccccggccggcagagggagtcccgagatggaacgtccagctctcctctaacgaaaagcgtttgcatggctgtctcgccaattctgtacctcccggggctgaggaagagccgaggtgactagaagctagcgacaagtgccggccacctccgacgccaggcgccgggcttggagcccgacgggccgaattctcgcgagagcggccgccgccatttttccattgattgcagcgggctgggggaggggccgacgacgaaggcggctgtggtagcggcggcggcggcggcggagccctgggtcggtgtctgcgcgctggtgtctgaggcccaggctgaggcctccgctattgctggagcgcaggcggcggagaggatgactgccgctgccattctctcttgagctagcgagccgccgccaccctccaccctcccccggcagggcggagaggagcggccggagtcagcgatggtgcccggcgaggagaaccaactggtcccgaaagaggcaccactggatcataccagtgacaagtcacttctcgacgctaattttgagccaggaaagaagaactttctgcatttgacagataaagatggtgaacaacctcaaatactgctggaggattccagtgctggggaagacagtgttcatgacaggtttataggtccgcttccaagagaaggttctgggggttctaccagtgattatgtcagccaaagctactcctactcatctattttgaataaatcagaaactggatatgtgggactagtaaaccaagcaatgacttgctatttgaatagccttttgcaaacactttttatgactcctgaatttaggaatgcattatataagtgggaatttgaagaatctgaagaagatccagtgacaagtattccataccaacttcaaaggctttttgttttgttacaaaccagcaaaaagagagcaattgaaaccacagatgttacaaggagctttggatgggatagtagtgaggcttggcagcagcatgatgtacaagaactatgcagagtcatgtttgatgctttggaacagaaatggaagcaaacagaacaggctgatcttataaatgagctatatcaaggcaagctgaaggactacgtgagatgtctggaatgtggttatgagggctggcgaatcgacacatatcttgatattccattggtcatccgaccttatgggtccagccaagcatttgctagtgtggaagaagcattgcatgcatttattcagccagagattctggatggcccaaatcagtatttttgtgaacgttgtaagaagaagtgtgatgcacggaagggccttcggtttttgcattttccttatctgctgaccttacagctgaaaagattcgattttgattatacaaccatgcataggattaaactgaatgatcgaatgacatttcccgaggaactagatatgagtacttttattgatgttgaagatgagaaatctcctcagactgaaagttgcactgacagtggagcagaaaatgaaggtagttgtcacagtgatcagatgagcaacgatttctccaatgatgatggtgttgatgaaggaatctgtcttgaaaccaatagtggaactgaaaagatctcaaaatctggacttgaaaagaattccttgatctatgaacttttctctgttatggttcattctgggagcgctgctggtggtcattattatgcatgtataaagtcattcagtgatgagcagtggtacagcttcaatgatcaacatgtcagcaggataacacaagaggacattaagaaaacacatggtggatcttcaggaagcagaggatattattctagtgctttcgcaagttccacaaatgcatatatgctgatctatagactgaaggatccagccagaaatgcaaaatttctagaagtggatgaatacccagaacatattaaaaacttggtgcagaaagagagagagttggaagaacaagaaaagagacaacgagaaattgagcgcaatacatgcaagataaaattattctgtttgcatcctacaaaacaagtaatgatggaaaataaattggaggttcataaggataagacattaaaggaagcagtagaaatggcttataagatgatggatttagaagaggtaatacccctggattgctgtcgccttgttaaatatgatgagtttcatgattatctagaacggtcatatgaaggagaagaagatacaccaatggggcttctactaggtggcgtcaagtcaacatatatgtttgatctgctgttggagacgagaaagcctgatcaggttttccaatcttataaacctggagaagtgatggtgaaagttcatgttgttgatctaaaggcagaatctgtagctgctcctataactgttcgtgcttacttaaatcagacagttacagaattcaaacaactgatttcaaaggccatccatttacctgctgaaacaatgagaatagtgctggaacgctgctacaatgatttgcgtcttctcagtgtctccagtaaaaccctgaaagctgaaggattttttagaagtaacaaggtgtttgttgaaagctccgagactttggattaccagatggcctttgcagactctcatttatggaaactcctggatcggcatgcaaatacaatcagattatttgttttgctacctgaacaatccccagtatcttattccaaaaggacagcataccagaaagctggaggcgattctggtaatgtggatgatgactgtgaaagagtcaaaggacctgtaggaagcctaaagtctgtggaagctattctagaagaaagcactgaaaaactcaaaagcttgtcactgcagcaacagcaggatggagataatggggacagcagcaaaagtactgagacaagtgactttgaaaacatcgaatcacctctcaatgagagggactcttcagcatcagtggataatagagaacttgaacagcatattcagacttctgatccagaaaattttcagtctgaagaacgatcagactcagatgtgaataatgacaggagtacaagttcagtggacagtgatattcttagctccagtcatagcagtgatactttgtgcaatgcagacaatgctcagatccctttggctaatggacttgactctcacagtatcacaagtagtagaagaacgaaagcaaatgaagggaaaaaagaaacatgggatacagcagaagaagactctggaactgatagtgaatatgatgagagtggcaagagtaggggagaaatgcagtacatgtatttcaaagctgaaccttatgctgcagatgaaggttctggggaaggacataaatggttgatggtgcatgttgataaaagaattactctggcagctttcaaacaacatttagagccctttgttggagttttgtcctctcacttcaaggtctttcgagtgtatgccagcaatcaagagtttgagagcgtccggctgaatgagacactttcatcattttctgatgacaataagattacaattagactggggagagcacttaaaaaaggagaatacagagttaaagtataccagcttttggtcaatgaacaagagccatgcaagtttctgctagatgctgtgtttgctaaaggaatgactgtacggcaatcaaaagaggaattaattcctcagctcagggagcaatgtggtttagagctcagtattgacaggtttcgtctaaggaaaaaaacatggaagaatcctggcactgtctttttggattatcatatttatgaagaagatattaatatttccagcaactgggaggttttccttgaagttcttgatggggtagagaagatgaagtccatgtcacagcttgcagttttgtcaagacggtggaagccttcagagatgaagttggatcccttccaggaggttgtattggaaagcagtagtgtggacgaattgcgagagaagcttagtgaaatcagtgggattcctttggatgatattgaatttgctaagggtagaggaacatttccctgtgatatttctgtccttgatattcatcaggatttagactggaatcctaaagtttctaccctgaatgtctggcctctttatatctgtgatgatggtgcggtcatattttatagggataaaacagaagaattaatggaattgacagatgagcaaagaaatgaactgatgaaaaaagaaagcagtcgactccagaagactggacatcgtgtaacatactcacctcgtaaagagaaagcactaaaaatatatctggatggagcaccaaataaagatctgactcaagactgactctgatagtgtagcattttccctgggggagttttggttttaattagatggttcactaccactgggtagtgccattttggccggacatggttggggtaacccagtgacaccagcactgattggactgccctacaccaatcagaagctcagtgcccaatgggccactgttttgactcggaatcatgttgtgcactatagtcaaatgtactgtaaagtgaaaagggatgtgcaaaaaaataaaaaaaaacaacaaaaaaagctaaccttctattagaaaaggggacaggggaatgagtaaacttcttttattgcggacaaatgtgcacatagccgctagtaaaactagcctcaaacaggatgctcatagcttaataataaaagctgtgcaaaggccatgaatgaatgaattttctgtttatttcactgatgcacacattacctcattgacaattcagaagtaaatccaacgtgtgttgactcttggaaagcagcaaaaacaggagctgaagaaaagaaattcttggaaccagccgtaacccagtaaggaattgtgaagttgtgtttttattttgtttcattttttgcagagtattaagaacattattctggaacatcagaacgtttcccttagaccgatcccagcaggtggcagctcagattgctgcagtgttgtaattataactgattgtacttaagttatggatgtagagaatatgtttcattcatttattcagcatgtaaataaaattgatcctgttgagttatcataattgcagttcaactatctgccatgattattcttttcacgtatcattcattctgtacatttgtgtacattgagaagtatagcaatctatgtaaatgtaatcctcagtgaggttcctcagtgctaggtcccataggattgtcgttgcccttgttaatgaggtttctctgttcagcggcttcaatttttttctctttgtacatctagttttgaagatttacttcaagtttgaatcttctagaatgcttgtaagtccagttttaatttttagagtcaatttgtagttacatgtagtttaacttttgggaaacgtcttaacattgttctgaataaacttgctaatgaggtcaggtcatggtacagactgatgcagtcaacatgatttcattgcagagtttattagtatcagcaagtttttgctttgctaaataaaagtactcaatgaacacaattctacataaattttgacataccatctaatttataaaaatcaataaaaaaggttttggtaaaactttttcatgccagatgctgtttacaacaatgaacatgccaataaaacatttgttcattctgttgtgtt

SEQ ID NO: 20721 - protein, 1287 aa, Homo sapiens; identical to SEQ ID NO: 2627

SEQ ID NO: 20722 - DNA, 7605 bp, Homo sapiens
agaggggaaaagaacgtcaggagagtgaacgggagcaaataaaacgctgtccattctgactggaagggccagagccgtgtctaagggcgggggccgggaggtggcccgcggtggtgtctctaccaggacgaggcctggggtatctgaagaggggatgacgtccaggcgctttgctaaagggaagccagaagggtatgagttgctagggtcagagatggggctttcggctcgagtctttccctgcagggcagagagtccgaagagcccgagaaggcagggaggacagtgggcctggtccttccccggccggcagagggagtcccgagatggaacgtccagctctcctctaacgaaaagcgtttgcatggctgtctcgccaattctgtacctcccggggctgaggaagagccgaggtgactagaagctagcgacaagtgccggccacctccgacgccaggcgccgggcttggagcccgacgggccgaattctcgcgagagcggccgccgccatttttccattgattgcagcgggctgggggaggggccgacgacgaaggcggctgtggtagcggcggcggcggcggcggagccctgggtcggtgtctgcgcgctggtgtctgaggcccaggctgaggcctccgctattgctggagcgcaggcggcggagaggatgactgccgctgccattctctcttgagctagcgagccgccgccaccctccaccctcccccggcagggcggagaggagcggccggagtcagcgatggtgcccggcgaggagaaccaactggtcccgaaagaggcaccactggatcataccagtgacaagtcacttctcgacgctaattttgagccaggaaagaagaactttctgcatttgacagataaagatggtgaacaacctcaaatactgctggaggattccagtgctggggaagacagtgttcatgacaggtttataggtccgcttccaagagaaggttctgggggttctaccagtgattatgtcagccaaagctactcctactcatctattttgaataaatcagaaactggatatgtgggactagtaaaccaagcaatgacttgctatttgaatagccttttgcaaacactttttatgactcctgaatttaggaatgcattatataagtgggaatttgaagaatctgaagaagatccagtgacaagtattccataccaacttcaaaggctttttgttttgttacaaaccagcaaaaagagagcaattgaaaccacagatgttacaaggagctttggatgggatagtagtgaggcttggcagcagcatgatgtacaagaactatgcagagtcatgtttgatgctttggaacagaaatggaagcaaacagaacaggctgatcttataaatgagctatatcaaggcaagctgaaggactacgtgagatgtctggaatgtggttatgagggctggcgaatcgacacatatcttgatattccattggtcatccgaccttatgggtccagccaagcatttgctagtgtggaagaagcattgcatgcatttattcagccagagattctggatggcccaaatcagtatttttgtgaacgttgtaagaagaagtgtgatgcacggaagggccttcggtttttgcattttccttatctgctgaccttacagctgaaaagattcgattttgattatacaaccatgcataggattaaactgaatgatcgaatgacatttcccgaggaactagatatgagtacttttattgatgttgaagatgagaaatctcctcagactgaaagttgcactgacagtggagcagaaaatgaaggtagttgtcacagtgatcagatgagcaacgatttctccaatgatgatggtgttgatgaaggaatctgtcttgaaaccaatagtggaactgaaaagatctcaaaatctggacttgaaaagaattccttgatctatgaacttttctctgttatggttcattctgggagcgctgctggtggtcattattatgcatgtataaagtcattcagtgatgagcagtggtacagcttcaatgatcaacatgtcagcaggataacacaagaggacattaagaaaacacatggtggatcttcaggaagcagaggatattattctagtgctttcgcaagttccacaaatgcatatatgctgatctatagactgaaggatccagccagaaatgcaaaatttctagaagtggatgaatacccagaacatattaaaaacttggtgcagaaagagagagagttggaagaacaagaaaagagacaacgagaaattgagcgcaatacatgcaagataaaattattctgtttgcatcctacaaaacaagtaatgatggaaaataaattggaggttcataaggataagacattaaaggaagcagtagaaatggcttataagatgatggatttagaagaggtaatacccctggattgctgtcgccttgttaaatatgatgagtttcatgattatctagaacggtcatatgaaggagaagaagatacaccaatggggcttctactaggtggcgtcaagtcaacatatatgtttgatctgctgttggagacgagaaagcctgatcaggttttccaatcttataaacctggagaagtgatggtgaaagttcatgttgttgatctaaaggcagaatctgtagctgctcctataactgttcgtgcttacttaaatcagacagttacagaattcaaacaactgatttcaaaggccatccatttacctgctgaaacaatgagaatagtgctggaacgctgctacaatgatttgcgtcttctcagtgtctccagtaaaaccctgaaagctgaaggattttttagaagtaacaaggtgtttgttgaaagctccgagactttggattaccagatggcctttgcagactctcatttatggaaactcctggatcggcatgcaaatacaatcagattatttgttttgctacctgaacaatccccagtatcttattccaaaaggacagcataccagaaagctggaggcgattctggtaatgtggatgatgactgtgaaagagtcaaaggacctgtaggaagcctaaagtctgtggaagctattctagaagaaagcactgaaaaactcaaaagcttgtcactgcagcaacagcaggatggagataatggggacagcagcaaaagtactgagacaagtgactttgaaaacatcgaatcacctctcaatgagagggactcttcagcatcagtggataatagagaacttgaacagcatattcagacttctgatccagaaaattttcagtctgaagaacgatcagactcagatgtgaataatgacaggagtacaagttcagtggacagtgatattcttagctccagtcatagcagtgatactttgtgcaatgcagacaatgctcagatccctttggctaatggacttgactctcacagtatcacaagtagtagaagaacgaaagcaaatgaagggaaaaaagaaacatgggatacagcagaagaagactctggaactgatagtgaatatgatgagagtggcaagagtaggggagaaatgcagtacatgtatttcaaagctgaaccttatgctgcagatgaaggttctggggaaggacataaatggttgatggtgcatgttgataaaagaattactctggcagctttcaaacaacatttagagccctttgttggagttttgtcctctcacttcaaggtctttcgagtgtatgccagcaatcaagagtttgagagcgtccggctgaatgagacactttcatcattttctgatgacaataagattacaattagactggggagagcacttaaaaaaggagaatacagagttaaagtataccagcttttggtcaatgaacaagagccatgcaagtttctgctagatgctgtgtttgctaaaggaatgactgtacggcaatcaaaagaggaattaattcctcagctcagggagcaatgtggtttagagctcagtattgacaggtttcgtctaaggaaaaaaacatggaagaatcctggcactgtctttttggattatcatatttatgaagaagatattaatatttccagcaactgggaggttttccttgaagttcttgatggggtagagaagatgaagtccatgtcacagcttgcagttttgtcaagacggtggaagccttcagagatgaagttggatcccttccaggaggttgtattggaaagcagtagtgtggacgaattgcgagagaagcttagtgaaatcagtgggattcctttggatgatattgaatttgctaagggtagaggaacatttccctgtgatatttctgtccttgatattcatcaggatttagactggaatcctaaagtttctaccctgaatgtctggcctctttatatctgtgatgatggtgcggtcatattttatagggataaaacagaagaattaatggaattgacagatgagcaaagaaatgaactgatgaaaaaagaaagcagtcgactccagaagactggacatcgtgtaacatactcacctcgtaaagagaaagcactaaaaatatatctggatggagcaccaaataaagatctgactcaagactgactctgatagtgtagcattttccctgggggagttttggttttaattagatggttcactaccactgggtagtgccattttggccggacatggttggggtaacccagtgacaccagcactgattggactgccctacaccaatcagaagctcagtgcccaatgggccactgttttgactcggaatcatgttgtgcactatagtcaaatgtactgtaaagtgaaaagggatgtgcaaaaaaataaaaaaaaacaacaaaaaaagctaaccttctattagaaaaggggacaggggaatgagtaaacttcttttattgcggacaaatgtgcacatagccgctagtaaaactagcctcaaacaggatgctcatagcttaataataaaagctgtgcaaaggccatgaatgaatgaattttctgtttatttcactgatgcacacattacctcattgacaattcagaagtaaatccaacgtgtgttgactcttggaaagcagcaaaaacaggagctgaagaaaagaaattcttggaaccagccgtaacccagtaaggaattgtgaagttgtgtttttattttgtttcattttttgcagagtattaagaacattattctggaacatcagaacgtttcccttagaccgatcccagcaggtggcagctcagattgctgcagtgttgtaattataactgattgtacttaagttatggatgtagagaatatgtttcattcatttattcagcatgtaaataaaattgatcctgttgagttatcataattgcagttcaactatctgccatgattattcttttcacgtatcattcattctgtacatttgtgtacattgagaagtatagcaatctatgtaaatgtaatcctcagtgaggttcctcagtgctaggtcccataggattgtcgttgcccttgttaatgaggtttctctgttcagcggcttcaatttttttctctttgtacatctagttttgaagatttacttcaagtttgaatcttctagaatgcttgtaagtccagttttaatttttagagtcaatttgtagttacatgtagtttaacttttgggaaacgtcttaacattgttctgaataaacttgctaatgaggtcaggtcatggtacagactgatgcagtcaacatgatttcattgcagagtttattagtatcagcaagtttttgctttgctaaataaaagtactcaatgaacacaattctacataaattttgacataccatctaatttataaaaatcaataaaaaaggttttggtaaaactttttcatgccagatgctgtttacaacaatgaacatgccaataaaacatttgttcattctgttgtgttattttagtcattaaacttctgtggatgaagaatctgggttaagaatagatttgtcatctttaaatatgacattttgtaatgtgtattggatatctcatttctatgataaaggtatatttacagtaaagttctcataagagaaatgaaaagctgtgttaatatctaactttggggaaccctgtcagtatttcagatccgatttttaccctttttttcttataagaaagataaaattagaaaatactgttagcaaatgtggctctgccatttgaatataatcaccgagaattccatgtcttaaaagtctcctggaatccacaatgaaaaaaaaaatcttttctaaggtatttttctggctaatttttatttgaagaaagctatagcatttagcgaaatttgactgaagtaatgttctgagtttgcattagtgggattggtgatgttctcagaagaaaattggaaacacttgtgatgaattgtctttcagatcacttagattttctgatgtaagaggacagctgtttggttctgatacaggcctgcttacttgggatgtagggttagtaaatggggtttctgctttaaaggactgacttgctatcacacaaaagaggcagacttgtaaacacaatgggctttggagtttggtctgattgggtttggtttagtattcctatgagcgtaaatggtaaaattcttctgatacccactctttagactgtgccttctgctctgttctttgttttatgtttaactgctgtttctaattgcaggtgtattacagatacaaataagagtaaagaaaatatatttcattatagaaaagaaaaaattaaaagcttcttgcttttcagtgcctgatagagtgaaaacacaaagttgcactttaataatttcaataaaagctaatctgtgtcagcctccctctgcttcagagagtcaggtgagcatccataacctaacaggcagagccctagcgatgtggatcaagtttcctgagcccgggggcggtggagcctcatgatctcttatcttttgaggctgaggcaggtcacatgcaacaaattgtgaccctgctccccacaagtcatgcaaaggttttgaagagcttttaccgtggggcagatgaacttgtgtcaaccatgcacaccctgtgagaaccaagtacctgtgtttctaaggcgggcactcaaggtgaggggtgcattctggccaaagaaacaaaagctgtggtttcaggaccatgccgtgtgtagctgatctgtacgggacgtgtatgtaaggaagagcaatcatgatagataagaacagtgtgtgaagcagccttcacactagagtgtttggtcatctcttataatgtaagggaaggtactttaaaattctgggaagatgcgatgaactcatgtcccagtcagaaaataatccaatgaaataagcattggttgccaggccacagttaggaattgtattgtgatacatctagaggccaagagagcaggagagagctaccaacttacactgtggtttaagctaaatgaccgcacagcatcatagcattgcagtgttgttactaaatctggaagtgacctgtgaatgtatggaatacaataaagtcttttattctggttc

SEQ ID NO: 20723 - protein, 1287 aa, Homo sapiens; identical to SEQ ID NO: 2627

SEQ ID NO: 20724 - DNA, 7778 bp, Homo sapiens
agaggggaaaagaacgtcaggagagtgaacgggagcaaataaaacgctgtccattctgactggaagggccagagccgtgtctaagggcgggggccgggaggtggcccgcggtggtgtctctaccaggacgaggcctggggtatctgaagaggggatgacgtccaggcgctttgctaaagggaagccagaagggtatgagttgctagggtcagagatggggctttcggctcgagtctttccctgcagggcagagagtccgaagagcccgagaaggcagggaggacagtgggcctggtccttccccggccggcagagggagtcccgagatggaacgtccagctctcctctaacgaaaagcgtttgcatggctgtctcgccaattctgtacctcccggggctgaggaagagccgaggtgactagaagctagcgacaagtgccggccacctccgacgccaggcgccgggcttggagcccgacgggccgaattctcgcgagagcggccgccgccatttttccattgattgcagcgggctgggggaggggccgacgacgaaggcggctgtggtagcggcggcggcggcggcggagccctgggtcggtgtctgcgcgctggtgtctgaggcccaggctgaggcctccgctattgctggagcgcaggcggcggagaggatgactgccgctgccattctctcttgagctagcgagccgccgccaccctccaccctcccccggcagggcggagaggagcggccggagtcagcgatggtgcccggcgaggagaaccaactggtcccgaaagaggcaccactggatcataccagtgacaagtcacttctcgacgctaattttgagccaggaaagaagaactttctgcatttgacagataaagatggtgaacaacctcaaatactgctggaggattccagtgctggggaagacagtgttcatgacaggtttataggtccgcttccaagagaaggttctgggggttctaccagtgattatgtcagccaaagctactcctactcatctattttgaataaatcagaaactggatatgtgggactagtaaaccaagcaatgacttgctatttgaatagccttttgcaaacactttttatgactcctgaatttaggaatgcattatataagtgggaatttgaagaatctgaagaagatccagtgacaagtattccataccaacttcaaaggctttttgttttgttacaaaccagcaaaaagagagcaattgaaaccacagatgttacaaggagctttggatgggatagtagtgaggcttggcagcagcatgatgtacaagaactatgcagagtcatgtttgatgctttggaacagaaatggaagcaaacagaacaggctgatcttataaatgagctatatcaaggcaagctgaaggactacgtgagatgtctggaatgtggttatgagggctggcgaatcgacacatatcttgatattccattggtcatccgaccttatgggtccagccaagcatttgctagtgtggaagaagcattgcatgcatttattcagccagagattctggatggcccaaatcagtatttttgtgaacgttgtaagaagaagtgtgatgcacggaagggccttcggtttttgcattttccttatctgctgaccttacagctgaaaagattcgattttgattatacaaccatgcataggattaaactgaatgatcgaatgacatttcccgaggaactagatatgagtacttttattgatgttgaagatgagaaatctcctcagactgaaagttgcactgacagtggagcagaaaatgaaggtagttgtcacagtgatcagatgagcaacgatttctccaatgatgatggtgttgatgaaggaatctgtcttgaaaccaatagtggaactgaaaagatctcaaaatctggacttgaaaagaattccttgatctatgaacttttctctgttatggttcattctgggagcgctgctggtggtcattattatgcatgtataaagtcattcagtgatgagcagtggtacagcttcaatgatcaacatgtcagcaggataacacaagaggacattaagaaaacacatggtggatcttcaggaagcagaggatattattctagtgctttcgcaagttccacaaatgcatatatgctgatctatagactgaaggatccagccagaaatgcaaaatttctagaagtggatgaatacccagaacatattaaaaacttggtgcagaaagagagagagttggaagaacaagaaaagagacaacgagaaattgagcgcaatacatgcaagataaaattattctgtttgcatcctacaaaacaagtaatgatggaaaataaattggaggttcataaggataagacattaaaggaagcagtagaaatggcttataagatgatggatttagaagaggtaatacccctggattgctgtcgccttgttaaatatgatgagtttcatgattatctagaacggtcatatgaaggagaagaagatacaccaatggggcttctactaggtggcgtcaagtcaacatatatgtttgatctgctgttggagacgagaaagcctgatcaggttttccaatcttataaacctggagaagtgatggtgaaagttcatgttgttgatctaaaggcagaatctgtagctgctcctataactgttcgtgcttacttaaatcagacagttacagaattcaaacaactgatttcaaaggccatccatttacctgctgaaacaatgagaatagtgctggaacgctgctacaatgatttgcgtcttctcagtgtctccagtaaaaccctgaaagctgaaggattttttagaagtaacaaggtgtttgttgaaagctccgagactttggattaccagatggcctttgcagactctcatttatggaaactcctggatcggcatgcaaatacaatcagattatttgttttgctacctgaacaatccccagtatcttattccaaaaggacagcataccagaaagctggaggcgattctggtaatgtggatgatgactgtgaaagagtcaaaggacctgtaggaagcctaaagtctgtggaagctattctagaagaaagcactgaaaaactcaaaagcttgtcactgcagcaacagcaggatggagataatggggacagcagcaaaagtactgagacaagtgactttgaaaacatcgaatcacctctcaatgagagggactcttcagcatcagtggataatagagaacttgaacagcatattcagacttctgatccagaaaattttcagtctgaagaacgatcagactcagatgtgaataatgacaggagtacaagttcagtggacagtgatattcttagctccagtcatagcagtgatactttgtgcaatgcagacaatgctcagatccctttggctaatggacttgactctcacagtatcacaagtagtagaagaacgaaagcaaatgaagggaaaaaagaaacatgggatacagcagaagaagactctggaactgatagtgaatatgatgagagtggcaagagtaggggagaaatgcagtacatgtatttcaaagctgaaccttatgctgcagatgaaggttctggggaaggacataaatggttgatggtgcatgttgataaaagaattactctggcagctttcaaacaacatttagagccctttgttggagttttgtcctctcacttcaaggtctttcgagtgtatgccagcaatcaagagtttgagagcgtccggctgaatgagacactttcatcattttctgatgacaataagattacaattagactggggagagcacttaaaaaaggagaatacagagttaaagtataccagcttttggtcaatgaacaagagccatgcaagtttctgctagatgctgtgtttgctaaaggaatgactgtacggcaatcaaaagaggaattaattcctcagctcagggagcaatgtggtttagagctcagtattgacaggtttcgtctaaggaaaaaaacatggaagaatcctggcactgtctttttggattatcatatttatgaagaagatattaatatttccagcaactgggaggttttccttgaagttcttgatggggtagagaagatgaagtccatgtcacagcttgcagttttgtcaagacggtggaagccttcagagatgaagttggatcccttccaggaggttgtattggaaagcagtagtgtggacgaattgcgagagaagcttagtgaaatcagtgggattcctttggatgatattgaatttgctaagggtagaggaacatttccctgtgatatttctgtccttgatattcatcaggatttagactggaatcctaaagtttctaccctgaatgtctggcctctttatatctgtgatgatggtgcggtcatattttatagggataaaacagaagaattaatggaattgacagatgagcaaagaaatgaactgatgaaaaaagaaagcagtcgactccagaagactggacatcgtgtaacatactcacctcgtaaagagaaagcactaaaaatatatctggatggagcaccaaataaagatctgactcaagactgactctgatagtgtagcattttccctgggggagttttggttttaattagatggttcactaccactgggtagtgccattttggccggacatggttggggtaacccagtgacaccagcactgattggactgccctacaccaatcagaagctcagtgcccaatgggccactgttttgactcggaatcatgttgtgcactatagtcaaatgtactgtaaagtgaaaagggatgtgcaaaaaaataaaaaaaaacaacaaaaaaagctaaccttctattagaaaaggggacaggggaatgagtaaacttcttttattgcggacaaatgtgcacatagccgctagtaaaactagcctcaaacaggatgctcatagcttaataataaaagctgtgcaaaggccatgaatgaatgaattttctgtttatttcactgatgcacacattacctcattgacaattcagaagtaaatccaacgtgtgttgactcttggaaagcagcaaaaacaggagctgaagaaaagaaattcttggaaccagccgtaacccagtaaggaattgtgaagttgtgtttttattttgtttcattttttgcagagtattaagaacattattctggaacatcagaacgtttcccttagaccgatcccagcaggtggcagctcagattgctgcagtgttgtaattataactgattgtacttaagttatggatgtagagaatatgtttcattcatttattcagcatgtaaataaaattgatcctgttgagttatcataattgcagttcaactatctgccatgattattcttttcacgtatcattcattctgtacatttgtgtacattgagaagtatagcaatctatgtaaatgtaatcctcagtgaggttcctcagtgctaggtcccataggattgtcgttgcccttgttaatgaggtttctctgttcagcggcttcaatttttttctctttgtacatctagttttgaagatttacttcaagtttgaatcttctagaatgcttgtaagtccagttttaatttttagagtcaatttgtagttacatgtagtttaacttttgggaaacgtcttaacattgttctgaataaacttgctaatgaggtcaggtcatggtacagactgatgcagtcaacatgatttcattgcagagtttattagtatcagcaagtttttgctttgctaaataaaagtactcaatgaacacaattctacataaattttgacataccatctaatttataaaaatcaataaaaaaggttttggtaaaactttttcatgccagatgctgtttacaacaatgaacatgccaataaaacatttgttcattctgttgtgttattttagtcattaaacttctgtggatgaagaatctgggttaagaatagatttgtcatctttaaatatgacattttgtaatgtgtattggatatctcatttctatgataaaggtatatttacagtaaagttctcataagagaaatgaaaagctgtgttaatatctaactttggggaaccctgtcagtatttcagatccgatttttaccctttttttcttataagaaagataaaattagaaaatactgttagcaaatgtggctctgccatttgaatataatcaccgagaattccatgtcttaaaagtctcctggaatccacaatgaaaaaaaaaatcttttctaaggtatttttctggctaatttttatttgaagaaagctatagcatttagcgaaatttgactgaagtaatgttctgagtttgcattagtgggattggtgatgttctcagaagaaaattggaaacacttgtgatgaattgtctttcagatcacttagattttctgatgtaagaggacagctgtttggttctgatacaggcctgcttacttgggatgtagggttagtaaatggggtttctgctttaaaggactgacttgctatcacacaaaagaggcagacttgtaaacacaatgggctttggagtttggtctgattgggtttggtttagtattcctatgagcgtaaatggtaaaattcttctgatacccactctttagactgtgccttctgctctgttctttgttttatgtttaactgctgtttctaattgcaggtgtattacagatacaaataagagtaaagaaaatatatttcattatagaaaagaaaaaattaaaagcttcttgcttttcagtgcctgatagagtgaaaacacaaagttgcactttaataatttcaataaaagctaatctgtgtcagcctccctctgcttcagagagtcaggtgagcatccataacctaacaggcagagccctagcgatgtggatcaagtttcctgagcccgggggcggtggagcctcatgatctcttatcttttgaggctgaggcaggtcacatgcaacaaattgtgaccctgctccccacaagtcatgcaaaggttttgaagagcttttaccgtggggcagatgaacttgtgtcaaccatgcacaccctgtgagaaccaagtacctgtgtttctaaggcgggcactcaaggtgaggggtgcattctggccaaagaaacaaaagctgtggtttcaggaccatgccgtgtgtagctgatctgtacgggacgtgtatgtaaggaagagcaatcatgatagataagaacagtgtgtgaagcagccttcacactagagtgtttggtcatctcttataatgtaagggaaggtactttaaaattctgggaagatgcgatgaactcatgtcccagtcagaaaataatccaatgaaataagcattggttgccaggccacagttaggaattgtattgtgatacatctagaggccaagagagcaggagagagctaccaacttacactgtggtttaagctaaatgaccgcacagcatcatagcattgcagtgttgttactaaatctggaagtgacctgtgaatgtatggaatacaataaagtcttttattctggttcatttgctagtacttcctttttgattggatactgtagttcttcctctggattttattttgttcagcgtcaaggccctaattttgcaaatgtagtctaaaccacattacgtggactagaggatactctgaattagcaagttttttgtttgctgaataaaactattccatcttaac

SEQ ID NO: 20725 - protein, 1287 aa, Homo sapiens; identical to SEQ ID NO: 2627

SEQ ID NO: 20726 - DNA, 431 bp, Homo sapiens
gctgctgaagaacctagagtcttatgtattatacaagatactactaattcaaagacagtgaatgaacggatcactttaaatttaccagcatctactccagtcagaaagctctttgaagatgtggccaacaaagtaggctacataaatggaacctttgacttggtgtggggaaatggaatcaatactgctgatatggcaccactggatcataccagtgacaagtcacttctcgacgctaattttgagccaggaaagaagaactttctgcatttgacagataaagatggtgaacaacctcaaatactgctggtaagctacttagaaagccccatatttataatttttgtgcactgtcacctactacttgaggatgcagtttcccaaaggaaataagatgtgttttgtaatttgtgtaataaattaatattttt

SEQ ID NO: 20727 - protein, 66 aa, Homo sapiens
MAPLDHTSDKSLLDANFEPGKKNFLHLTDKDGEQPQILLVSYLESPIFIIFVHCHLLLEDAVSQRK

SEQ ID NO: 20728 - DNA, 1703 bp, Homo sapiens
cttaaatcagacagttacagaattcaaacaactgatttcaaaggccatccatttacctgctgaaacaatgagaatagtgctggaacgctgctacaatgatttgcgtcttctcagtgtctccagtaaaaccctgaaagctgaaggattttttagaagtaacaaggtgtttgttgaaagctccgagactttggattaccagatggcctttgcagactctcatttatggaaactcctggatcggcatgcaaatacaatcagattatttgttttgctacctgaacaatccccagtatcttattccaaaaggacagcataccagaaagctggaggcgattctggtaatgtggatgatgactgtgaaagagtcaaaggacctgtaggaagcctaaagtctgtggaagctattctagaagaaagcactgaaaaactcaaaagcttgtcactgcagcaacagcaggatggagataatggggacagcagcaaaagtactgagacaagtgactttgaaaacatcgaatcacctctcaatgagagggactcttcagcatcagtggataatagagaacttgaacagcatattcagacttctgatccagaaaattttcagtctgaagaacgatcagactcagatgtgaataatgacaggagtacaagttcagtggacagtgatattcttagctccagtcatagcagtgatactttgtgcaatgcagacaatgctcagatccctttggctaatggacttgactctcacagtatcacaagtagtagaagaacgaaagcaaatgaagggaaaaaagaaacatgggatacagcagaagaagactctggaactgatagtgaatatgatgagagtggcaagagtaggggagaaatgcagtacatgtatttcaaagctgaaccttatgctgcagatgaaggttctggggaaggacataaatgtatgtacttcaaaagaaaaacggtccttgaaacagcatcagtttttctctcagtttatttaaattttcagttaagtgttaggtacttagttctaagatcatttgtaactttctggattataagattattgacgcagttgtaatgaacactgttcttagacctgtgcagtaaattagatggtaattatatcagaactctgagataagaagtaaaaaaaaatagtattcaatgttaggaaggaattatgatataattactaagtaaaaaattagggaatatattaaaaagtaaataatattttttaaaagctgagaaactttagaaaatttgatattcaatgcccaggaaaatgttttatttctacatgctcttccctctctccatttccaatgcaaacaacaattcccttgccatacccccttaaaaagtccttaatcaactgggaaagtcagagaaagaaaaagcgctcttaaaattttttctgttactttgaagtaactccaaagcaaggagttactagaaattccaatgcataatctcagaaagagggaaaagatctgagagtttgggcatttggcataagcagtaacaacaaaaacattccagcatagtatgagacttaaaataaaagaacctttataaaaccttagactgaggccagccaaataattagcaaggcaaccaggtttaagatacaaaatctttcttcaagtgtaaaggagaagtagctggaaaagtaagtactttgcattagttctagc

SEQ ID NO: 20729 - protein, 338 aa, Homo sapiens
MRIVLERCYNDLRLLSVSSKTLKAEGFFRSNKVFVESSETLDYQMAFADSHLWKLLDRHANTIRLFVLLPEQSPVSYSKRTAYQKAGGDSGNVDDDCERVKGPVGSLKSVEAILEESTEKLKSLSLQQQQDGDNGDSSKSTETSDFENIESPLNERDSSASVDNRELEQHIQTSDPENFQSEERSDSDVNNDRSTSSVDSDILSSSHSSDTLCNADNAQIPLANGLDSHSITSSRRTKANEGKKETWDTAEEDSGTDSEYDESGKSRGEMQYMYFKAEPYAADEGSGEGHKCMYFKRKTVLETASVFLSVYLNFQLSVRYLVLRSFVTFWIIRLLTQL

SEQ ID NO: 20730 - DNA, 3527 bp, Homo sapiens
gttcttgatggtattttcaatatttttggggggaagtatcagttagaaatactctagaactaatagaagcctatagtttttaatcaaataatgagttacgaggaatctaatatacattatagtgttttgtgttatattaagcataacgatatccttattatggattgatgtgattcctacctacgtcttatccttgggagttttattttcttcccctgtgtcctaatgtaactgcttaagttgtttttgaaagaataatcagtgtctttcagccttctgctatctttctctggttcccatttgccttttaagtattctttttttgaatgttgagaatattaattcccccttatgaggaaattacaaagttaggtttttaatacattttaagaaaactctgctaatattttcttagccacgtttgttctttagtttcttttttactattatggcttattttgtattgaagacatggtactgataatttatcagagactcaagaacaatgactatttgtgtcctaagccaggtggcttaaagaatagaagtgtattgtctcacaatctgagatcaggctgtcaacagggttggttccttctgagtgctgtgggggagaatctgttccatactctctcctagcttctgtggtttttggccatcattggcaaccttggcttgtagatacatcaccccagtctctgccttcatcttcatgtggtgttctttctgtgggcttgtctgtctgtattgttttcccctttttcataaaccactagtcctattgtattagggcccaccctgaagaccttattttactttgagtatcactggaaagaccctatttccaaataaggtcacattctgaggtactagggattaggatttcaaaatgtctttttgtggggggcacaattcaacccatagcagtgaccttgaggaggtccaagtagcagacatacttgtcacacctcccagttttcgttatcaacattggcacatttaaagtattggtgtttggagggaggcttataggaggaaagttggcttttagaagatcacatcaaggtaaacaactagttctatattctttttttgctgttgcttaggaaaattttaattttccttttcttctgtagaaagtaaaatatgaattctggatattttgttacaagattatcctagtttttagagagctcaataatactaacacctcatgtatttcaggctgcttcaggtctaattcaaccataaatttaaatggttgaaattctgattaattgacaagttaagttgggaggtaaggaacaactaggataccatctactatggtgtgtaggcaagtgctccagattgtgatttctttgagtatctggggtcgtagggaataatcactgtgcctgggtaagtcaggaagagatcataaatgacaaagaagtcacccttgtaaggattgagtatgtattagcagagatggattcatctgaaaatggtactagatggtgggtgcctgcatcagtattatttcagtatattttcacatcaagatagttgagtaagaaatgtcatgtgattaaatccaagaggtatttattgacctgtaatttgccagacactgctaatcccttgtgctacaaaaatgagtaagaaccacttattggtgcacacagtctgtggaagaaacagaactgcaaacctgtcattctaaaataataggtactaagggactgaatcagtagaagttcttcttgtgtacaccagagaaaagtgacaattgagttgatgcttgaaaagtgacaattgagttgatgcttgaaaagtgacataatggaaaagtgacaattttgaagaatcactaaattggggagtaaatggaaagagaaggattaataatagctttagtgaaaaaagaggataaagtgaagttgatttgtttatgattttagatagggataggagccaatagagaaacaaagattggaaatccagagaagagagtaattggtaatgcagtgttcaacaggagtcaggagggagtggaattaggagtactggtttgaagaagagaggaattatcttctgagactggagagaagagagtaaatatttcattctcaaaaactccttgggataattgggttttttcttgtgcccactttttaagagtaacacttgaagtaaatctttttgtttagtaaggcactaagggaaaagtcaaattatgaaccttcagaggaaatagaatgatgacctaatcttgcatattcttaggggtagagaagatgaagtccatgtcacagcttgcagttttgtcaagacggtggaagccttcagagatgaagttggatcccttccaggaggttgtattggaaagcagtagtgtggacgaattgcgagagaagcttagtgaaatcagtgggattcctttggatgatattgaatttgctaagggtagaggaacatttccctgtgatatttctgtccttgatattcatcaggatttagactggaatcctaaagtttctaccctgaatgtctggcctctttatatctgtgatgatggtgcggtcatattttatagggataaaacagaagaattaatggaattgacagatgagcaaagaaatgaactgatgaaaaaagaaagcagtcgactccagaagactggacatcgtgtaacatactcacctcgtaaagagaaagcactaaaaatatatctggatggagcaccaaataaagatctgactcaagactgactctgatagtgtagcattttccctgggggagttttggttttaattagatggttcactaccactgggtagtgccattttggccggacatggttggggtaacccagtgacaccagcactgattggactgccctacaccaatcagaagctcagtgcccaatgggccactgttttgactcggaatcatgttgtgcactatagtcaaatgtactgtaaagtgaaaagggatgtgcaaaaaaataaaaaaaaacaacaaaaaaagctaaccttctattagaaaaggggacaggggaatgagtaaacttcttttattgcggacaaatgtgcacatagccgctagtaaaactagcctcaaacaggatgctcatagcttaataataaaagctgtgcaaaggccatgaatgaatgaattttctgtttatttcactgatgcacacattacctcattgacaattcagaagtaaatccaacgtgtgttgactcttggaaagcagcaaaaacaggagctgaagaaaagaaattcttggaaccagccgtaacccagtaaggaattgtgaagttgtgtttttattttgtttcattttttgcagagtattaagaacattattctggaacatcagaacgtttcccttagaccgatcccagcaggtggcagctcagattgctgcagtgttgtaattataactgattgtacttaagttatggatgtagagaatatgtttcattcatttattcagcatgtaaataaaattgatcctgttgagttatcataattgc

SEQ ID NO: 20731 - protein, 157 aa, Homo sapiens
MKSMSQLAVLSRRWKPSEMKLDPFQEVVLESSSVDELREKLSEISGIPLDDIEFAKGRGTFPCDISVLDIHQDLDWNPKVSTLNVWPLYICDDGAVIFYRDKTEELMELTDEQRNELMKKESSRLQKTGHRVTYSPRKEKALKIYLDGAPNKDLTQD

SEQ ID NO: 20732 - DNA, 4102 bp, Homo sapiens
gttcttgatggtattttcaatatttttggggggaagtatcagttagaaatactctagaactaatagaagcctatagtttttaatcaaataatgagttacgaggaatctaatatacattatagtgttttgtgttatattaagcataacgatatccttattatggattgatgtgattcctacctacgtcttatccttgggagttttattttcttcccctgtgtcctaatgtaactgcttaagttgtttttgaaagaataatcagtgtctttcagccttctgctatctttctctggttcccatttgccttttaagtattctttttttgaatgttgagaatattaattcccccttatgaggaaattacaaagttaggtttttaatacattttaagaaaactctgctaatattttcttagccacgtttgttctttagtttcttttttactattatggcttattttgtattgaagacatggtactgataatttatcagagactcaagaacaatgactatttgtgtcctaagccaggtggcttaaagaatagaagtgtattgtctcacaatctgagatcaggctgtcaacagggttggttccttctgagtgctgtgggggagaatctgttccatactctctcctagcttctgtggtttttggccatcattggcaaccttggcttgtagatacatcaccccagtctctgccttcatcttcatgtggtgttctttctgtgggcttgtctgtctgtattgttttcccctttttcataaaccactagtcctattgtattagggcccaccctgaagaccttattttactttgagtatcactggaaagaccctatttccaaataaggtcacattctgaggtactagggattaggatttcaaaatgtctttttgtggggggcacaattcaacccatagcagtgaccttgaggaggtccaagtagcagacatacttgtcacacctcccagttttcgttatcaacattggcacatttaaagtattggtgtttggagggaggcttataggaggaaagttggcttttagaagatcacatcaaggtaaacaactagttctatattctttttttgctgttgcttaggaaaattttaattttccttttcttctgtagaaagtaaaatatgaattctggatattttgttacaagattatcctagtttttagagagctcaataatactaacacctcatgtatttcaggctgcttcaggtctaattcaaccataaatttaaatggttgaaattctgattaattgacaagttaagttgggaggtaaggaacaactaggataccatctactatggtgtgtaggcaagtgctccagattgtgatttctttgagtatctggggtcgtagggaataatcactgtgcctgggtaagtcaggaagagatcataaatgacaaagaagtcacccttgtaaggattgagtatgtattagcagagatggattcatctgaaaatggtactagatggtgggtgcctgcatcagtattatttcagtatattttcacatcaagatagttgagtaagaaatgtcatgtgattaaatccaagaggtatttattgacctgtaatttgccagacactgctaatcccttgtgctacaaaaatgagtaagaaccacttattggtgcacacagtctgtggaagaaacagaactgcaaacctgtcattctaaaataataggtactaagggactgaatcagtagaagttcttcttgtgtacaccagagaaaagtgacaattgagttgatgcttgaaaagtgacaattgagttgatgcttgaaaagtgacataatggaaaagtgacaattttgaagaatcactaaattggggagtaaatggaaagagaaggattaataatagctttagtgaaaaaagaggataaagtgaagttgatttgtttatgattttagatagggataggagccaatagagaaacaaagattggaaatccagagaagagagtaattggtaatgcagtgttcaacaggagtcaggagggagtggaattaggagtactggtttgaagaagagaggaattatcttctgagactggagagaagagagtaaatatttcattctcaaaaactccttgggataattgggttttttcttgtgcccactttttaagagtaacacttgaagtaaatctttttgtttagtaaggcactaagggaaaagtcaaattatgaaccttcagaggaaatagaatgatgacctaatcttgcatattcttaggggtagagaagatgaagtccatgtcacagcttgcagttttgtcaagacggtggaagccttcagagatgaagttggatcccttccaggaggttgtattggaaagcagtagtgtggacgaattgcgagagaagcttagtgaaatcagtgggattcctttggatgatattgaatttgctaagggtagaggaacatttccctgtgatatttctgtccttgatattcatcaggatttagactggaatcctaaagtttctaccctgaatgtctggcctctttatatctgtgatgatggtgcggtcatattttatagggataaaacagaagaattaatggaattgacagatgagcaaagaaatgaactgatgaaaaaagaaagcagtcgactccagaagactggacatcgtgtaacatactcacctcgtaaagagaaagcactaaaaatatatctggatggagcaccaaataaagatctgactcaagactgactctgatagtgtagcattttccctgggggagttttggttttaattagatggttcactaccactgggtagtgccattttggccggacatggttggggtaacccagtgacaccagcactgattggactgccctacaccaatcagaagctcagtgcccaatgggccactgttttgactcggaatcatgttgtgcactatagtcaaatgtactgtaaagtgaaaagggatgtgcaaaaaaataaaaaaaaacaacaaaaaaagctaaccttctattagaaaaggggacaggggaatgagtaaacttcttttattgcggacaaatgtgcacatagccgctagtaaaactagcctcaaacaggatgctcatagcttaataataaaagctgtgcaaaggccatgaatgaatgaattttctgtttatttcactgatgcacacattacctcattgacaattcagaagtaaatccaacgtgtgttgactcttggaaagcagcaaaaacaggagctgaagaaaagaaattcttggaaccagccgtaacccagtaaggaattgtgaagttgtgtttttattttgtttcattttttgcagagtattaagaacattattctggaacatcagaacgtttcccttagaccgatcccagcaggtggcagctcagattgctgcagtgttgtaattataactgattgtacttaagttatggatgtagagaatatgtttcattcatttattcagcatgtaaataaaattgatcctgttgagttatcataattgcagttcaactatctgccatgattattcttttcacgtatcattcattctgtacatttgtgtacattgagaagtatagcaatctatgtaaatgtaatcctcagtgaggttcctcagtgctaggtcccataggattgtcgttgcccttgttaatgaggtttctctgttcagcggcttcaatttttttctctttgtacatctagttttgaagatttacttcaagtttgaatcttctagaatgcttgtaagtccagttttaatttttagagtcaatttgtagttacatgtagtttaacttttgggaaacgtcttaacattgttctgaataaacttgctaatgaggtcaggtcatggtacagactgatgcagtcaacatgatttcattgcagagtttattagtatcagcaagtttttgctttgctaaataaaagtactcaatgaacacaattctacataaattttgacataccatctaatttataaaaatcaataaaaaaggttttggtaaaactttttcatgccagatgctgtttacaacaatgaacatgccaataaaacatttgttcattctgttgtgtt

SEQ ID NO: 20733 - protein, 157 aa, Homo sapiens; identical to SEQ ID NO: 20731

SEQ ID NO: 20734 - DNA, 5731 bp, Homo sapiens
gttcttgatggtattttcaatatttttggggggaagtatcagttagaaatactctagaactaatagaagcctatagtttttaatcaaataatgagttacgaggaatctaatatacattatagtgttttgtgttatattaagcataacgatatccttattatggattgatgtgattcctacctacgtcttatccttgggagttttattttcttcccctgtgtcctaatgtaactgcttaagttgtttttgaaagaataatcagtgtctttcagccttctgctatctttctctggttcccatttgccttttaagtattctttttttgaatgttgagaatattaattcccccttatgaggaaattacaaagttaggtttttaatacattttaagaaaactctgctaatattttcttagccacgtttgttctttagtttcttttttactattatggcttattttgtattgaagacatggtactgataatttatcagagactcaagaacaatgactatttgtgtcctaagccaggtggcttaaagaatagaagtgtattgtctcacaatctgagatcaggctgtcaacagggttggttccttctgagtgctgtgggggagaatctgttccatactctctcctagcttctgtggtttttggccatcattggcaaccttggcttgtagatacatcaccccagtctctgccttcatcttcatgtggtgttctttctgtgggcttgtctgtctgtattgttttcccctttttcataaaccactagtcctattgtattagggcccaccctgaagaccttattttactttgagtatcactggaaagaccctatttccaaataaggtcacattctgaggtactagggattaggatttcaaaatgtctttttgtggggggcacaattcaacccatagcagtgaccttgaggaggtccaagtagcagacatacttgtcacacctcccagttttcgttatcaacattggcacatttaaagtattggtgtttggagggaggcttataggaggaaagttggcttttagaagatcacatcaaggtaaacaactagttctatattctttttttgctgttgcttaggaaaattttaattttccttttcttctgtagaaagtaaaatatgaattctggatattttgttacaagattatcctagtttttagagagctcaataatactaacacctcatgtatttcaggctgcttcaggtctaattcaaccataaatttaaatggttgaaattctgattaattgacaagttaagttgggaggtaaggaacaactaggataccatctactatggtgtgtaggcaagtgctccagattgtgatttctttgagtatctggggtcgtagggaataatcactgtgcctgggtaagtcaggaagagatcataaatgacaaagaagtcacccttgtaaggattgagtatgtattagcagagatggattcatctgaaaatggtactagatggtgggtgcctgcatcagtattatttcagtatattttcacatcaagatagttgagtaagaaatgtcatgtgattaaatccaagaggtatttattgacctgtaatttgccagacactgctaatcccttgtgctacaaaaatgagtaagaaccacttattggtgcacacagtctgtggaagaaacagaactgcaaacctgtcattctaaaataataggtactaagggactgaatcagtagaagttcttcttgtgtacaccagagaaaagtgacaattgagttgatgcttgaaaagtgacaattgagttgatgcttgaaaagtgacataatggaaaagtgacaattttgaagaatcactaaattggggagtaaatggaaagagaaggattaataatagctttagtgaaaaaagaggataaagtgaagttgatttgtttatgattttagatagggataggagccaatagagaaacaaagattggaaatccagagaagagagtaattggtaatgcagtgttcaacaggagtcaggagggagtggaattaggagtactggtttgaagaagagaggaattatcttctgagactggagagaagagagtaaatatttcattctcaaaaactccttgggataattgggttttttcttgtgcccactttttaagagtaacacttgaagtaaatctttttgtttagtaaggcactaagggaaaagtcaaattatgaaccttcagaggaaatagaatgatgacctaatcttgcatattcttaggggtagagaagatgaagtccatgtcacagcttgcagttttgtcaagacggtggaagccttcagagatgaagttggatcccttccaggaggttgtattggaaagcagtagtgtggacgaattgcgagagaagcttagtgaaatcagtgggattcctttggatgatattgaatttgctaagggtagaggaacatttccctgtgatatttctgtccttgatattcatcaggatttagactggaatcctaaagtttctaccctgaatgtctggcctctttatatctgtgatgatggtgcggtcatattttatagggataaaacagaagaattaatggaattgacagatgagcaaagaaatgaactgatgaaaaaagaaagcagtcgactccagaagactggacatcgtgtaacatactcacctcgtaaagagaaagcactaaaaatatatctggatggagcaccaaataaagatctgactcaagactgactctgatagtgtagcattttccctgggggagttttggttttaattagatggttcactaccactgggtagtgccattttggccggacatggttggggtaacccagtgacaccagcactgattggactgccctacaccaatcagaagctcagtgcccaatgggccactgttttgactcggaatcatgttgtgcactatagtcaaatgtactgtaaagtgaaaagggatgtgcaaaaaaataaaaaaaaacaacaaaaaaagctaaccttctattagaaaaggggacaggggaatgagtaaacttcttttattgcggacaaatgtgcacatagccgctagtaaaactagcctcaaacaggatgctcatagcttaataataaaagctgtgcaaaggccatgaatgaatgaattttctgtttatttcactgatgcacacattacctcattgacaattcagaagtaaatccaacgtgtgttgactcttggaaagcagcaaaaacaggagctgaagaaaagaaattcttggaaccagccgtaacccagtaaggaattgtgaagttgtgtttttattttgtttcattttttgcagagtattaagaacattattctggaacatcagaacgtttcccttagaccgatcccagcaggtggcagctcagattgctgcagtgttgtaattataactgattgtacttaagttatggatgtagagaatatgtttcattcatttattcagcatgtaaataaaattgatcctgttgagttatcataattgcagttcaactatctgccatgattattcttttcacgtatcattcattctgtacatttgtgtacattgagaagtatagcaatctatgtaaatgtaatcctcagtgaggttcctcagtgctaggtcccataggattgtcgttgcccttgttaatgaggtttctctgttcagcggcttcaatttttttctctttgtacatctagttttgaagatttacttcaagtttgaatcttctagaatgcttgtaagtccagttttaatttttagagtcaatttgtagttacatgtagtttaacttttgggaaacgtcttaacattgttctgaataaacttgctaatgaggtcaggtcatggtacagactgatgcagtcaacatgatttcattgcagagtttattagtatcagcaagtttttgctttgctaaataaaagtactcaatgaacacaattctacataaattttgacataccatctaatttataaaaatcaataaaaaaggttttggtaaaactttttcatgccagatgctgtttacaacaatgaacatgccaataaaacatttgttcattctgttgtgttattttagtcattaaacttctgtggatgaagaatctgggttaagaatagatttgtcatctttaaatatgacattttgtaatgtgtattggatatctcatttctatgataaaggtatatttacagtaaagttctcataagagaaatgaaaagctgtgttaatatctaactttggggaaccctgtcagtatttcagatccgatttttaccctttttttcttataagaaagataaaattagaaaatactgttagcaaatgtggctctgccatttgaatataatcaccgagaattccatgtcttaaaagtctcctggaatccacaatgaaaaaaaaaatcttttctaaggtatttttctggctaatttttatttgaagaaagctatagcatttagcgaaatttgactgaagtaatgttctgagtttgcattagtgggattggtgatgttctcagaagaaaattggaaacacttgtgatgaattgtctttcagatcacttagattttctgatgtaagaggacagctgtttggttctgatacaggcctgcttacttgggatgtagggttagtaaatggggtttctgctttaaaggactgacttgctatcacacaaaagaggcagacttgtaaacacaatgggctttggagtttggtctgattgggtttggtttagtattcctatgagcgtaaatggtaaaattcttctgatacccactctttagactgtgccttctgctctgttctttgttttatgtttaactgctgtttctaattgcaggtgtattacagatacaaataagagtaaagaaaatatatttcattatagaaaagaaaaaattaaaagcttcttgcttttcagtgcctgatagagtgaaaacacaaagttgcactttaataatttcaataaaagctaatctgtgtcagcctccctctgcttcagagagtcaggtgagcatccataacctaacaggcagagccctagcgatgtggatcaagtttcctgagcccgggggcggtggagcctcatgatctcttatcttttgaggctgaggcaggtcacatgcaacaaattgtgaccctgctccccacaagtcatgcaaaggttttgaagagcttttaccgtggggcagatgaacttgtgtcaaccatgcacaccctgtgagaaccaagtacctgtgtttctaaggcgggcactcaaggtgaggggtgcattctggccaaagaaacaaaagctgtggtttcaggaccatgccgtgtgtagctgatctgtacgggacgtgtatgtaaggaagagcaatcatgatagataagaacagtgtgtgaagcagccttcacactagagtgtttggtcatctcttataatgtaagggaaggtactttaaaattctgggaagatgcgatgaactcatgtcccagtcagaaaataatccaatgaaataagcattggttgccaggccacagttaggaattgtattgtgatacatctagaggccaagagagcaggagagagctaccaacttacactgtggtttaagctaaatgaccgcacagcatcatagcattgcagtgttgttactaaatctggaagtgacctgtgaatgtatggaatacaataaagtcttttattctggttc

SEQ ID NO: 20735 - protein, 157 aa, Homo sapiens; identical to SEQ ID NO: 20731

SEQ ID NO: 20736 - DNA, 5904 bp, Homo sapiens
gttcttgatggtattttcaatatttttggggggaagtatcagttagaaatactctagaactaatagaagcctatagtttttaatcaaataatgagttacgaggaatctaatatacattatagtgttttgtgttatattaagcataacgatatccttattatggattgatgtgattcctacctacgtcttatccttgggagttttattttcttcccctgtgtcctaatgtaactgcttaagttgtttttgaaagaataatcagtgtctttcagccttctgctatctttctctggttcccatttgccttttaagtattctttttttgaatgttgagaatattaattcccccttatgaggaaattacaaagttaggtttttaatacattttaagaaaactctgctaatattttcttagccacgtttgttctttagtttcttttttactattatggcttattttgtattgaagacatggtactgataatttatcagagactcaagaacaatgactatttgtgtcctaagccaggtggcttaaagaatagaagtgtattgtctcacaatctgagatcaggctgtcaacagggttggttccttctgagtgctgtgggggagaatctgttccatactctctcctagcttctgtggtttttggccatcattggcaaccttggcttgtagatacatcaccccagtctctgccttcatcttcatgtggtgttctttctgtgggcttgtctgtctgtattgttttcccctttttcataaaccactagtcctattgtattagggcccaccctgaagaccttattttactttgagtatcactggaaagaccctatttccaaataaggtcacattctgaggtactagggattaggatttcaaaatgtctttttgtggggggcacaattcaacccatagcagtgaccttgaggaggtccaagtagcagacatacttgtcacacctcccagttttcgttatcaacattggcacatttaaagtattggtgtttggagggaggcttataggaggaaagttggcttttagaagatcacatcaaggtaaacaactagttctatattctttttttgctgttgcttaggaaaattttaattttccttttcttctgtagaaagtaaaatatgaattctggatattttgttacaagattatcctagtttttagagagctcaataatactaacacctcatgtatttcaggctgcttcaggtctaattcaaccataaatttaaatggttgaaattctgattaattgacaagttaagttgggaggtaaggaacaactaggataccatctactatggtgtgtaggcaagtgctccagattgtgatttctttgagtatctggggtcgtagggaataatcactgtgcctgggtaagtcaggaagagatcataaatgacaaagaagtcacccttgtaaggattgagtatgtattagcagagatggattcatctgaaaatggtactagatggtgggtgcctgcatcagtattatttcagtatattttcacatcaagatagttgagtaagaaatgtcatgtgattaaatccaagaggtatttattgacctgtaatttgccagacactgctaatcccttgtgctacaaaaatgagtaagaaccacttattggtgcacacagtctgtggaagaaacagaactgcaaacctgtcattctaaaataataggtactaagggactgaatcagtagaagttcttcttgtgtacaccagagaaaagtgacaattgagttgatgcttgaaaagtgacaattgagttgatgcttgaaaagtgacataatggaaaagtgacaattttgaagaatcactaaattggggagtaaatggaaagagaaggattaataatagctttagtgaaaaaagaggataaagtgaagttgatttgtttatgattttagatagggataggagccaatagagaaacaaagattggaaatccagagaagagagtaattggtaatgcagtgttcaacaggagtcaggagggagtggaattaggagtactggtttgaagaagagaggaattatcttctgagactggagagaagagagtaaatatttcattctcaaaaactccttgggataattgggttttttcttgtgcccactttttaagagtaacacttgaagtaaatctttttgtttagtaaggcactaagggaaaagtcaaattatgaaccttcagaggaaatagaatgatgacctaatcttgcatattcttaggggtagagaagatgaagtccatgtcacagcttgcagttttgtcaagacggtggaagccttcagagatgaagttggatcccttccaggaggttgtattggaaagcagtagtgtggacgaattgcgagagaagcttagtgaaatcagtgggattcctttggatgatattgaatttgctaagggtagaggaacatttccctgtgatatttctgtccttgatattcatcaggatttagactggaatcctaaagtttctaccctgaatgtctggcctctttatatctgtgatgatggtgcggtcatattttatagggataaaacagaagaattaatggaattgacagatgagcaaagaaatgaactgatgaaaaaagaaagcagtcgactccagaagactggacatcgtgtaacatactcacctcgtaaagagaaagcactaaaaatatatctggatggagcaccaaataaagatctgactcaagactgactctgatagtgtagcattttccctgggggagttttggttttaattagatggttcactaccactgggtagtgccattttggccggacatggttggggtaacccagtgacaccagcactgattggactgccctacaccaatcagaagctcagtgcccaatgggccactgttttgactcggaatcatgttgtgcactatagtcaaatgtactgtaaagtgaaaagggatgtgcaaaaaaataaaaaaaaacaacaaaaaaagctaaccttctattagaaaaggggacaggggaatgagtaaacttcttttattgcggacaaatgtgcacatagccgctagtaaaactagcctcaaacaggatgctcatagcttaataataaaagctgtgcaaaggccatgaatgaatgaattttctgtttatttcactgatgcacacattacctcattgacaattcagaagtaaatccaacgtgtgttgactcttggaaagcagcaaaaacaggagctgaagaaaagaaattcttggaaccagccgtaacccagtaaggaattgtgaagttgtgtttttattttgtttcattttttgcagagtattaagaacattattctggaacatcagaacgtttcccttagaccgatcccagcaggtggcagctcagattgctgcagtgttgtaattataactgattgtacttaagttatggatgtagagaatatgtttcattcatttattcagcatgtaaataaaattgatcctgttgagttatcataattgcagttcaactatctgccatgattattcttttcacgtatcattcattctgtacatttgtgtacattgagaagtatagcaatctatgtaaatgtaatcctcagtgaggttcctcagtgctaggtcccataggattgtcgttgcccttgttaatgaggtttctctgttcagcggcttcaatttttttctctttgtacatctagttttgaagatttacttcaagtttgaatcttctagaatgcttgtaagtccagttttaatttttagagtcaatttgtagttacatgtagtttaacttttgggaaacgtcttaacattgttctgaataaacttgctaatgaggtcaggtcatggtacagactgatgcagtcaacatgatttcattgcagagtttattagtatcagcaagtttttgctttgctaaataaaagtactcaatgaacacaattctacataaattttgacataccatctaatttataaaaatcaataaaaaaggttttggtaaaactttttcatgccagatgctgtttacaacaatgaacatgccaataaaacatttgttcattctgttgtgttattttagtcattaaacttctgtggatgaagaatctgggttaagaatagatttgtcatctttaaatatgacattttgtaatgtgtattggatatctcatttctatgataaaggtatatttacagtaaagttctcataagagaaatgaaaagctgtgttaatatctaactttggggaaccctgtcagtatttcagatccgatttttaccctttttttcttataagaaagataaaattagaaaatactgttagcaaatgtggctctgccatttgaatataatcaccgagaattccatgtcttaaaagtctcctggaatccacaatgaaaaaaaaaatcttttctaaggtatttttctggctaatttttatttgaagaaagctatagcatttagcgaaatttgactgaagtaatgttctgagtttgcattagtgggattggtgatgttctcagaagaaaattggaaacacttgtgatgaattgtctttcagatcacttagattttctgatgtaagaggacagctgtttggttctgatacaggcctgcttacttgggatgtagggttagtaaatggggtttctgctttaaaggactgacttgctatcacacaaaagaggcagacttgtaaacacaatgggctttggagtttggtctgattgggtttggtttagtattcctatgagcgtaaatggtaaaattcttctgatacccactctttagactgtgccttctgctctgttctttgttttatgtttaactgctgtttctaattgcaggtgtattacagatacaaataagagtaaagaaaatatatttcattatagaaaagaaaaaattaaaagcttcttgcttttcagtgcctgatagagtgaaaacacaaagttgcactttaataatttcaataaaagctaatctgtgtcagcctccctctgcttcagagagtcaggtgagcatccataacctaacaggcagagccctagcgatgtggatcaagtttcctgagcccgggggcggtggagcctcatgatctcttatcttttgaggctgaggcaggtcacatgcaacaaattgtgaccctgctccccacaagtcatgcaaaggttttgaagagcttttaccgtggggcagatgaacttgtgtcaaccatgcacaccctgtgagaaccaagtacctgtgtttctaaggcgggcactcaaggtgaggggtgcattctggccaaagaaacaaaagctgtggtttcaggaccatgccgtgtgtagctgatctgtacgggacgtgtatgtaaggaagagcaatcatgatagataagaacagtgtgtgaagcagccttcacactagagtgtttggtcatctcttataatgtaagggaaggtactttaaaattctgggaagatgcgatgaactcatgtcccagtcagaaaataatccaatgaaataagcattggttgccaggccacagttaggaattgtattgtgatacatctagaggccaagagagcaggagagagctaccaacttacactgtggtttaagctaaatgaccgcacagcatcatagcattgcagtgttgttactaaatctggaagtgacctgtgaatgtatggaatacaataaagtcttttattctggttcatttgctagtacttcctttttgattggatactgtagttcttcctctggattttattttgttcagcgtcaaggccctaattttgcaaatgtagtctaaaccacattacgtggactagaggatactctgaattagcaagttttttgtttgctgaataaaactattccatcttaac

SEQ ID NO: 20737 - protein, 157 aa, Homo sapiens; identical to SEQ ID NO: 20731

SEQ ID NO: 20738 - DNA, 839 bp, Homo sapiens
gctgcttcaggtctaattcaaccataaatttaaatggttgaaattctgattaattgacaagttaagttgggaggggtagagaagatgaagtccatgtcacagcttgcagttttgtcaagacggtggaagccttcagagatgaagttggatcccttccaggaggttgtattggaaagcagtagtgtggacgaattgcgagagaagcttagtgaaatcagtgggattcctttggatgatattgaatttgctaagggtagaggaacatttccctgtgatatttctgtccttgatattcatcaggatttagactggaatcctaaagtttctaccctgaatgtctggcctctttatatctgtgatgatggtgcggtcatattttatagggataaaacagaagaattaatggaattgacagatgagcaaagaaatgaactgatgaaaaaagaaagcagtcgactccagaagactggacatcgtgtaacatactcacctcgtaaagagaaagcactaaaaatatatctggatggagcaccaaataaagatctgactcaagactgactctgatagtgtagcattttccctgggggagttttggttttaattagatggttcactaccactgggtagtgccattttggccggacatggttggggtaacccagtgacaccagcactgattggactgccctacaccaatcagaagctcagtgcccaatgggccactgttttgactcggaatcatgttgtgcactatagtcaaatgtactgtaaagtgaaaagggatgtgcaaaaaaataaaaaaaaacaacaaaaaaagctaaccttctattagaaaaggg

SEQ ID NO: 20739 - protein, 157 aa, Homo sapiens; identical to SEQ ID NO: 20731

SEQ ID NO: 20740 - DNA, 955 bp, Homo sapiens
gctgcttcaggtctaattcaaccataaatttaaatggttgaaattctgattaattgacaagttaagttgggaggggtagagaagatgaagtccatgtcacagcttgcagttttgtcaagacggtggaagccttcagagatgaagttggatcccttccaggaggttgtattggaaagcagtagtgtggacgaattgcgagagaagcttagtgaaatcagtgggattcctttggatgatattgaatttgctaagggtagaggaacatttccctgtgatatttctgtccttgatattcatcaggatttagactggaatcctaaagtttctaccctgaatgtctggcctctttatatctgtgatgatggtgcggtcatattttatagggataaaacagaagaattaatggaattgacagatgagcaaagaaatgaactgatgaaaaaagaaagcagtcgactccagaagactggacatcgtgtaacatactcacctcgtaaagagaaagcactaaaaatatatctggatggagcaccaaataaagatctgactcaagactgactctgatagtgtagcattttccctgggggagttttggttttaattagatggttcactaccactgggtagtgccattttggccggacatggttggggtaacccagtgacaccagcactgattggactgccctacaccaatcagaagctcagtgcccaatgggccactgttttgactcggaatcatgttgtgcactatagtcaaatgtactgtaaagtgaaaagggatgtgcaaaaaaataaaaaaaaacaacaaaaaaagctaaccttctattagaaaaggggacaggggaatgagtaaacttcttttattgcggacaaatgtgcacatagccgctagtaaaactagcctcaaacaggatgctcatagcttaataataaaagctgtgcaaaggccatg

SEQ ID NO: 20741 - protein, 157 aa, Homo sapiens; identical to SEQ ID NO: 20731

SEQ ID NO: 20742 - DNA, 1332 bp, Homo sapiens
gctgcttcaggtctaattcaaccataaatttaaatggttgaaattctgattaattgacaagttaagttgggaggggtagagaagatgaagtccatgtcacagcttgcagttttgtcaagacggtggaagccttcagagatgaagttggatcccttccaggaggttgtattggaaagcagtagtgtggacgaattgcgagagaagcttagtgaaatcagtgggattcctttggatgatattgaatttgctaagggtagaggaacatttccctgtgatatttctgtccttgatattcatcaggatttagactggaatcctaaagtttctaccctgaatgtctggcctctttatatctgtgatgatggtgcggtcatattttatagggataaaacagaagaattaatggaattgacagatgagcaaagaaatgaactgatgaaaaaagaaagcagtcgactccagaagactggacatcgtgtaacatactcacctcgtaaagagaaagcactaaaaatatatctggatggagcaccaaataaagatctgactcaagactgactctgatagtgtagcattttccctgggggagttttggttttaattagatggttcactaccactgggtagtgccattttggccggacatggttggggtaacccagtgacaccagcactgattggactgccctacaccaatcagaagctcagtgcccaatgggccactgttttgactcggaatcatgttgtgcactatagtcaaatgtactgtaaagtgaaaagggatgtgcaaaaaaataaaaaaaaacaacaaaaaaagctaaccttctattagaaaaggggacaggggaatgagtaaacttcttttattgcggacaaatgtgcacatagccgctagtaaaactagcctcaaacaggatgctcatagcttaataataaaagctgtgcaaaggccatgaatgaatgaattttctgtttatttcactgatgcacacattacctcattgacaattcagaagtaaatccaacgtgtgttgactcttggaaagcagcaaaaacaggagctgaagaaaagaaattcttggaaccagccgtaacccagtaaggaattgtgaagttgtgtttttattttgtttcattttttgcagagtattaagaacattattctggaacatcagaacgtttcccttagaccgatcccagcaggtggcagctcagattgctgcagtgttgtaattataactgattgtacttaagttatggatgtagagaatatgtttcattcatttattcagcatgtaaataaaattgatcctgttgagttatcataattgc

SEQ ID NO: 20743 - protein, 157 aa, Homo sapiens; identical to SEQ ID NO: 20731

SEQ ID NO: 20744 - DNA, 1907 bp, Homo sapiens
gctgcttcaggtctaattcaaccataaatttaaatggttgaaattctgattaattgacaagttaagttgggaggggtagagaagatgaagtccatgtcacagcttgcagttttgtcaagacggtggaagccttcagagatgaagttggatcccttccaggaggttgtattggaaagcagtagtgtggacgaattgcgagagaagcttagtgaaatcagtgggattcctttggatgatattgaatttgctaagggtagaggaacatttccctgtgatatttctgtccttgatattcatcaggatttagactggaatcctaaagtttctaccctgaatgtctggcctctttatatctgtgatgatggtgcggtcatattttatagggataaaacagaagaattaatggaattgacagatgagcaaagaaatgaactgatgaaaaaagaaagcagtcgactccagaagactggacatcgtgtaacatactcacctcgtaaagagaaagcactaaaaatatatctggatggagcaccaaataaagatctgactcaagactgactctgatagtgtagcattttccctgggggagttttggttttaattagatggttcactaccactgggtagtgccattttggccggacatggttggggtaacccagtgacaccagcactgattggactgccctacaccaatcagaagctcagtgcccaatgggccactgttttgactcggaatcatgttgtgcactatagtcaaatgtactgtaaagtgaaaagggatgtgcaaaaaaataaaaaaaaacaacaaaaaaagctaaccttctattagaaaaggggacaggggaatgagtaaacttcttttattgcggacaaatgtgcacatagccgctagtaaaactagcctcaaacaggatgctcatagcttaataataaaagctgtgcaaaggccatgaatgaatgaattttctgtttatttcactgatgcacacattacctcattgacaattcagaagtaaatccaacgtgtgttgactcttggaaagcagcaaaaacaggagctgaagaaaagaaattcttggaaccagccgtaacccagtaaggaattgtgaagttgtgtttttattttgtttcattttttgcagagtattaagaacattattctggaacatcagaacgtttcccttagaccgatcccagcaggtggcagctcagattgctgcagtgttgtaattataactgattgtacttaagttatggatgtagagaatatgtttcattcatttattcagcatgtaaataaaattgatcctgttgagttatcataattgcagttcaactatctgccatgattattcttttcacgtatcattcattctgtacatttgtgtacattgagaagtatagcaatctatgtaaatgtaatcctcagtgaggttcctcagtgctaggtcccataggattgtcgttgcccttgttaatgaggtttctctgttcagcggcttcaatttttttctctttgtacatctagttttgaagatttacttcaagtttgaatcttctagaatgcttgtaagtccagttttaatttttagagtcaatttgtagttacatgtagtttaacttttgggaaacgtcttaacattgttctgaataaacttgctaatgaggtcaggtcatggtacagactgatgcagtcaacatgatttcattgcagagtttattagtatcagcaagtttttgctttgctaaataaaagtactcaatgaacacaattctacataaattttgacataccatctaatttataaaaatcaataaaaaaggttttggtaaaactttttcatgccagatgctgtttacaacaatgaacatgccaataaaacatttgttcattctgttgtgtt

SEQ ID NO: 20745 - protein, 157 aa, Homo sapiens; identical to SEQ ID NO: 20731

SEQ ID NO: 20746 - DNA, 3709 bp, Homo sapiens
gctgcttcaggtctaattcaaccataaatttaaatggttgaaattctgattaattgacaagttaagttgggaggggtagagaagatgaagtccatgtcacagcttgcagttttgtcaagacggtggaagccttcagagatgaagttggatcccttccaggaggttgtattggaaagcagtagtgtggacgaattgcgagagaagcttagtgaaatcagtgggattcctttggatgatattgaatttgctaagggtagaggaacatttccctgtgatatttctgtccttgatattcatcaggatttagactggaatcctaaagtttctaccctgaatgtctggcctctttatatctgtgatgatggtgcggtcatattttatagggataaaacagaagaattaatggaattgacagatgagcaaagaaatgaactgatgaaaaaagaaagcagtcgactccagaagactggacatcgtgtaacatactcacctcgtaaagagaaagcactaaaaatatatctggatggagcaccaaataaagatctgactcaagactgactctgatagtgtagcattttccctgggggagttttggttttaattagatggttcactaccactgggtagtgccattttggccggacatggttggggtaacccagtgacaccagcactgattggactgccctacaccaatcagaagctcagtgcccaatgggccactgttttgactcggaatcatgttgtgcactatagtcaaatgtactgtaaagtgaaaagggatgtgcaaaaaaataaaaaaaaacaacaaaaaaagctaaccttctattagaaaaggggacaggggaatgagtaaacttcttttattgcggacaaatgtgcacatagccgctagtaaaactagcctcaaacaggatgctcatagcttaataataaaagctgtgcaaaggccatgaatgaatgaattttctgtttatttcactgatgcacacattacctcattgacaattcagaagtaaatccaacgtgtgttgactcttggaaagcagcaaaaacaggagctgaagaaaagaaattcttggaaccagccgtaacccagtaaggaattgtgaagttgtgtttttattttgtttcattttttgcagagtattaagaacattattctggaacatcagaacgtttcccttagaccgatcccagcaggtggcagctcagattgctgcagtgttgtaattataactgattgtacttaagttatggatgtagagaatatgtttcattcatttattcagcatgtaaataaaattgatcctgttgagttatcataattgcagttcaactatctgccatgattattcttttcacgtatcattcattctgtacatttgtgtacattgagaagtatagcaatctatgtaaatgtaatcctcagtgaggttcctcagtgctaggtcccataggattgtcgttgcccttgttaatgaggtttctctgttcagcggcttcaatttttttctctttgtacatctagttttgaagatttacttcaagtttgaatcttctagaatgcttgtaagtccagttttaatttttagagtcaatttgtagttacatgtagtttaacttttgggaaacgtcttaacattgttctgaataaacttgctaatgaggtcaggtcatggtacagactgatgcagtcaacatgatttcattgcagagtttattagtatcagcaagtttttgctttgctaaataaaagtactcaatgaacacaattctacataaattttgacataccatctaatttataaaaatcaataaaaaaggttttggtaaaactttttcatgccagatgctgtttacaacaatgaacatgccaataaaacatttgttcattctgttgtgttattttagtcattaaacttctgtggatgaagaatctgggttaagaatagatttgtcatctttaaatatgacattttgtaatgtgtattggatatctcatttctatgataaaggtatatttacagtaaagttctcataagagaaatgaaaagctgtgttaatatctaactttggggaaccctgtcagtatttcagatccgatttttaccctttttttcttataagaaagataaaattagaaaatactgttagcaaatgtggctctgccatttgaatataatcaccgagaattccatgtcttaaaagtctcctggaatccacaatgaaaaaaaaaatcttttctaaggtatttttctggctaatttttatttgaagaaagctatagcatttagcgaaatttgactgaagtaatgttctgagtttgcattagtgggattggtgatgttctcagaagaaaattggaaacacttgtgatgaattgtctttcagatcacttagattttctgatgtaagaggacagctgtttggttctgatacaggcctgcttacttgggatgtagggttagtaaatggggtttctgctttaaaggactgacttgctatcacacaaaagaggcagacttgtaaacacaatgggctttggagtttggtctgattgggtttggtttagtattcctatgagcgtaaatggtaaaattcttctgatacccactctttagactgtgccttctgctctgttctttgttttatgtttaactgctgtttctaattgcaggtgtattacagatacaaataagagtaaagaaaatatatttcattatagaaaagaaaaaattaaaagcttcttgcttttcagtgcctgatagagtgaaaacacaaagttgcactttaataatttcaataaaagctaatctgtgtcagcctccctctgcttcagagagtcaggtgagcatccataacctaacaggcagagccctagcgatgtggatcaagtttcctgagcccgggggcggtggagcctcatgatctcttatcttttgaggctgaggcaggtcacatgcaacaaattgtgaccctgctccccacaagtcatgcaaaggttttgaagagcttttaccgtggggcagatgaacttgtgtcaaccatgcacaccctgtgagaaccaagtacctgtgtttctaaggcgggcactcaaggtgaggggtgcattctggccaaagaaacaaaagctgtggtttcaggaccatgccgtgtgtagctgatctgtacgggacgtgtatgtaaggaagagcaatcatgatagataagaacagtgtgtgaagcagccttcacactagagtgtttggtcatctcttataatgtaagggaaggtactttaaaattctgggaagatgcgatgaactcatgtcccagtcagaaaataatccaatgaaataagcattggttgccaggccacagttaggaattgtattgtgatacatctagaggccaagagagcaggagagagctaccaacttacactgtggtttaagctaaatgaccgcacagcatcatagcattgcagtgttgttactaaatctggaagtgacctgtgaatgtatggaatacaataaagtcttttattctggttcatttgctagtacttcctttttgattggatactgtagttcttcctctggattttattttgttcagcgtcaaggccctaattttgcaaatgtagtctaaaccacattacgtggactagaggatactctgaattagcaagttttttgtttgctgaataaaactattccatcttaac

SEQ ID NO: 20747 - protein, 157 aa, Homo sapiens; identical to SEQ ID NO: 20731

SEQ ID NO: 20748 - DNA, 2243 bp, Homo sapiens
gatcgcgttccgggacacacaggcggcggctgcgggcgcagagcggagatgcagcggcttggggccaccctgctgtgcctgctgctggcggcggcggtccccacggcccccgcgcccgctccgacggcgacctcggctccagtcaagcccggcccggctctcagctacccgcaggaggaggccaccctcaatgagatgttccgcgaggttgaggaactgatggaggacacgcagcacaaattgcgcagcgcggtggaagagatttagatctggaccaggctgtgggtagatgtgcaatagaaatagctaatttatttccccaggtgtgtgctttaggcgtgggctgaccaggcttcttcctacatcttcttcccagtaagtttcccctctggcttgacagcatgaggtgttgtgcatttgttcagctcccccaggctgttctccaggcttcacagtctggtgcttgggagagtcaggcagggttaaactgcaggagcagtttgccacccctgtccagattattggctgctttgcctctaccagttggcagacagccgtttgttctacatggctttgataattgtttgaggggaggagatggaaacaatgtggagtctccctctgattggttttggggaaatgtggagaagagtgccctgctttgcaaacatcaacctggcaaaaatgcaacaaatgaattttccacgcagttctttccatgggcataggtaagctgtgccttcagctgttgcagatgaaatgttctgttcaccctgcattacatgtgtttattcatccagcagtgttgctcagctcctacctctgtgccagggcagcattttcatatccaagatcaattccctctctcagcacagcctggggagggggtcattgttctcctcgtccatcagggatctcagaggctcagagactgcaagctgcttgcccaagtcacacagctagtgaagaccagagcagtttcatctggttgtgactctaagctcagtgctctctccactaccccacaccagccttggtgccaccaaaagtgctccccaaaaggaaggagaatgggatttttcttttgaggcatgcacatctggaattaaggtcaaactaattctcacatccctctaaaagtaaactactgttaggaacagcagtgttctcacagtgtggggcagccgtccttctaatgaagacaatgatattgacactgtccctctttggcagttgcattagtaactttgaaaggtatatgactgagcgtagcatacaggttaacctgcagaaacagtacttaggtaattgtagggcgaggattataaatgaaatttgcaaaatcacttagcagcaactgaagacaattatcaaccacgtggagaaaatcaaaccgagcagggctgtgtgaaacatggttgtaatatgcgactgcgaacactgaactctacgccactccacaaatgatgttttcaggtgtcatggactgttgccaccatgtattcatccagagttcttaaagtttaaagttgcacatgattgtataagcatgctttctttgagttttaaattatgtataaacataagttgcatttagaaatcaagcataaatcacttcaactgctcttctgtagttcttggatttcttttcccttttgactttgaataaatgtaaaatcctttcagccagaaaaagtaaaatagaaacaacctgtattaaaaatcttccatagaagcaaatttgccacccaactgaagcacacctctttcagcatcaaaatattttagaaatcttaactatttttggatgggaatttgtcttaaagagtgtaaatgcttcacggccttctgaaaggacaaatggaatatgtatgactctttttttaggggagccttctttaatcaaatgcagttctgggccataagacagtaagatcctcaaggaccataatattagagctactatattgaagtcagctgcgtggcaagtgccagattaggcagtctacctatattcattcatttaatcttcactgaactccatgagcattttcttcatttcacagatgaacaaatggaggtgcaaagagattgacagagtagaagtcagacaaaaacagcatctagtacagtatgtccaggttatagtgattattttaagatcaaatagggagctgttttctattcaatgtcagaaaccatcaggaccaccctacattctggttactcaacagatatctact

SEQ ID NO: 20749 - protein, 72 aa, Homo sapiens
MQRLGATLLCLLLAAAVPTAPAPAPTATSAPVKPGPALSYPQEEATLNEMFREVEELMEDTQHKLRSAVEEI

SEQ ID NO: 20750 - DNA, 3268 bp, Homo sapiens
cgacgccaaggggagggggctgacctgtgcttggtccaccccaggtaggggctgagagaggcttgaggtggaagtgggggtcgggcactctgacctggtcgaggaggggctagggtttgaaccggggacagagtctaggtgagctggggcttgggagctattagcgtagaggatccgggttcggttgctctggcgagggctccagcatcacaggcggcggctgcgggcgcagagcggagatgcagcggcttggggccaccctgctgtgcctgctgctggcggcggcggtccccacggcccccgcgcccgctccgacggcgacctcggctccagtcaagcccggcccggctctcagctacccgcaggaggaggccaccctcaatgagatgttccgcgaggttgaggaactgatggaggacacgcagcacaaattgcgcagcgcggtggaagagatggaggcagaagaagctgctgctaaagcatcatcagaagtgaacctggcaaacttacctcccagctatcacaatgagaccaacacagacacgaaggttggaaataataccatccatgtgcaccgagaaattcacaagataaccaacaaccagactggacaaatggtcttttcagagacagttatcacatctgtgggagacgaagaaggcagaaggagccacgagtgcatcatcgacgaggactgtgggcccagcatgtactgccagtttgccagcttccagtacacctgccagccatgccggggccagaggatgctctgcacccgggacagtgagtgctgtggagaccagctgtgtgtctggggtcactgcaccaaaatggccaccaggggcagcaatgggaccatctgtgacaaccagagggactgccagccggggctgtgctgtgccttccagagaggcctgctgttccctgtgtgcacacccctgcccgtggagggcgagctttgccatgaccccgccagccggcttctggacctcatcacctgggagctagagcctgatggagccttggaccgatgcccttgtgccagtggcctcctctgccagccccacagccacagcctggtgtatgtgtgcaagccgaccttcgtggggagccgtgaccaagatggggagatcctgctgcccagagaggtccccgatgagtatgaagttggcagcttcatggaggaggtgcgccaggagctggaggacctggagaggagcctgactgaagagatggcgctgagggagcctgcggctgccgccgctgcactgctgggaggggaagagatttagatctggaccaggctgtgggtagatgtgcaatagaaatagctaatttatttccccaggtgtgtgctttaggcgtgggctgaccaggcttcttcctacatcttcttcccagtaagtttcccctctggcttgacagcatgaggtgttgtgcatttgttcagctcccccaggctgttctccaggcttcacagtctggtgcttgggagagtcaggcagggttaaactgcaggagcagtttgccacccctgtccagattattggctgctttgcctctaccagttggcagacagccgtttgttctacatggctttgataattgtttgaggggaggagatggaaacaatgtggagtctccctctgattggttttggggaaatgtggagaagagtgccctgctttgcaaacatcaacctggcaaaaatgcaacaaatgaattttccacgcagttctttccatgggcataggtaagctgtgccttcagctgttgcagatgaaatgttctgttcaccctgcattacatgtgtttattcatccagcagtgttgctcagctcctacctctgtgccagggcagcattttcatatccaagatcaattccctctctcagcacagcctggggagggggtcattgttctcctcgtccatcagggatctcagaggctcagagactgcaagctgcttgcccaagtcacacagctagtgaagaccagagcagtttcatctggttgtgactctaagctcagtgctctctccactaccccacaccagccttggtgccaccaaaagtgctccccaaaaggaaggagaatgggatttttcttttgaggcatgcacatctggaattaaggtcaaactaattctcacatccctctaaaagtaaactactgttaggaacagcagtgttctcacagtgtggggcagccgtccttctaatgaagacaatgatattgacactgtccctctttggcagttgcattagtaactttgaaaggtatatgactgagcgtagcatacaggttaacctgcagaaacagtacttaggtaattgtagggcgaggattataaatgaaatttgcaaaatcacttagcagcaactgaagacaattatcaaccacgtggagaaaatcaaaccgagcagggctgtgtgaaacatggttgtaatatgcgactgcgaacactgaactctacgccactccacaaatgatgttttcaggtgtcatggactgttgccaccatgtattcatccagagttcttaaagtttaaagttgcacatgattgtataagcatgctttctttgagttttaaattatgtataaacataagttgcatttagaaatcaagcataaatcacttcaactgctcttctgtagttcttggatttcttttcccttttgactttgaataaatgtaaaatcctttcagccagaaaaagtaaaatagaaacaacctgtattaaaaatcttccatagaagcaaatttgccacccaactgaagcacacctctttcagcatcaaaatattttagaaatcttaactatttttggatgggaatttgtcttaaagagtgtaaatgcttcacggccttctgaaaggacaaatggaatatgtatgactctttttttaggggagccttctttaatcaaatgcagttctgggccataagacagtaagatcctcaaggaccataatattagagctactatattgaagtcagctgcgtggcaagtgccagattaggcagtctacctatattcattcatttaatcttcactgaactccatgagcattttcttcatttcacagatgaacaaatggaggtgcaaagagattgacagagtagaagtcagacaaaaacagcatctagtacagtatgtccaggttatagtgattattttaagatcaaatagggagctgttttctattcaatgtcagaaaccatcaggaccaccctacattctggttactcaacagatatctact

SEQ ID NO: 20751 - protein, 350 aa, Homo sapiens; identical to SEQ ID NO: 2629

SEQ ID NO: 20752 - DNA, 3418 bp, Homo sapiens
agtgaaggagatggctgccttcggtagagctggtcgctgaggcagaagaggagggcgtggggcgtggggcgtgaggtggccggcgccccggctggccaatggccgggctgcggcccctccgcggggcggggtgggcctggtgggcgggcggggctcggggcgggggcggagagggagcctggtgggcgggcggggcgcgtcttgcgggctccctcgggtaccggcgctgccgcaccccgccgcgctcccgcacccgcggcccgcccaccgcgccgctcccgcatctgcacccgcagcccggcggcctcccggcgggagcgagcagatccagtccggcccgcagcgcaactcggtccagtcggggcggcggctgcgggcgcagagcggagatgcagcggcttggggccaccctgctgtgcctgctgctggcggcggcggtccccacggcccccgcgcccgctccgacggcgacctcggctccagtcaagcccggcccggctctcagctacccgcaggaggaggccaccctcaatgagatgttccgcgaggttgaggaactgatggaggacacgcagcacaaattgcgcagcgcggtggaagagatggaggcagaagaagctgctgctaaagcatcatcagaagtgaacctggcaaacttacctcccagctatcacaatgagaccaacacagacacgaaggttggaaataataccatccatgtgcaccgagaaattcacaagataaccaacaaccagactggacaaatggtcttttcagagacagttatcacatctgtgggagacgaagaaggcagaaggagccacgagtgcatcatcgacgaggactgtgggcccagcatgtactgccagtttgccagcttccagtacacctgccagccatgccggggccagaggatgctctgcacccgggacagtgagtgctgtggagaccagctgtgtgtctggggtcactgcaccaaaatggccaccaggggcagcaatgggaccatctgtgacaaccagagggactgccagccggggctgtgctgtgccttccagagaggcctgctgttccctgtgtgcacacccctgcccgtggagggcgagctttgccatgaccccgccagccggcttctggacctcatcacctgggagctagagcctgatggagccttggaccgatgcccttgtgccagtggcctcctctgccagccccacagccacagcctggtgtatgtgtgcaagccgaccttcgtggggagccgtgaccaagatggggagatcctgctgcccagagaggtccccgatgagtatgaagttggcagcttcatggaggaggtgcgccaggagctggaggacctggagaggagcctgactgaagagatggcgctgagggagcctgcggctgccgccgctgcactgctgggaggggaagagatttagatctggaccaggctgtgggtagatgtgcaatagaaatagctaatttatttccccaggtgtgtgctttaggcgtgggctgaccaggcttcttcctacatcttcttcccagtaagtttcccctctggcttgacagcatgaggtgttgtgcatttgttcagctcccccaggctgttctccaggcttcacagtctggtgcttgggagagtcaggcagggttaaactgcaggagcagtttgccacccctgtccagattattggctgctttgcctctaccagttggcagacagccgtttgttctacatggctttgataattgtttgaggggaggagatggaaacaatgtggagtctccctctgattggttttggggaaatgtggagaagagtgccctgctttgcaaacatcaacctggcaaaaatgcaacaaatgaattttccacgcagttctttccatgggcataggtaagctgtgccttcagctgttgcagatgaaatgttctgttcaccctgcattacatgtgtttattcatccagcagtgttgctcagctcctacctctgtgccagggcagcattttcatatccaagatcaattccctctctcagcacagcctggggagggggtcattgttctcctcgtccatcagggatctcagaggctcagagactgcaagctgcttgcccaagtcacacagctagtgaagaccagagcagtttcatctggttgtgactctaagctcagtgctctctccactaccccacaccagccttggtgccaccaaaagtgctccccaaaaggaaggagaatgggatttttcttttgaggcatgcacatctggaattaaggtcaaactaattctcacatccctctaaaagtaaactactgttaggaacagcagtgttctcacagtgtggggcagccgtccttctaatgaagacaatgatattgacactgtccctctttggcagttgcattagtaactttgaaaggtatatgactgagcgtagcatacaggttaacctgcagaaacagtacttaggtaattgtagggcgaggattataaatgaaatttgcaaaatcacttagcagcaactgaagacaattatcaaccacgtggagaaaatcaaaccgagcagggctgtgtgaaacatggttgtaatatgcgactgcgaacactgaactctacgccactccacaaatgatgttttcaggtgtcatggactgttgccaccatgtattcatccagagttcttaaagtttaaagttgcacatgattgtataagcatgctttctttgagttttaaattatgtataaacataagttgcatttagaaatcaagcataaatcacttcaactgctcttctgtagttcttggatttcttttcccttttgactttgaataaatgtaaaatcctttcagccagaaaaagtaaaatagaaacaacctgtattaaaaatcttccatagaagcaaatttgccacccaactgaagcacacctctttcagcatcaaaatattttagaaatcttaactatttttggatgggaatttgtcttaaagagtgtaaatgcttcacggccttctgaaaggacaaatggaatatgtatgactctttttttaggggagccttctttaatcaaatgcagttctgggccataagacagtaagatcctcaaggaccataatattagagctactatattgaagtcagctgcgtggcaagtgccagattaggcagtctacctatattcattcatttaatcttcactgaactccatgagcattttcttcatttcacagatgaacaaatggaggtgcaaagagattgacagagtagaagtcagacaaaaacagcatctagtacagtatgtccaggttatagtgattattttaagatcaaatagggagctgttttctattcaatgtcagaaaccatcaggaccaccctacattctggttactcaacagatatctact

SEQ ID NO: 20753 - protein, 447 aa, Homo sapiens
MAGLRPLRGAGWAWWAGGARGGGGEGAWWAGGARLAGSLGYRRCRTPPRSRTRGPPTAPLPHLHPQPGGLPAGASRSSPARSATRSSRGGGCGRRAEMQRLGATLLCLLLAAAVPTAPAPAPTATSAPVKPGPALSYPQEEATLNEMFREVEELMEDTQHKLRSAVEEMEAEEAAAKASSEVNLANLPPSYHNETNTDTKVGNNTIHVHREIHKITNNQTGQMVFSETVITSVGDEEGRRSHECIIDEDCGPSMYCQFASFQYTCQPCRGQRMLCTRDSECCGDQLCVWGHCTKMATRGSNGTICDNQRDCQPGLCCAFQRGLLFPVCTPLPVEGELCHDPASRLLDLITWELEPDGALDRCPCASGLLCQPHSHSLVYVCKPTFVGSRDQDGEILLPREVPDEYEVGSFMEEVRQELEDLERSLTEEMALREPAAAAAALLGGEEI

SEQ ID NO: 20754 - DNA, 1629 bp, Homo sapiens
gatcgcgttccgggacacacaggcggcggctgcgggcgcagagcggagatgcagcggcttggggccaccctgctgtgcctgctgctggcggcggcggtccccacggcccccgcgcccgctccgacggcgacctcggctccagtcaagcccggcccggctctcagctacccgcaggaggaggccaccctcaatgagatgttccgcgaggttgaggaactgatggaggacacgcagcacaaattgcgcagcgcggtggaagagatttagatctggaccaggctgtgggtagatgtgcaatagaaatagctaatttatttccccaggtgtgtgctttaggcgtgggctgaccaggcttcttcctacatcttcttcccagtaagtttcccctctggcttgacagcatgaggtgttgtgcatttgttcagctcccccaggctgttctccaggcttcacagtctggtgcttgggagagtcaggcagggttaaactgcaggagcagtttgccacccctgtccagattattggctgctttgcctctaccagttggcagacagccgtttgttctacatggctttgataattgtttgaggggaggagatggaaacaatgtggagtctccctctgattggttttggggaaatgtggagaagagtgccctgctttgcaaacatcaacctggcaaaaatgcaacaaatgaattttccacgcagttctttccatgggcataggtaagctgtgccttcagctgttgcagatgaaatgttctgttcaccctgcattacatgtgtttattcatccagcagtgttgctcagctcctacctctgtgccagggcagcattttcatatccaagatcaattccctctctcagcacagcctggggagggggtcattgttctcctcgtccatcagggatctcagaggctcagagactgcaagctgcttgcccaagtcacacagctagtgaagaccagagcagtttcatctggttgtgactctaagctcagtgctctctccactaccccacaccagccttggtgccaccaaaagtgctccccaaaaggaaggagaatgggatttttcttttgaggcatgcacatctggaattaaggtcaaactaattctcacatccctctaaaagtaaactactgttaggaacagcagtgttctcacagtgtggggcagccgtccttctaatgaagacaatgatattgacactgtccctctttggcagttgcattagtaactttgaaaggtatatgactgagcgtagcatacaggttaacctgcagaaacagtacttaggtaattgtagggcgaggattataaatgaaatttgcaaaatcacttagcagcaactgaagacaattatcaaccacgtggagaaaatcaaaccgagcagggctgtgtgaaacatggttgtaatatgcgactgcgaacactgaactctacgccactccacaaatgatgttttcaggtgtcatggactgttgccaccatgtattcatccagagttcttaaagtttaaagttgcacatgattgtataagcatgctttctttgagttttaaattatgtataaacataagttgcatttagaaatcaagcataaatcacttcaactgctcttc

SEQ ID NO: 20755 - protein, 72 aa, Homo sapiens; identical to SEQ ID NO: 20749

SEQ ID NO: 20756 - DNA, 2654 bp, Homo sapiens
cgacgccaaggggagggggctgacctgtgcttggtccaccccaggtaggggctgagagaggcttgaggtggaagtgggggtcgggcactctgacctggtcgaggaggggctagggtttgaaccggggacagagtctaggtgagctggggcttgggagctattagcgtagaggatccgggttcggttgctctggcgagggctccagcatcacaggcggcggctgcgggcgcagagcggagatgcagcggcttggggccaccctgctgtgcctgctgctggcggcggcggtccccacggcccccgcgcccgctccgacggcgacctcggctccagtcaagcccggcccggctctcagctacccgcaggaggaggccaccctcaatgagatgttccgcgaggttgaggaactgatggaggacacgcagcacaaattgcgcagcgcggtggaagagatggaggcagaagaagctgctgctaaagcatcatcagaagtgaacctggcaaacttacctcccagctatcacaatgagaccaacacagacacgaaggttggaaataataccatccatgtgcaccgagaaattcacaagataaccaacaaccagactggacaaatggtcttttcagagacagttatcacatctgtgggagacgaagaaggcagaaggagccacgagtgcatcatcgacgaggactgtgggcccagcatgtactgccagtttgccagcttccagtacacctgccagccatgccggggccagaggatgctctgcacccgggacagtgagtgctgtggagaccagctgtgtgtctggggtcactgcaccaaaatggccaccaggggcagcaatgggaccatctgtgacaaccagagggactgccagccggggctgtgctgtgccttccagagaggcctgctgttccctgtgtgcacacccctgcccgtggagggcgagctttgccatgaccccgccagccggcttctggacctcatcacctgggagctagagcctgatggagccttggaccgatgcccttgtgccagtggcctcctctgccagccccacagccacagcctggtgtatgtgtgcaagccgaccttcgtggggagccgtgaccaagatggggagatcctgctgcccagagaggtccccgatgagtatgaagttggcagcttcatggaggaggtgcgccaggagctggaggacctggagaggagcctgactgaagagatggcgctgagggagcctgcggctgccgccgctgcactgctgggaggggaagagatttagatctggaccaggctgtgggtagatgtgcaatagaaatagctaatttatttccccaggtgtgtgctttaggcgtgggctgaccaggcttcttcctacatcttcttcccagtaagtttcccctctggcttgacagcatgaggtgttgtgcatttgttcagctcccccaggctgttctccaggcttcacagtctggtgcttgggagagtcaggcagggttaaactgcaggagcagtttgccacccctgtccagattattggctgctttgcctctaccagttggcagacagccgtttgttctacatggctttgataattgtttgaggggaggagatggaaacaatgtggagtctccctctgattggttttggggaaatgtggagaagagtgccctgctttgcaaacatcaacctggcaaaaatgcaacaaatgaattttccacgcagttctttccatgggcataggtaagctgtgccttcagctgttgcagatgaaatgttctgttcaccctgcattacatgtgtttattcatccagcagtgttgctcagctcctacctctgtgccagggcagcattttcatatccaagatcaattccctctctcagcacagcctggggagggggtcattgttctcctcgtccatcagggatctcagaggctcagagactgcaagctgcttgcccaagtcacacagctagtgaagaccagagcagtttcatctggttgtgactctaagctcagtgctctctccactaccccacaccagccttggtgccaccaaaagtgctccccaaaaggaaggagaatgggatttttcttttgaggcatgcacatctggaattaaggtcaaactaattctcacatccctctaaaagtaaactactgttaggaacagcagtgttctcacagtgtggggcagccgtccttctaatgaagacaatgatattgacactgtccctctttggcagttgcattagtaactttgaaaggtatatgactgagcgtagcatacaggttaacctgcagaaacagtacttaggtaattgtagggcgaggattataaatgaaatttgcaaaatcacttagcagcaactgaagacaattatcaaccacgtggagaaaatcaaaccgagcagggctgtgtgaaacatggttgtaatatgcgactgcgaacactgaactctacgccactccacaaatgatgttttcaggtgtcatggactgttgccaccatgtattcatccagagttcttaaagtttaaagttgcacatgattgtataagcatgctttctttgagttttaaattatgtataaacataagttgcatttagaaatcaagcataaatcacttcaactgctcttc

SEQ ID NO: 20757 - protein, 350 aa, Homo sapiens; identical to SEQ ID NO: 2629

SEQ ID NO: 20758 - DNA, 2804 bp, Homo sapiens
agtgaaggagatggctgccttcggtagagctggtcgctgaggcagaagaggagggcgtggggcgtggggcgtgaggtggccggcgccccggctggccaatggccgggctgcggcccctccgcggggcggggtgggcctggtgggcgggcggggctcggggcgggggcggagagggagcctggtgggcgggcggggcgcgtcttgcgggctccctcgggtaccggcgctgccgcaccccgccgcgctcccgcacccgcggcccgcccaccgcgccgctcccgcatctgcacccgcagcccggcggcctcccggcgggagcgagcagatccagtccggcccgcagcgcaactcggtccagtcggggcggcggctgcgggcgcagagcggagatgcagcggcttggggccaccctgctgtgcctgctgctggcggcggcggtccccacggcccccgcgcccgctccgacggcgacctcggctccagtcaagcccggcccggctctcagctacccgcaggaggaggccaccctcaatgagatgttccgcgaggttgaggaactgatggaggacacgcagcacaaattgcgcagcgcggtggaagagatggaggcagaagaagctgctgctaaagcatcatcagaagtgaacctggcaaacttacctcccagctatcacaatgagaccaacacagacacgaaggttggaaataataccatccatgtgcaccgagaaattcacaagataaccaacaaccagactggacaaatggtcttttcagagacagttatcacatctgtgggagacgaagaaggcagaaggagccacgagtgcatcatcgacgaggactgtgggcccagcatgtactgccagtttgccagcttccagtacacctgccagccatgccggggccagaggatgctctgcacccgggacagtgagtgctgtggagaccagctgtgtgtctggggtcactgcaccaaaatggccaccaggggcagcaatgggaccatctgtgacaaccagagggactgccagccggggctgtgctgtgccttccagagaggcctgctgttccctgtgtgcacacccctgcccgtggagggcgagctttgccatgaccccgccagccggcttctggacctcatcacctgggagctagagcctgatggagccttggaccgatgcccttgtgccagtggcctcctctgccagccccacagccacagcctggtgtatgtgtgcaagccgaccttcgtggggagccgtgaccaagatggggagatcctgctgcccagagaggtccccgatgagtatgaagttggcagcttcatggaggaggtgcgccaggagctggaggacctggagaggagcctgactgaagagatggcgctgagggagcctgcggctgccgccgctgcactgctgggaggggaagagatttagatctggaccaggctgtgggtagatgtgcaatagaaatagctaatttatttccccaggtgtgtgctttaggcgtgggctgaccaggcttcttcctacatcttcttcccagtaagtttcccctctggcttgacagcatgaggtgttgtgcatttgttcagctcccccaggctgttctccaggcttcacagtctggtgcttgggagagtcaggcagggttaaactgcaggagcagtttgccacccctgtccagattattggctgctttgcctctaccagttggcagacagccgtttgttctacatggctttgataattgtttgaggggaggagatggaaacaatgtggagtctccctctgattggttttggggaaatgtggagaagagtgccctgctttgcaaacatcaacctggcaaaaatgcaacaaatgaattttccacgcagttctttccatgggcataggtaagctgtgccttcagctgttgcagatgaaatgttctgttcaccctgcattacatgtgtttattcatccagcagtgttgctcagctcctacctctgtgccagggcagcattttcatatccaagatcaattccctctctcagcacagcctggggagggggtcattgttctcctcgtccatcagggatctcagaggctcagagactgcaagctgcttgcccaagtcacacagctagtgaagaccagagcagtttcatctggttgtgactctaagctcagtgctctctccactaccccacaccagccttggtgccaccaaaagtgctccccaaaaggaaggagaatgggatttttcttttgaggcatgcacatctggaattaaggtcaaactaattctcacatccctctaaaagtaaactactgttaggaacagcagtgttctcacagtgtggggcagccgtccttctaatgaagacaatgatattgacactgtccctctttggcagttgcattagtaactttgaaaggtatatgactgagcgtagcatacaggttaacctgcagaaacagtacttaggtaattgtagggcgaggattataaatgaaatttgcaaaatcacttagcagcaactgaagacaattatcaaccacgtggagaaaatcaaaccgagcagggctgtgtgaaacatggttgtaatatgcgactgcgaacactgaactctacgccactccacaaatgatgttttcaggtgtcatggactgttgccaccatgtattcatccagagttcttaaagtttaaagttgcacatgattgtataagcatgctttctttgagttttaaattatgtataaacataagttgcatttagaaatcaagcataaatcacttcaactgctcttc

SEQ ID NO: 20759 - protein, 447 aa, Homo sapiens; identical to SEQ ID NO: 20753

SEQ ID NO: 20760 - DNA, 844 bp, Homo sapiens
gccagcggtgatggcttgaatgccaggctgggggctgggatttttcctgaggatttcacaggacagaggttggcttggaaagaccaaggcggcggctgcgggcgcagagcggagatgcagcggcttggggccaccctgctgtgcctgctgctggcggcggcggtccccacggcccccgcgcccgctccgacggcgacctcggctccagtcaagcccggcccggctctcagctacccgcaggaggaggccaccctcaatgagatgttccgcgaggttgaggaactgatggaggacacgcagcacaaattgcgcagcgcggtggaagagatggaggcagaagaagctgctgctaaagcatcatcagaagtgaacctggcaaacttacctcccagctatcacaatgagaccaacacagacacgaaggttggaaataataccatccatgtgcaccgagaaattcacaagataaccaacaaccagactggacaaatggtcttttcagagacagttatcacatctgtgggagacgaagaaggcagaaggagccacgcagataactggagctgcagaaaggagtctggtggagagggaggcaggctggtggctggacgctggcctccttgctgccacattgtgcataggatgagctgctcttgttaccgtgggatactcagcctggccatctttttggatcccggaccccatctgctgcctgacctagcaggagagccagctgctgcttcacatcccagctccagcactcactagctgtgtgactttggcaagttactcagcctttctgtgcctccatttcctcatctgtaaaatagaaaggaatagtaac

SEQ ID NO: 20761 - protein, 217 aa, Homo sapiens
MQRLGATLLCLLLAAAVPTAPAPAPTATSAPVKPGPALSYPQEEATLNEMFREVEELMEDTQHKLRSAVEEMEAEEAAAKASSEVNLANLPPSYHNETNTDTKVGNNTIHVHREIHKITNNQTGQMVFSETVITSVGDEEGRRSHADNWSCRKESGGEGGRLVAGRWPPCCHIVHRMSCSCYRGILSLAIFLDPGPHLLPDLAGEPAAASHPSSSTH

SEQ ID NO: 20762 - DNA, 1958 bp, Homo sapiens
cggcgctgccgcaccccgccgcgctcccgcacccgcggcccgcccaccgcgccgctcccgcatctgcacccgcagcccggcggcctcccggcgggagcgagcagatccagtccggcccgcagcgcaactcggtccagtcggggcggcggctgcgggcgcagagcggagatgcagcggcttggggccaccctgctgtgcctgctgctggcggcggcggtccccacggcccccgcgcccgctccgacggcgacctcggctccagtcaagcccggcccggctctcagctacccgcaggaggaggccaccctcaatgagatgttccgcgaggttgaggaactgatggaggacacgcagcacaaattgcgcagcgcggtggaagagatggaggcagaagaagctgctgctaaagcatcatcagaagtgaacctggcaaacttacctcccagctatcacaatgagaccaacacagacacgaaggttggaaataataccatccatgtgcaccgagaaattcacaaggtaagtcatggccagcacttcctcctttctatagcgtccagtcccatcagagaactaaggtttttttgtttttgttttttcatatgtgatatacaagcccaaactacaattgagaatcataaaatacggattgaaaaccagaaggagtaatgttactgttgaaagtggagagacaatgtatcaggatcctaaactgcttttgcatttaagcaatatatttaaccctaggcttcctgccagtccagttgcaaaggaatgtccagggattatcatttgaaaaaaagaaagcaaatggatgtctaaaaagaccctttcctagcattgaatttgtggaattgatctatctcataggtttttatgtatgtctcagtagggattgaactagagaccacgttatggtgaattgaccctcacttttttttaggaggaatgtaaatatgatataccccatttccaaaagagaaaccctctattgctacaaaattaaacattcatttgctggttgtgcgttcaaaattctctggcagatttttccccaaactaccacctgtctgagtgcctcttggtctaacatcatgcatgaagaacaaccaggttcattcccattctgacctgatgaagaaagctctgcgaatctcaaggaacatagcactagcttgcccctggtgtgcaatgtctctgacatgatttggcaggactctgagagcaaactgcctaagactgtgtgctgtgcagatattcagggtcgttgtgagcatcccgttgtgaatatcaaggagcctgccccctcagctcatctcaactcctgtatgcaagggcacagcggcttcacaaaagagcctcacttttattcaagtgcgcaggtaattacttggttgaaacaatagtgtttctgtgccacagagcacaggggatcaatttttatgtgccgttgccttgactataaagtagcttttgtgtggcacttctcccactgcatcgtaatgggctcagttagatggatcagctacagagtgtatgagctccaggtaaatgaatgagtttaccagcagaacataatcctttggcattgctcatctgcgactgaagaatgttttcaaagtgattattttattcttgtcaaaaccaatatcaagtcaccctttctgacaataattaaccaacaggtttggttgcttcttaaagttgcttcttgtaaatgtcagaatacctgagtgtgagtcctaccagtcactagtgtgatttttgaaaaattacttaaatgtcctgattctcactaactgcatttatgaaataaggatatcaacatctacattacagtactgtgcaggtcaaatgacctaaagtatatgaaagttcattgtaaactgtaaaatgcaatgcaaaaaccactgttcttattattactgttattataataaagttatgttattaacaca

SEQ ID NO: 20763 - protein, 166 aa, Homo sapiens
MQRLGATLLCLLLAAAVPTAPAPAPTATSAPVKPGPALSYPQEEATLNEMFREVEELMEDTQHKLRSAVEEMEAEEAAAKASSEVNLANLPPSYHNETNTDTKVGNNTIHVHREIHKVSHGQHFLLSIASSPIRELRFFCFCFFICDIQAQTTIENHKIRIENQKE

SEQ ID NO: 20764 - DNA, 1493 bp, Homo sapiens
acggcagactaaggccagcggtgatggcttgaatgccaggctgggggctgggatttttcctgaggatttcacaggacagaggttggcttggaaagaccaaggcggcggctgcgggcgcagagcggagatgcagcggcttggggccaccctgctgtgcctgctgctggcggcggcggtccccacggcccccgcgcccgctccgacggcgacctcggctccagtcaagcccggcccggctctcagctacccgcaggaggaggccaccctcaatgagatgttccgcgaggttgaggaactgatggaggacacgcagcacaaattgcgcagcgcggtggaagagatggaggcagaagaagctgctgctaaagcatcatcagaagtgaacctggcaaacttacctcccagctatcacaatgagaccaacacagacacgaaggttggaaataataccatccatgtgcaccgagaaattcacaaggaggaatgtaaatatgatataccccatttccaaaagagaaaccctctattgctacaaaattaaacattcatttgctggttgtgcgttcaaaattctctggcagatttttccccaaactaccacctgtctgagtgcctcttggtctaacatcatgcatgaagaacaaccaggttcattcccattctgacctgatgaagaaagctctgcgaatctcaaggaacatagcactagcttgcccctggtgtgcaatgtctctgacatgatttggcaggactctgagagcaaactgcctaagactgtgtgctgtgcagatattcagggtcgttgtgagcatcccgttgtgaatatcaaggagcctgccccctcagctcatctcaactcctgtatgcaagggcacagcggcttcacaaaagagcctcacttttattcaagtgcgcaggtaattacttggttgaaacaatagtgtttctgtgccacagagcacaggggatcaatttttatgtgccgttgccttgactataaagtagcttttgtgtggcacttctcccactgcatcgtaatgggctcagttagatggatcagctacagagtgtatgagctccaggtaaatgaatgagtttaccagcagaacataatcctttggcattgctcatctgcgactgaagaatgttttcaaagtgattattttattcttgtcaaaaccaatatcaagtcaccctttctgacaataattaaccaacaggtttggttgcttcttaaagttgcttcttgtaaatgtcagaatacctgagtgtgagtcctaccagtcactagtgtgatttttgaaaaattacttaaatgtcctgattctcactaactgcatttatgaaataaggatatcaacatctacattacagtactgtgcaggtcaaatgacctaaagtatatgaaagttcattgtaaactgtaaaatgcaatgcaaaaaccactgttcttattattactgttattataataaagttatgttattaacaca

SEQ ID NO: 20765 - protein, 137 aa, Homo sapiens
MQRLGATLLCLLLAAAVPTAPAPAPTATSAPVKPGPALSYPQEEATLNEMFREVEELMEDTQHKLRSAVEEMEAEEAAAKASSEVNLANLPPSYHNETNTDTKVGNNTIHVHREIHKEECKYDIPHFQKRNPLLLQN

SEQ ID NO: 20766 - DNA, 3308 bp, Homo sapiens
aagtttcctgaggcctccctagaagccagtatgcttcctatacagcctgcagaaccctcaggattctcacggtgtggctgctgcagggaagtcagatcacctacgtggaggcccaggggcctggctctggaaacaggaggcagaagctgccagtctctagtcttgggcctggcaactggcatagcattacttccgccctattccatcgctcaagcagtcacagaacccacctggcttcagcaggaaggggcaaggaccccgcctcctaatgggagcagtggtgaagaatttacagtcatctttaatctgtcatacccgctgagaagaaatagattttctgccacctgaaaagttgaaagtcacatgtgtttttctcttacatcatggctttcctgaggtgatggcagcagctcagtccagctgccgtctgattgggcgaagggtcctagaagaaggaaatacaggaggggaggaatcttggctatttcaaaatgtcattccttgcatttatgcaaccaaggaatccacgaagtcaaatcatacgtaacaattcaaaagatcttcagaaagatctttttaaaattttttcttttttaaaaaatatattttttcttttgagacaatctcacgttgtcgccccgcctagctagttttgcatgtagctatcaatacttacgtattcatgtttttaaaagtaatatcgtattgtaaacagaatttgtaacctggtttttatgcttaccattttatcttcaaaagatcttggctcactgcaatttctgcctcctgggttcaagcgattctctgtctcagcctcccaagtagctgggattacatgtgtgcaccaccacacctggctaattttttgtattagtagagaccaggtttcactatgttggccaggctggtctcaaattcttggcctcaaatgatcctcctgtcttggcctcccacagtgctgggattacaggcatgagccactgcacccagcacataaagatcttttgattctaacacattttaatgttttctgtttgtgtgtttttttgatattttataacatgaatacatgtcttttttatttcaggaaaaaagagattataaaacaaaaagaaaatactgttacaatgaactgaatgtttgtgtccctataaaatgtttatgttgaagctctaatcccaaagtgatggtattaggaggtagggactttgggaagtaattaggtcatgatggtggagccctcataaacaggatgagtactcttataaaagggaccccaggctgggcatggtagctcatccctgtaatcccagcacttgggaggctgatgtgggcagattgcttgagtccaggagttcgagactagcctgggcaacatggcgaaacctcatctctactaaaaatacaaaaattagctgggcatgggtggtgcatgcctatagtcccagctactctggaggctgaggtgggaagatcacttgagcccaggaggcagaggcagcagtgagctgtgatggcaccactgtactccagcctgggtgacaaagtgagaacctgtctcaaaaacaaaaaacaaaaaagccaccccagagagctcctgtgctttctttccaataagaagttggcagtctgcaagccatagagggcccacaccagaaccatgctggcaccctgatcttggacttccagcttccaaaattgagaaataggcggggtgcagtggctcacgcctgtaatcccaacactttgggaggctgaagcaggcagatcacttgaggtcaggagtttgagaccagcctggccaacatggcaaaaccccgtctctactaaaaatacaaaaattagccaggtgtggtgtcatatgcctgtaatcccagctactcgggaggctgaggcaggagaatcgcttgaaccccggaggtggaggttgcagcaagccaagatcacaccactgcaatccagcctgggctacaaagacagattccatctctaaataaataaatgctgttgtttttaacccacccagtttatgatattttgctatagcagcctcaacaggctaaggcaactgtcctgtggattattaactagttggctctttatacaaattctattgagcacctagcacgtaccaattaccagtctattcactgcaataagcaagccagacagggtccctgtcctcctggagctcatggtctggagaagcacctggactgttctttggtagtggcatctgaatccagagcttcctgagttttgctcctagaggaccttgtgcagagctgcctgctgagggggaacagcccaatggcttcctagcgcacttgccaaatacctgcctccaagccgtctgcttcttccatcaggtccttgcttttggatcccagagacttcatttcctgccctacttttccttccaagagctcagtggagagttctcttcctaaaaaaagagaagcttacttcctcagcagtgttatctctgggtctcaaccataaggctggaattttcccactcagccatggagtagtgttgccctttccatcttcctgaagccagagcatgcaacatgtggtagaagccattagtaagagatgggtagcagtcaagggcatggccccaagtctggactcgtggctactggggagaaagggaaattgatgaagctcctatagtgtgactgctattgtgtgctacattcacagaatccccaactgccctatgatgcagaccaggctctccaaggctgggtcctgagaaatggtactttcttcagatgttaatagattctgtgtgcaattttgggaaattctatagttctttgttcagtgcttttaataggctaatgtgcatggtgaaactcaaagggggaggttatgacaggcagtctcccccaaatttatttcacccaaatgccccatactagattgaatagtgtccccccaaaattcaagtccacccagaacctcggaatgtggccttatttggagatagtctttgcaggcataattaatcaaggtgatgccacgctggagtagagggagccctaacccaatgacggatgtccttagaagacgagaaaacagagacacatggcgaagaaggccatgtgatgagagggtcagagactggagagattcatccacaaaccaaggaacgtcaaggggtgccggaaacccccgaagctaagaagaagcaaaaaaggagctttcccctcagggttcagagggagcatggcctggctgacacctcgattttggacatctagctccagaactgtgagaaaataaatttctgttgtttt

SEQ ID NO: 20767 - protein, 105 aa, Homo sapiens
MLPIQPAEPSGFSRCGCCREVRSPTWRPRGLALETGGRSCQSLVLGLATGIALLPPYSIAQAVTEPTWLQQEGARTPPPNGSSGEEFTVIFNLSYPLRRNRFSAT

SEQ ID NO: 20768 - DNA, 1238 bp, Homo sapiens
cgaggctgcctgccctggtgtttggcttcaggcagctctgacatcaatctgtcattccagaggacacttttagataaacagtcttgctctgttgccaggctggagtacagtggcacgatcttggctcactgcaatctccacctcccaggttcaagcgattctcctgcctcagactcctgaatagctgggactacaggcatgtgccaccacatccggctaattttttgtatttttttagtagagatgtggtttcaccatgttggccaggatggtctcaatctcctgacctcatgatccacccgccttggcctcccaaagtgctgggattgcaggcatgagccactgtgcccggcctgcaaattcttttaaagtacacttttatagttgtataatgccagtgtagactaacctctgtaacaaccaaccttcaaatgtcaatgtcttaatatcttactttcgtatcaaaatacaaagtgagtcagcagggagactgttccagtgtcattcagggaccctgacttcttccatcctgtggttctaccttaccctgggtactcttcactcaacttatggatgggcaaagggaagcgttcatctgaggtggtcgtgtgagtctgtgtgagcctgcaagcactgcccatctcttacacccacaccccattggccagaactctgttctctgataaacagtggcatcgttgttgtgcttgaccacaagaaaaggaattgtgtgtccaggaaagagagaagatgcatgtagctgaggagtggcagtttcggctgtaaatatataacctcacccaagggggtgcttcacctaaaaacttgcagtaggcagaatgatggtgtccccagtgacgtccacgtcctcatcccagaatctgtgactatgtcaccttacatgcacaaggaccttgcagatgggattaagctgagaatcctgagatggggatgttttcctggataatctgggcaggcccagtatcatcacaaaggtccttagaagtggaagagggaggcaggagagtcagagagaggtttgaagatgccgtactgaaggctttgaaggtggaggaaagggcaaggaacccaggcagcctctggaagcaggaaaaggtgaaggaatgaatccctggaggacgcagccctgccaacacctcaatttcagcacagtgagacccattttggacctctgatctttaagactatgagataataaatctgcattgttgtaagcc

SEQ ID NO: 20769 - protein, 60 aa, Homo sapiens [sequence omitted]

SEQ ID NO: 20770 - DNA, 648 bp, Homo sapiens
gagatgactatgttgtcaaagacaaatcgtgggtcaagattgaaatgggggacagtctggaatttacgaggatgagatagaatggacagccctgtgacatcaacttggaagaggttggactccagatttggatactcagatcccggaacaggctgattggaaagagaagaatggacaaaagaagtcaaccacacacaggtacatagtcttaccagacttggaagattgggctggatgaatgtattgcacattgggaaactggcgtatcttgaaattggcgagggaagctttggagaaatggcttgagaaagacatgttgaagaggaaaaatacgttaaggcttgccaatcagctgactgcagcagcagcagcagcagcagcagcagcagtgatgcacagatctgatctgcgttggcaatatacttgtaattcggacatgcatctccaggacaccagccttagcaggaaggggagccaatcaaggggaaacaattatgcaaatttaaaatgtaaagtctcttcccacagtctctgcttgttcctgtggtcttggggtccctgtagctttagttagggattctgcaactttggtcaaaggcccctcacagcatcatgccagtcccctccctcacatggcaagcccttctt

SEQ ID NO: 20771 - protein, 111 aa, Homo sapiens
MYCTLGNWRILKLAREALEKWLEKDMLKRKNTLRLANQLTAAAAAAAAAAVMHRSDLRWQYTCNSDMHLQDTSLSRKGSQSRGNNYANLKCKVSSHSLCLFLWSWGPCSFS

SEQ ID NO: 20772 - DNA, 748 bp, Homo sapiens
cacgcttgcttgtgtactgctcttagatgatataaaaacaaatcaaattcccaaaccaaaaagctgcactcttttgtctgggtaaatacagctatgacatgtctatttccatggtttagaatatcaccagtgggaatctactgtggaaaattgagtacaacactatcatcatatgatttgttttgctcatatttggctgtgccattggctgcggagccaggcagcgaactccacacaatgaggagcctgtgaaaacgcagagaaggcaagaaaggatgcaaacatttaggcagcatctgatggtagctggcttgtggtttacctggcctttggttagataactgtgcctgatccctatggccaggaaggaagacagtgctaatgaaaatgaagatctgtacaacaaaagtacaggcctacctcagagatattggagtgttcagttccagaccacgcaataaagtgaatatcacaatgaagagctgaagaattcacatttgggctgatgggcctggggtagggatgaccaacagaccacatgcttcttgtctcttctactccctgatcctctgatagacagggctaagtgatcatccactccttccaccctccagcctccgagtgggccacttttcaagcatggaattccaggttctgcaccctcggattcaaccaaccaaggattgaaactatttgaaggaaaagaacaataataatacaaataaaagccaataacaatataacaact

SEQ ID NO: 20773 - protein, 34 aa, Homo sapiens
MKMKICTTKVQAYLRDIGVFSSRPRNKVNITMKS

SEQ ID NO: 20774 - DNA, 290 bp, Homo sapiens
gcatctgttcttccagctcacaggccccttcccctcacgacatggaaagagagatgagtttccactaagacaagaccttagctctgacttgatgtcttaagcaggagatgtaaaacctaactcacagtgtccgcggggtcctgaatttctgttccacccctttcagccaactggcagcttggactggagttagcgacagatgtcttctgagcaggacttacagggagtgagcctgtccatggcaagctccagccagctctgctcctcctgccctacctcttaggtgaccc

SEQ ID NO: 20775 - protein, 38 aa, Homo sapiens [sequence omitted]

SEQ ID NO: 20776 - DNA, 8192 bp, Homo sapiens
tctcatgatgccggcagcagtcaccctcattgcaaaggcagtggtgccgagtgaggttcccgagtggattttaagaagacaggaagacctttgaagaggtggtgctgatttccttggctggcgggaactctgtctggctgttgcatgcatcacttttgtgtgggttattttgttcctctgtggatttggaagcatcgctgaaggagagagaggattttatttctgggaaatggaatcggtttctgagtccagccaacagcagaagagaaagccagttatccacggactggaagatcaaaagaggatctacacagactgggccaatcattacctagccaaatccggccacaagcgtctcatcagggatctccagcaagatgtgacagatggcgtcctcctggcccagattatccaggttgtggcaaatgaaaagattgaagacatcaatggctgtccgaagaacagatcccaaatgattgaaaacatagatgcctgcttgaatttcctggcagctaagggaataaacatccaggggctgtctgcagaagagatcaggaatggaaacctcaaggccattctaggcctcttcttcagcctctcccgatacaagcagcagcagcagcagccccagaagcagcacctctcctcacctctgccgcccgccgtatcccaggtggccggggccccctcccagtgccaggctggcacccctcagcagcaggtgccagtcactccccaagccccgtgccagcctcaccagccagcgccacatcagcagtcaaaagcacaagctgaaatgcagtccagacttccaggtcctaccgcgagggtatccgctgcaggcagcgaggccaaaacacgcggagggtcaactactgctaacaaccgacgcagccagagctttaacaactatgataaatccaaaccagtcacctccccacccccaccgccaagcagccacgagaaagagcctttggcaagttcagcctcctcccaccccggaatgagtgacaatgcacctgcttccttggagagcggcagcagctccacccctactaattgcagtacctcctcggccatcccgcagcccggtgcagccaccaagccttggcgcagcaaatccctcagcgtgaagcacagtgccacggtatccatgctctcggtcaagcctcctgggcctgaggcccccaggcccacacctgaagccatgaagccggcccccaacaatcagaagtccatgctggaaaagctgaaacttttcaacagtaaagggggctcaaaggcaggtgaggggccggggtcccgggacacaagctgtgagcggctggagactctgcccagcttcgaagagagcgaggagctggaggccgccagtcgcatgctcaccaccgtgggccctgcttccagcagccccaagattgcactcaagggcattgcccagaggacttttagccgggcactgaccaacaagaagagttctctgaaaggcaatgagaaagagaaggagaaacaacagcgggagaaggataaggagaaaagcaaggaccttgccaagagagcctctgtgacggagaggctggacctcaaggaggagccaaaagaagaccccagtggagcagctgtgcccgagatgccaaaaaagtcctccaagattgccagcttcatccccaaaggggggaagctcaacagtgccaagaaggagcccatggccccttcccacagtggaataccaaaaccaggaatgaaaagcatgcccgggaaatccccaagtgccccagcgccttccaaggaaggggagcggagccggagtgggaagctgagctcaggactcccccagcagaagccccagctggacggcagacactccagttcctcttccagcctggcgtcctcagaaggaaaaggcccaggagggaccaccctgaaccacagcatcagcagccagactgtcagtgggtctgtcgggaccacccagaccacaggaagcaataccgtcagtgttcagctacctcagccccagcagcaatacaaccatcccaacactgccacggttgcacctttcctgtacaggtctcagacggacactgaagggaatgttactgccgagtcaagctcaacaggtgtgagcgtggagcccagccacttcaccaagactggacagcctgctctggaagaactcactggggaagatcctgaggctcggcggctgcggacagtgaagaacatcgctgatctgcggcagaatttggaggaaaccatgtccagtttaaggggaactcaggttacacacagcacattggaaaccacgtttgacaccaatgtcaccacggagatgagtggccgtagcatactcagcttgacagggaggcccacacctctgtcctggagactgggccagtccagccctcggctccaagcaggagacgccccctcaatgggcaatgggtatccccctcgagccaacgccagcaggttcatcaacactgagtcaggtcgctatgtgtactccgcccctctgagaaggcagctggcctcccggggcagtagtgtctgccatgtggacgtctcagacaaggcaggagatgagatggacctggaaggcatcagcatggatgcccccggctacatgagcgacggggatgttctgagcaagaacatccggaccgatgacattacaagcggatacatgactgatggtggacttggcctctatacccgtcgcctgaaccggctccctgatgggatggctgtggtacgggagaccctgcaacgaaatacctccctgggcctcggagacgctgacagctgggacgacagcagctccgtcagcagcggcatcagcgacaccatagacaacctcagcactgatgacatcaacaccagctcctccatcagctcttatgccaacacacctgcctcctctcgaaaaaacctggatgtgcagactgatgctgagaagcactcacaggtggagaggaattccctgtggtctggtgatgatgtcaagaaatcagacggaggctcagacagcggcataaaaatggagccaggttccaagtggaggcggaatccttctgatgtgtctgacgagtccgacaaaagcacgtcgggcaagaagaatcctgtcatctcccagacaggctcatggcggcgaggcatgacagctcaggtgggcatcaccatgccaaggacgaagccttcagccccggcaggcgcactgaagaccccaggaactggaaaaacagacgacgcaaaggtgtctgagaaaggaaggctttctcctaaagcctcccaggtgaagcgctccccatcagatgcaggccggagcagtggtgacgaatccaaaaagcccctccccagcagctctaggacacctactgccaatgccaacagctttgggttcaagaagcagagtggttccgccgccggcctggccatgatcacagccagcggggtgactgtcaccagcaggtcagccacactgggcaaaatcccaaagtcatctgcactcgtcagtcggtctgctggtcggaagtcaagtatggatggggctcagaatcaggatgacgggtatctagccctaagctcccggacaaaccttcagtaccggagtttgccgaggcccagtaagtccaacagccggaacggggctgggaacaggtctagcaccagcagcatagattccaacattagcagcaagtccgcaggcctgccagtgcccaaactgagggagccttccaaaacagccctaggcagctctctaccaggtctggtcaaccaaacagacaaggagaaaggcatctcatcagacaacgagagtgtggcttcctgtaactcggtgaaagtgaatccggcagcccagcctgtgtccagtccggctcagaccagtctccagcctggagccaagtacccagatgtggcctctcccacactccgcagactctttggtgggaagcctaccaagcaagtgcccatcgccacagctgaaaacatgaaaaattcggtggtcatctccaatcctcatgccaccatgactcagcaaggtaacctagactccccgtcaggcagtggcgtcctgagcagtgggagcagcagtcctctctacagcaagaatgtggacctcaaccagtctccgctagcctccagccccagctcagcccactcggccccttccaacagcctcacctggggcaccaacgccagcagctcctccgcagttagcaaggatggcctgggctttcagtctgtcagcagcctccacaccagctgtgagtccatcgacatctccctcagcagtggaggggtccccagccacaattcttccactggcctcatcgcctcctccaaggacgactccttgactccctttgtcagaactaacagtgtgaagaccacactgtcagaaagccctctctcttcccctgctgctagccctaagttctgcagaagtactctgcccaggaaacaggacagtgacccgcaccttgataggaacactttgcctaagaaaggactcaggtatactcccacctcccagcttcgcacgcaagaagatgcaaaagaatggttacggtcccattctgcaggaggccttcaggacaccgctgccaattcccccttttcctctggctccagcgtgacttctccctccggaacaagattcaacttttcccagcttgcgagtcccaccactgtcacccagatgagcttgtccaacccgaccatgctgaggactcacagcctctccaatgctgatgggcagtatgatccatacactgacagccgcttccggaatagctccatgtccctggatgagaagagcagaaccatgagccgttcaggctcattccgggatgggtttgaagaagttcatggatcctcactctccttggtttccagcacatcgtcagtttattctacaccagaagaaaaatgccagtcagagattcgcaagctgcggcgggaactggatgcctcccaggagaaagtttcagctttgaccacccagctgacagcaaatgctcaccttgtggcagcctttgaacagagtcttggtaacatgacaatcaggctccagagtctgaccatgacagctgagcagaaggactcagaactgaatgagttaagaaaaaccattgagctgctaaagaaacagaacgcagctgcccaggctgccattaatggagtaattaacacacctgagctcaactgcaaaggaaacggcactgcccagtctgcagacctccgcatccgcaggcagcactcctcagacagcgtctccagcatcaacagtgccaccagccactccagcgtgggcagcaacatagagagtgactcaaagaagaagaagcggaagaactggttacgcagctccttcaagcaagctttcgggaagaagaagtccccaaaatctgcgtcctctcattcagatattgaggagatgacggattcttctttgccttcctcaccaaagttaccgcacaatgggtccacaggttccaccccactgctgaggaattctcactccaactctctaatttcagaatgcatggatagtgaagctgagaccgtcatgcagctccgaaatgagttaagagacaaggagatgaagctgacggatatccgcttagaagctctcagttctgcccaccagctggaccagctccgggaggccatgaacaggatgcagagtgaaatagagaagctgaaagctgagaatgatcggctgaagtcagagtctcaaggcagtggctgcagccgggctccttcccaagtgtccatctctgcctccccgaggcagtccatgggcctctcccagcacagcttgaacctcactgagtcaaccagcctggacatgttgctggatgacactggtgaatgctcggctcggaaggaaggaggcaggcatgttaagatagttgtcagctttcaggaggaaatgaagtggaaggaggattccagaccacatctctttcttattggctgcattggagttagtggcaagacgaagtgggatgtgctcgatggggtggttagacggctgttcaaagaatacatcattcatgtcgacccagtgagtcagctagggctgaattcagacagcgttcttggctacagcattggagaaatcaagcgcagcaacacttccgaaacaccggagctgcttccttgtggctatctggttggagagaacacgaccatctcagtgactgtgaaagggctcgcagaaaacagcctggactcactggtgtttgagtccttgattcccaagcccatcctgcagcgctacgtctccctcctgatagagcaccgtcggatcattctctctggccccagcggcactgggaaaacctacctggccaaccggctgtctgagtatatagtgcttcgagagggacgggagttgacagacggggttatcgccacctttaacgtggaccataagtccagcaaggaattgcgccagtacctgtccaaccttgctgaccagtgcaacagtgagaacaatgctgtggacatgcccctcgtcatcatcctggacaacctacaccacgtgagctctctgggagagatcttcaatgggctgctcaactgcaagtaccacaaatgcccttacataattggcacaatgaaccaggctacctcttcgactcccaacctgcagcttcaccataacttcagatgggtgctttgtgccaaccacacggagcctgtgaagggtttccttggccgattcctgaggaggaagctcatggaaacagagatcagtgggcgggtgcgcaatatggagctggtaaaaatcattgactggattcccaaggtctggcatcacctcaaccgcttcctggaggctcacagttcctcggacgtcaccatcggcccccggctcttcctgtcatgccccatcgatgtggacggctcgagagtgtggttcaccgacttgtggaactattccattatcccctatctcctggaagccgtcagagaaggactccagctctatggaaggcgcgccccctgggaggatcctgccaagtgggtgatggacacatatccatgggcagccagcccacaacagcacgagtggcctcccctgctgcagttacggcctgaggatgtcggcttcgacggctactccatgcctcgggagggatcgacaagcaagcagatgccccccagtgatgctgaaggtgacccgctgatgaacatgctgatgaggctgcaggaggcagccaactactccagcccccagagctatgacagcgactccaacagcaacagccatcacgatgacatcttggactcctctttggagtccactctgtgacaggggcccggagcccagcgccctcctcttctcctcaccgcattccacctgcatcccccacatcaccctgaagatgacttcctgagccagcccccagccacagccttagagctgcgggaacaccgagaccccccgtccttcagcctcgacctgggtgcaggcatcccgggccagctgcctgcggaccgcttccttccacagcgagaactgcactaccttctgttgtactttaattattgttttgccttgttgctgtgacctccctaagacactgaagatacttctcgggaaaggatcatcgccgttgaaatgaaaagagagacagagagaaaaaaaaaaagagaacccacatgaagctctgaaaccaaacagcatcctgccatgagcttcccagagacagaagagactggagcaaagtcggaaacacagagaagcacggcttcccctcagcacagaccctccagactgggtctcagagccgtgccacccaccctcccacacagccggccacagggagaactggtgctaaccagggtgcttgctttggtcacgttcaacgcactacagagctacgacacagggaaaccttaggagcaaataaaccgtgctttcatgttttttaaatggtgctttccttacccgagaggtattttgcctgttccaatcaaaccaccccattcaggtccatcagcctctgattaatatccgtgagagtgagtgacggagtgagagtgtgagcgagtggatgtggctgtcagtgcagaacagcatgtgtctctttccttctgatatatgaatgaatcaggtttttttttttttttttctgcaaacactgtgtatagtgagacttgttctactttggaga

SEQ ID NO: 20777 - protein, 2365 aa, Homo sapiens
MESVSESSQQQKRKPVIHGLEDQKRIYTDWANHYLAKSGHKRLIRDLQQDVTDGVLLAQIIQVVANEKIEDINGCPKNRSQMIENIDACLNFLAAKGINIQGLSAEEIRNGNLKAILGLFFSLSRYKQQQQQPQKQHLSSPLPPAVSQVAGAPSQCQAGTPQQQVPVTPQAPCQPHQPAPHQQSKAQAEMQSRLPGPTARVSAAGSEAKTRGGSTTANNRRSQSFNNYDKSKPVTSPPPPPSSHEKEPLASSASSHPGMSDNAPASLESGSSSTPTNCSTSSAIPQPGAATKPWRSKSLSVKHSATVSMLSVKPPGPEAPRPTPEAMKPAPNNQKSMLEKLKLFNSKGGSKAGEGPGSRDTSCERLETLPSFEESEELEAASRMLTTVGPASSSPKIALKGIAQRTFSRALTNKKSSLKGNEKEKEKQQREKDKEKSKDLAKRASVTERLDLKEEPKEDPSGAAVPEMPKKSSKIASFIPKGGKLNSAKKEPMAPSHSGIPKPGMKSMPGKSPSAPAPSKEGERSRSGKLSSGLPQQKPQLDGRHSSSSSSLASSEGKGPGGTTLNHSISSQTVSGSVGTTQTTGSNTVSVQLPQPQQQYNHPNTATVAPFLYRSQTDTEGNVTAESSSTGVSVEPSHFTKTGQPALEELTGEDPEARRLRTVKNIADLRQNLEETMSSLRGTQVTHSTLETTFDTNVTTEMSGRSILSLTGRPTPLSWRLGQSSPRLQAGDAPSMGNGYPPRANASRFINTESGRYVYSAPLRRQLASRGSSVCHVDVSDKAGDEMDLEGISMDAPGYMSDGDVLSKNIRTDDITSGYMTDGGLGLYTRRLNRLPDGMAVVRETLQRNTSLGLGDADSWDDSSSVSSGISDTIDNLSTDDINTSSSISSYANTPASSRKNLDVQTDAEKHSQVERNSLWSGDDVKKSDGGSDSGIKMEPGSKWRRNPSDVSDESDKSTSGKKNPVISQTGSWRRGMTAQVGITMPRTKPSAPAGALKTPGTGKTDDAKVSEKGRLSPKASQVKRSPSDAGRSSGDESKKPLPSSSRTPTANANSFGFKKQSGSAAGLAMITASGVTVTSRSATLGKIPKSSALVSRSAGRKSSMDGAQNQDDGYLALSSRTNLQYRSLPRPSKSNSRNGAGNRSSTSSIDSNISSKSAGLPVPKLREPSKTALGSSLPGLVNQTDKEKGISSDNESVASCNSVKVNPAAQPVSSPAQTSLQPGAKYPDVASPTLRRLFGGKPTKQVPIATAENMKNSVVISNPHATMTQQGNLDSPSGSGVLSSGSSSPLYSKNVDLNQSPLASSPSSAHSAPSNSLTWGTNASSSSAVSKDGLGFQSVSSLHTSCESIDISLSSGGVPSHNSSTGLIASSKDDSLTPFVRTNSVKTTLSESPLSSPAASPKFCRSTLPRKQDSDPHLDRNTLPKKGLRYTPTSQLRTQEDAKEWLRSHSAGGLQDTAANSPFSSGSSVTSPSGTRFNFSQLASPTTVTQMSLSNPTMLRTHSLSNADGQYDPYTDSRFRNSSMSLDEKSRTMSRSGSFRDGFEEVHGSSLSLVSSTSSVYSTPEEKCQSEIRKLRRELDASQEKVSALTTQLTANAHLVAAFEQSLGNMTIRLQSLTMTAEQKDSELNELRKTIELLKKQNAAAQAAINGVINTPELNCKGNGTAQSADLRIRRQHSSDSVSSINSATSHSSVGSNIESDSKKKKRKNWLRSSFKQAFGKKKSPKSASSHSDIEEMTDSSLPSSPKLPHNGSTGSTPLLRNSHSNSLISECMDSEAETVMQLRNELRDKEMKLTDIRLEALSSAHQLDQLREAMNRMQSEIEKLKAENDRLKSESQGSGCSRAPSQVSISASPRQSMGLSQHSLNLTESTSLDMLLDDTGECSARKEGGRHVKIVVSFQEEMKWKEDSRPHLFLIGCIGVSGKTKWDVLDGVVRRLFKEYIIHVDPVSQLGLNSDSVLGYSIGEIKRSNTSETPELLPCGYLVGENTTISVTVKGLAENSLDSLVFESLIPKPILQRYVSLLIEHRRIILSGPSGTGKTYLANRLSEYIVLREGRELTDGVIATFNVDHKSSKELRQYLSNLADQCNSENNAVDMPLVIILDNLHHVSSLGEIFNGLLNCKYHKCPYIIGTMNQATSSTPNLQLHHNFRWVLCANHTEPVKGFLGRFLRRKLMETEISGRVRNMELVKIIDWIPKVWHHLNRFLEAHSSSDVTIGPRLFLSCPIDVDGSRVWFTDLWNYSIIPYLLEAVREGLQLYGRRAPWEDPAKWVMDTYPWAASPQQHEWPPLLQLRPEDVGFDGYSMPREGSTSKQMPPSDAEGDPLMNMLMRLQEAANYSSPQSYDSDSNSNSHHDDILDSSLESTL

SEQ ID NO: 20778 - DNA, 499 bp, Homo sapiens
catgtgggtgtgcaggagggaagagctcccatctccggggatcttccatgacattctccatgacagcaggccaacaggaagtggcagaaccttcatgacaaagcattggagtgctgcttctagtgtgaatcctgtcatggataggaccatgtatcctgtacactctccaggtgcccagtgaatatgagcttctctgaactgactgaagaccacaagatgaaaactggaaactcgcagccttcatacaacaaggcatctggtatggaagcgttcagtgcgggcttctctggctgatacactcgccatggaccttgctatccctgagctgggaccctaatggatgtgcatgagtttgtctccaacttgtaaaaaatgtgcttttgcaagaatgagtgaatcacagactgaaagaatatatttacaatgcatacacctgacaaaggtttcacatccagaatatataaagatttcctagaaatgcgcaataaaaagacaactc

SEQ ID NO: 20779 - protein, 59 aa, Homo sapiens
MWVCRREELPSPGIFHDILHDSRPTGSGRTFMTKHWSAASSVNPVMDRTMYPVHSPGAQ

SEQ ID NO: 20780 - DNA, 3316 bp, Homo sapiens
tatacatacatacagattccaaatttgcacttaactgctatattatgtatgtacttgttcatgacaccacttggaattcaggtagaggtattttcaatcagctccaacatccctttccttccttggatgtttccaagacaccatcaagccaggcacatttaggcagagaggttgctggggagaatagaacattgccaagctctggcgccaaatactgcactctggcaacgtgtaagtgtaaggcaggcattgtgggtgtgtgacctctgcaatcacacagggcctcatgctcaggagggccctgtgcttgattcaatactctgctggccccatcttgaaattcttaatgatttttgaacaaggggctccacatgtccatttatcagtgagcccctcaaattatatagccagttttgtgtgaggacaaagcaatggacagatactatgaagctcctttctgggtggcattttctctttcttttctccttcctttcagagctaccaagtcaccccacactctagctcaagagctctacctgaccaaaactcaatggcctttcctcaggaaatccagctatgctaatgccaccagaactgagtcagaactcctaactctacaaatatggctcctctgtattgagtgcctgctaggtgccaggcacaacactcaactgggaccaatattatttctgatctgggagatagataggtatgatcagccccatttcacagttgaggacattgaggctcagagagattcagtgacttgtccaaggtcacacagtgcatcaaacacaaatctgatgagccttctcaaaggctcttgatgccacctgcttccagaacattctgccactcactctgcctaggctgctgccctgcctgacttgagctcaggcagttctgccacttgggtcagatcggctacaagtcctggagtatgggcccttcctagccccatgcctatagtttctggctcctcttacctcttccagatttggatgaaaacactctccagcatggggtgggaactggtctcctgagaggctgccattaggactgggtgatacaatcctgaagtgcagaagagttaacccccactaggaaaactttgaccagtggaaaataggagttgagagggagcaggacacatacattccttcttcctctctccatggactgcttcatgacagtctgccttgccgctcatccagctgaatcccacgtgtcatgctgaaaggtcttgtgcagtgaccttctgggtgtctccatggctgtttgtgacataatagccatcaaggaaacacaccacttagtgtggctttgcatccttctttgcctcgcttccttgtgtctcacctttgctgccatggatttgcatcttccaaatgaaacatctcactttcaatttttgccccaggctctatcttctagagaagctagcctaacatacatataggaagggcagccttcccactcagcccagggtgtggtggaacttcatttaggctgcatgtgaaaattggccacctgctttgctgtaaatgtgatttgtggttctctactgtccaactgctgtaggaatggcccccacctgagagatgcaatggccattccagcttgctggccagtacaggccttccttcttctctctctccccactccatctgcatgacccgacccaccccacctcaaggcatggttaattgttcattagtgacacctggcccaagttgacccaatgaatctctccctctgttgggatttttaaactcaggactaagtgattccatctccgcttctttctacatactctctccaaaaccacatatgcagtgtctacagctctaagtaagaaatcctgggagtggtcagtggacatcctttctgttatgtgggtaatgtcaatctgcagcatgagagaagaattccaccaatatgcagagagaaacagaggcaggagctacagagaatgtcctaatggcagtctcaggcttggagtccttgacagattggaaactccagatttctatgacagtaggattgaagccttgaaagatcttaatgtcaccatcatgagcctaaaagagatctttgaaaaagatactacatggatcatatgtgtctttcacagagcagaaatttttaatttccagccattatattccttgacattcacctcaaagacttgaaaattatgtccatacaaaaacctgtacatggatatttattgcagctttatccacaattgccagaacttgtaagcaaccaagacatccttcagtaggtgactgtatccattgtggtacgttcaggctatggaatattgttcagcactaaaaggaaatgagctatcaagccatgaaaaacatggaggaaactcaacacatattactaagtgaaggaagacaatctgaaaaagctacaaattgtatgattccagccacatgacgctctggagaaggccaaactatggagaccgtaaaaagatcagtgtttcctgggagtaggaaggcgggagagatgaataagcagagcacagaggacttttagggcagtgaaactactgtgtatgataccataatggtggatacttatcattacacatttgcccaaacccatacaaggaacaacagcaagagtgaacctaatgtaaactatggactttgagtgattatgatgtgccagtgtaggttaatcaattataacaaatgtgctactttggtgacagatatcgataatggaggaggctgtgtatgtgtggggggcaaggggtatataggaaatctctgttaacttctgctccattttactgtaaatccaaaattgctctaaaaagaggtctattcaaaaaggcattatataactcaatttaatcaatttaatcaagaccatgtttacacagtactttgtgtccacacatcatgatcataagaccaaaatcatgttggaaactgaagaaagaaaattacctgacagtcttccaatccagaggcgaagtccaggtcccatctcctggaattctgataggttccatgcctacttcaactaacacaatgtggacactgccagtttccagagccaggacttatgaagctggcagtttgtattctccgctatttgaaatactgtctctgggagcaatggacttcaaactctgaagccaccatgctaatgtggctgcatgtaggtgttctagccaatagttacaactcatatgtaagttgctttgctggagggatggcttgaaagcctgcctgaatttctgacccacaaagttatatcataataaaatgatgttatcttaaactactaa

SEQ ID NO: 20781 - protein, 99 aa, Homo sapiens
MWVMSICSMREEFHQYAERNRGRSYRECPNGSLRLGVLDRLETPDFYDSRIEALKDLNVTIMSLKEIFEKDTTWIICVFHRAEIFNFQPLYSLTFTSKT

SEQ ID NO: 20782 - DNA, 1372 bp, Homo sapiens
aaatacaggttgacaagtgctaagagagaagtcagaggctgtgggaacagagaggaggagtatctaaccagcctggagtatctggaagacttcctgaaggaggagaaaacacctgggctaaatcttaaaggaagaccagaagctacccagggaaagaagtgaaggaaggcattataaacagagaggccaggagattccagcctcagcattcccagagaaggcccaggatctccctgagaggcccagttggtgtttgtggaatcatcactcctctggtgatcacgcagtttgcctcactttctccatggagctctttgctaaaggacattctcctccagctgtgaaggaaaagcccaacaaaaggcagggtactttgttctaactgaggatgtctactgacacagccaagctgtaaagcagaccacggacggcagtgcagcggggagaacaactctacatctggttggaggtggagtaatgtccagtctgggcacagagagatggcaggtgtgcagctgcactcagcatgggatagagcaccacctgccaggccagaacagaaagaagggcgacggagactggcagagaaacagcaattactgctcagtgagaagtaaacagcgtctgcttccagaggctttacggaccagaaagcccacaggaaatagctcctgcttcccagcctggaggtcctcatgcactagccctccctgctacaattttgatggtttttcgcatatttacagaattgtgcaaccatcaccatgatcagtcttagaagagttaatcacccctgaccccagaaaactctgtattcattagcagtcactccctttcccctttccacccctctccaacattaggcaaccactaatctactctctgtctccataaactggtctattttggacatttcacataagcctccctggatcccagtttaagcatcctggggtttgtctgcctgccagagccatggtgccactggggctacctgtcctgtgggatgacaaggcaggtccaaacctttgcctgctctcccatccattccttttgtgttagtccatgtgtctcccgactgttctctccaacaacaacacagactgacaaaacctactgacttggagtcaggaacagactttgctattttctggctgtgtgatcctgatgagtcccttgaacctcctggacttgttcctcagcctaaaaaccaagactaataaatcaagtctatctcacagccttacgtggggatcaaaaaacatggagcatgtgaacacacattgtacatcacgaagctgtatgcaaataaatatcgtgtaactccagccctttttgagtttataaataaaagtgaaaacctcataaccct

SEQ ID NO: 20783 - protein, 96 aa, Homo sapiens
MSSLGTERWQVCSCTQHGIEHHLPGQNRKKGDGDWQRNSNYCSVRSKQRLLPEALRTRKPTGNSSCFPAWRSSCTSPPCYNFDGFSHIYRIVQPSP

SEQ ID NO: 20784 - DNA, 8192 bp, Homo sapiens
aggaggaaatttgcaagaggcggcagcccctgagcgcccagagctcttgaaaggccacccaggagaggtgtgagacccggcggcagcatccgtccaggtgggacccgctgagcgccgtggccagtcccccattcccatcccggcaccccaaaggcgcgctcgcccgattgcttcgagttccccgacctggggattttttttttagccgctggtggtgggcgcctcgtgggctaaggcccggcgcctgctctgctacccgcgctgcctttagcggtcgcccccgccgccgctgccagggacgtgctgggaaagcccaagccccgggagaagatgccggccatcctggtcgcctccaaaatgaagtcgggactgcccaaacccgtgcacagcgccgcgcccatcctgcacgtgcccccggcccgggcgggcccccagccctgctacctgaagttgggaagcaaggtggaggtgagcaagaccacctatcctagccagatccccctgaaatcgcaggtgctgcaggggctgcaggagccagcgggggaggggctcccgctgcggaagagcggctcggtggaaaacgggttcgatacccagatctacacagactgggccaatcattacctagccaaatccggccacaagcgtctcatcagggatctccagcaagatgtgacagatggcgtcctcctggcccagattatccaggttgtggcaaatgaaaagattgaagacatcaatggctgtccgaagaacagatcccaaatgattgaaaacatagatgcctgcttgaatttcctggcagctaagggaataaacatccaggggctgtctgcagaagagatcaggaatggaaacctcaaggccattctaggcctcttcttcagcctctcccgatacaagcagcagcagcagcagccccagaagcagcacctctcctcacctctgccgcccgccgtatcccaggtggccggggccccctcccagtgccaggctggcacccctcagcagcaggtgccagtcactccccaagccccgtgccagcctcaccagccagcgccacatcagcagtcaaaagcacaagctgaaatgcagtccagacttccaggtcctaccgcgagggtatccgctgcaggcagcgaggccaaaacacgcggagggtcaactactgctaacaaccgacgcagccagagctttaacaactatgataaatccaaaccagtcacctccccacccccaccgccaagcagccacgagaaagagcctttggcaagttcagcctcctcccaccccggaatgagtgacaatgcacctgcttccttggagagcggcagcagctccacccctactaattgcagtacctcctcggccatcccgcagcccggtgcagccaccaagccttggcgcagcaaatccctcagcgtgaagcacagtgccacggtatccatgctctcggtcaagcctcctgggcctgaggcccccaggcccacacctgaagccatgaagccggcccccaacaatcagaagtccatgctggaaaagctgaaacttttcaacagtaaagggggctcaaaggcaggtgaggggccggggtcccgggacacaagctgtgagcggctggagactctgcccagcttcgaagagagcgaggagctggaggccgccagtcgcatgctcaccaccgtgggccctgcttccagcagccccaagattgcactcaagggcattgcccagaggacttttagccgggcactgaccaacaagaagagttctctgaaaggcaatgagaaagagaaggagaaacaacagcgggagaaggataaggagaaaagcaaggaccttgccaagagagcctctgtgacggagaggctggacctcaaggaggagccaaaagaagaccccagtggagcagctgtgcccgagatgccaaaaaagtcctccaagattgccagcttcatccccaaaggggggaagctcaacagtgccaagaaggagcccatggccccttcccacagtggaataccaaaaccaggaatgaaaagcatgcccgggaaatccccaagtgccccagcgccttccaaggaaggggagcggagccggagtgggaagctgagctcaggactcccccagcagaagccccagctggacggcagacactccagttcctcttccagcctggcgtcctcagaaggaaaaggcccaggagggaccaccctgaaccacagcatcagcagccagactgtcagtgggtctgtcgggaccacccagaccacaggaagcaataccgtcagtgttcagctacctcagccccagcagcaatacaaccatcccaacactgccacggttgcacctttcctgtacaggtctcagacggacactgaagggaatgttactgccgagtcaagctcaacaggtgtgagcgtggagcccagccacttcaccaagactggacagcctgctctggaagaactcactggggaagatcctgaggctcggcggctgcggacagtgaagaacatcgctgatctgcggcagaatttggaggaaaccatgtccagtttaaggggaactcaggttacacacagcacattggaaaccacgtttgacaccaatgtcaccacggagatgagtggccgtagcatactcagcttgacagggaggcccacacctctgtcctggagactgggccagtccagccctcggctccaagcaggagacgccccctcaatgggcaatgggtatccccctcgagccaacgccagcaggttcatcaacactgagtcaggtcgctatgtgtactccgcccctctgagaaggcagctggcctcccggggcagtagtgtctgccatgtggacgtctcagacaaggcaggagatgagatggacctggaaggcatcagcatggatgcccccggctacatgagcgacggggatgttctgagcaagaacatccggaccgatgacattacaagcggatacatgactgatggtggacttggcctctatacccgtcgcctgaaccggctccctgatgggatggctgtggtacgggagaccctgcaacgaaatacctccctgggcctcggagacgctgacagctgggacgacagcagctccgtcagcagcggcatcagcgacaccatagacaacctcagcactgatgacatcaacaccagctcctccatcagctcttatgccaacacacctgcctcctctcgaaaaaacctggatgtgcagactgatgctgagaagcactcacaggtggagaggaattccctgtggtctggtgatgatgtcaagaaatcagacggaggctcagacagcggcataaaaatggagccaggttccaagtggaggcggaatccttctgatgtgtctgacgagtccgacaaaagcacgtcgggcaagaagaatcctgtcatctcccagacaggctcatggcggcgaggcatgacagctcaggtgggcatcaccatgccaaggacgaagccttcagccccggcaggcgcactgaagaccccaggaactggaaaaacagacgacgcaaaggtgtctgagaaaggaaggctttctcctaaagcctcccaggtgaagcgctccccatcagatgcaggccggagcagtggtgacgaatccaaaaagcccctccccagcagctctaggacacctactgccaatgccaacagctttgggttcaagaagcagagtggttccgccgccggcctggccatgatcacagccagcggggtgactgtcaccagcaggtcagccacactgggcaaaatcccaaagtcatctgcactcgtcagtcggtctgctggtcggaagtcaagtatggatggggctcagaatcaggatgacgggtatctagccctaagctcccggacaaaccttcagtaccggagtttgccgaggcccagtaagtccaacagccggaacggggctgggaacaggtctagcaccagcagcatagattccaacattagcagcaagtccgcaggcctgccagtgcccaaactgagggagccttccaaaacagccctaggcagctctctaccaggtctggtcaaccaaacagacaaggagaaaggcatctcatcagacaacgagagtgtggcttcctgtaactcggtgaaagtgaatccggcagcccagcctgtgtccagtccggctcagaccagtctccagcctggagccaagtacccagatgtggcctctcccacactccgcagactctttggtgggaagcctaccaagcaagtgcccatcgccacagctgaaaacatgaaaaattcggtggtcatctccaatcctcatgccaccatgactcagcaaggtaacctagactccccgtcaggcagtggcgtcctgagcagtgggagcagcagtcctctctacagcaagaatgtggacctcaaccagtctccgctagcctccagccccagctcagcccactcggccccttccaacagcctcacctggggcaccaacgccagcagctcctccgcagttagcaaggatggcctgggctttcagtctgtcagcagcctccacaccagctgtgagtccatcgacatctccctcagcagtggaggggtccccagccacaattcttccactggcctcatcgcctcctccaaggacgactccttgactccctttgtcagaactaacagtgtgaagaccacactgtcagaaagccctctctcttcccctgctgctagccctaagttctgcagaagtactctgcccaggaaacaggacagtgacccgcaccttgataggaacactttgcctaagaaaggactcaggtatactcccacctcccagcttcgcacgcaagaagatgcaaaagaatggttacggtcccattctgcaggaggccttcaggacaccgctgccaattcccccttttcctctggctccagcgtgacttctccctccggaacaagattcaacttttcccagcttgcgagtcccaccactgtcacccagatgagcttgtccaacccgaccatgctgaggactcacagcctctccaatgctgatgggcagtatgatccatacactgacagccgcttccggaatagctccatgtccctggatgagaagagcagaaccatgagccgttcaggctcattccgggatgggtttgaagaagttcatggatcctcactctccttggtttccagcacatcgtcagtttattctacaccagaagaaaaatgccagtcagagattcgcaagctgcggcgggaactggatgcctcccaggagaaagtttcagctttgaccacccagctgacagcaaatgctcaccttgtggcagcctttgaacagagtcttggtaacatgacaatcaggctccagagtctgaccatgacagctgagcagaaggactcagaactgaatgagttaagaaaaaccattgagctgctaaagaaacagaacgcagctgcccaggctgccattaatggagtaattaacacacctgagctcaactgcaaaggaaacggcactgcccagtctgcagacctccgcatccgcaggcagcactcctcagacagcgtctccagcatcaacagtgccaccagccactccagcgtgggcagcaacatagagagtgactcaaagaagaagaagcggaagaactggttacgcagctccttcaagcaagctttcgggaagaagaagtccccaaaatctgcgtcctctcattcagatattgaggagatgacggattcttctttgccttcctcaccaaagttaccgcacaatgggtccacaggttccaccccactgctgaggaattctcactccaactctctaatttcagaatgcatggatagtgaagctgagaccgtcatgcagctccgaaatgagttaagagacaaggagatgaagctgacggatatccgcttagaagctctcagttctgcccaccagctggaccagctccgggaggccatgaacaggatgcagagtgaaatagagaagctgaaagctgagaatgatcggctgaagtcagagtctcaaggcagtggctgcagccgggctccttcccaagtgtccatctctgcctccccgaggcagtccatgggcctctcccagcacagcttgaacctcactgagtcaaccagcctggacatgttgctggatgacactggtgaatgctcggctcggaaggaaggaggcaggcatgttaagatagttgtcagctttcaggaggaaatgaagtggaaggaggattccagaccacatctctttcttattggctgcattggagttagtggcaagacgaagtgggatgtgctcgatggggtggttagacggctgttcaaagaatacatcattcatgtcgacccagtgagtcagctagggctgaattcagacagcgttcttggctacagcattggagaaatcaagcgcagcaacacttccgaaacaccggagctgcttccttgtggctatctggttggagagaacacgaccatctcagtgactgtgaaagggctcgcagaaaacagcctggactcactggtgtttgagtccttgattcccaagcccatcctgcagcgctacgtctccctcctgatagagcaccgtcggatcattctctctggccccagcggcactgggaaaacctacctggccaaccggctgtctgagtatatagtgcttcgagagggacgggagttgacagacggggttatcgccacctttaacgtggaccataagtccagcaaggaattgcgccagtacctgtccaaccttgctgaccagtgcaacagtgagaacaatgctgtggacatgcccctcgtcatcatcctggacaacctacaccacgtgagctctctgggagagatcttcaatgggctgctcaactgcaagtaccacaaatgcccttacataattggcacaatgaaccaggctacctcttcgactcccaacctgcagcttcaccataacttcagatgggtgctttgtgccaaccacacggagcctgtgaagggtttccttggccgattcctgaggaggaagctcatggaaacagagatcagtgggcgggtgcgcaatatggagctggtaaaaatcattgactggattcccaaggtctggcatcacctcaaccgcttcctggaggctcacagttcctcggacgtcaccatcggcccccggctcttcctgtcatgccccatcgatgtggacggctcgagagtgtggttcaccgacttgtggaactattccattatcccctatctcctggaagccgtcagagaaggactccagctctatggaaggcgcgccccctgggaggatcctgccaagtgggtgatggacacatatccatgggcagccagcccacaacagcacgagtggcctcccctgctgcagttacggcctgaggatgtcggcttcgacggctactccatgcctcgggagggatcgacaagcaagcagatgccccccagtgatgctgaaggtgacccgctgatgaacatgctgatgaggctgcaggaggcagccaactactccagcccccagagctatgacagcgactccaacagcaacagccatcacgatgacatcttggactcctctttggagtccactctgtgacaggggcccggagcccagcgccctcctcttctcctcaccgcattccacctgcatcccccacatcaccctgaagatgacttcctgagccagcccccagccacagccttagagctgcgggaacaccgagaccccccgtccttcagcctcgacctgggtgcaggcatcccgggccagctgcctgcggaccgcttccttccacagcgagaactgcactaccttctgttgtactttaattattgttttgccttgttgctgtgacctccctaagacactgaagatacttctcgggaaaggatcatcgccgttgaaatgaaaagagagacagagagaaaaaaaaaaagagaacccacatgaagctctgaaaccaaacagcatcctgccatgagcttcccagagacagaagagactggagcaaagtcggaaacacagagaagcacggcttcccctcagcacagaccctccagactgggtctcagagccgtgccacccaccctcccacacagccggccacagggagaactggtgctaaccagggtgcttgctttggtcacgttcaacgcactacagagcta

SEQ ID NO: 20785 - protein, 2429 aa, Homo sapiens; identical to SEQ ID NO: 2635

SEQ ID NO: 20786 - DNA, 8192 bp, Homo sapiens
aggaggaaatttgcaagaggcggcagcccctgagcgcccagagctcttgaaaggccacccaggagaggtgtgagacccggcggcagcatccgtccaggtgggacccgctgagcgccgtggccagtcccccattcccatcccggcaccccaaaggcgcgctcgcccgattgcttcgagttccccgacctggggattttttttttagccgctggtggtgggcgcctcgtgggctaaggcccggcgcctgctctgctacccgcgctgcctttagcggtcgcccccgccgccgctgccagggacgtgctgggaaagcccaagccccgggagaagatgccggccatcctggtcgcctccaaaatgaagtcgggactgcccaaacccgtgcacagcgccgcgcccatcctgcacgtgcccccggcccgggcgggcccccagccctgctacctgaagttgggaagcaaggtggaggtgagcaagaccacctatcctagccagatccccctgaaatcgcaggtgctgcaggggctgcaggagccagcgggggaggggctcccgctgcggaagagcggctcggtggaaaacgggttcgatacccagatctacacagactgggccaatcattacctagccaaatccggccacaagcgtctcatcagggatctccagcaagatgtgacagatggcgtcctcctggcccagattatccaggttgtggcaaatgaaaagattgaagacatcaatggctgtccgaagaacagatcccaaatgattgaaaacatagatgcctgcttgaatttcctggcagctaagggaataaacatccaggggctgtctgcagaagagatcaggaatggaaacctcaaggccattctaggcctcttcttcagcctctcccgatacaagcagcagcagcagcagccccagaagcagcacctctcctcacctctgccgcccgccgtatcccaggtggccggggccccctcccagtgccaggctggcacccctcagcagcaggtgccagtcactccccaagccccgtgccagcctcaccagccagcgccacatcagcagtcaaaagcacaagctgaaatgcagtccagtgcatcatccaaggactcatctcaaagcaaaatcatccgcttcactctgggtcagaaaaagatctctagacttccaggtcctaccgcgagggtatccgctgcaggcagcgaggccaaaacacgcggagggtcaactactgctaacaaccgacgcagccagagctttaacaactatgataaatccaaaccagtcacctccccacccccaccgccaagcagccacgagaaagagcctttggcaagttcagcctcctcccaccccggaatgagtgacaatgcacctgcttccttggagagcggcagcagctccacccctactaattgcagtacctcctcggccatcccgcagcccggtgcagccaccaagccttggcgcagcaaatccctcagcgtgaagcacagtgccacggtatccatgctctcggtcaagcctcctgggcctgaggcccccaggcccacacctgaagccatgaagccggcccccaacaatcagaagtccatgctggaaaagctgaaacttttcaacagtaaagggggctcaaaggcaggtgaggggccggggtcccgggacacaagctgtgagcggctggagactctgcccagcttcgaagagagcgaggagctggaggccgccagtcgcatgctcaccaccgtgggccctgcttccagcagccccaagattgcactcaagggcattgcccagaggacttttagccgggcactgaccaacaagaagagttctctgaaaggcaatgagaaagagaaggagaaacaacagcgggagaaggataaggagaaaagcaaggaccttgccaagagagcctctgtgacggagaggctggacctcaaggaggagccaaaagaagaccccagtggagcagctgtgcccgagatgccaaaaaagtcctccaagattgccagcttcatccccaaaggggggaagctcaacagtgccaagaaggagcccatggccccttcccacagtggaataccaaaaccaggaatgaaaagcatgcccgggaaatccccaagtgccccagcgccttccaaggaaggggagcggagccggagtgggaagctgagctcaggactcccccagcagaagccccagctggacggcagacactccagttcctcttccagcctggcgtcctcagaaggaaaaggcccaggagggaccaccctgaaccacagcatcagcagccagactgtcagtgggtctgtcgggaccacccagaccacaggaagcaataccgtcagtgttcagctacctcagccccagcagcaatacaaccatcccaacactgccacggttgcacctttcctgtacaggtctcagacggacactgaagggaatgttactgccgagtcaagctcaacaggtgtgagcgtggagcccagccacttcaccaagactggacagcctgctctggaagaactcactggggaagatcctgaggctcggcggctgcggacagtgaagaacatcgctgatctgcggcagaatttggaggaaaccatgtccagtttaaggggaactcaggttacacacagcacattggaaaccacgtttgacaccaatgtcaccacggagatgagtggccgtagcatactcagcttgacagggaggcccacacctctgtcctggagactgggccagtccagccctcggctccaagcaggagacgccccctcaatgggcaatgggtatccccctcgagccaacgccagcaggttcatcaacactgagtcaggtcgctatgtgtactccgcccctctgagaaggcagctggcctcccggggcagtagtgtctgccatgtggacgtctcagacaaggcaggagatgagatggacctggaaggcatcagcatggatgcccccggctacatgagcgacggggatgttctgagcaagaacatccggaccgatgacattacaagcggatacatgactgatggtggacttggcctctatacccgtcgcctgaaccggctccctgatgggatggctgtggtacgggagaccctgcaacgaaatacctccctgggcctcggagacgctgacagctgggacgacagcagctccgtcagcagcggcatcagcgacaccatagacaacctcagcactgatgacatcaacaccagctcctccatcagctcttatgccaacacacctgcctcctctcgaaaaaacctggatgtgcagactgatgctgagaagcactcacaggtggagaggaattccctgtggtctggtgatgatgtcaagaaatcagacggaggctcagacagcggcataaaaatggagccaggttccaagtggaggcggaatccttctgatgtgtctgacgagtccgacaaaagcacgtcgggcaagaagaatcctgtcatctcccagacaggctcatggcggcgaggcatgacagctcaggtgggcatcaccatgccaaggacgaagccttcagccccggcaggcgcactgaagaccccaggaactggaaaaacagacgacgcaaaggtgtctgagaaaggaaggctttctcctaaagcctcccaggtgaagcgctccccatcagatgcaggccggagcagtggtgacgaatccaaaaagcccctccccagcagctctaggacacctactgccaatgccaacagctttgggttcaagaagcagagtggttccgccgccggcctggccatgatcacagccagcggggtgactgtcaccagcaggtcagccacactgggcaaaatcccaaagtcatctgcactcgtcagtcggtctgctggtcggaagtcaagtatggatggggctcagaatcaggatgacgggtatctagccctaagctcccggacaaaccttcagtaccggagtttgccgaggcccagtaagtccaacagccggaacggggctgggaacaggtctagcaccagcagcatagattccaacattagcagcaagtccgcaggcctgccagtgcccaaactgagggagccttccaaaacagccctaggcagctctctaccaggtctggtcaaccaaacagacaaggagaaaggcatctcatcagacaacgagagtgtggcttcctgtaactcggtgaaagtgaatccggcagcccagcctgtgtccagtccggctcagaccagtctccagcctggagccaagtacccagatgtggcctctcccacactccgcagactctttggtgggaagcctaccaagcaagtgcccatcgccacagctgaaaacatgaaaaattcggtggtcatctccaatcctcatgccaccatgactcagcaaggtaacctagactccccgtcaggcagtggcgtcctgagcagtgggagcagcagtcctctctacagcaagaatgtggacctcaaccagtctccgctagcctccagccccagctcagcccactcggccccttccaacagcctcacctggggcaccaacgccagcagctcctccgcagttagcaaggatggcctgggctttcagtctgtcagcagcctccacaccagctgtgagtccatcgacatctccctcagcagtggaggggtccccagccacaattcttccactggcctcatcgcctcctccaaggacgactccttgactccctttgtcagaactaacagtgtgaagaccacactgtcagaaagccctctctcttcccctgctgctagccctaagttctgcagaagtactctgcccaggaaacaggacagtgacccgcaccttgataggaacactttgcctaagaaaggactcaggtatactcccacctcccagcttcgcacgcaagaagatgcaaaagaatggttacggtcccattctgcaggaggccttcaggacaccgctgccaattcccccttttcctctggctccagcgtgacttctccctccggaacaagattcaacttttcccagcttgcgagtcccaccactgtcacccagatgagcttgtccaacccgaccatgctgaggactcacagcctctccaatgctgatgggcagtatgatccatacactgacagccgcttccggaatagctccatgtccctggatgagaagagcagaaccatgagccgttcaggctcattccgggatgggtttgaagaagaatcatgggagaaaagttctgtggacaactttgtcagccgtcttcacagctcacttcatttctctcttcctttgttccatcacgcaaggtatgagttagttcatggatcctcactctccttggtttccagcacatcgtcagtttattctacaccagaagaaaaatgccagtcagagattcgcaagctgcggcgggaactggatgcctcccaggagaaagtttcagctttgaccacccagctgacagcaaatgctcaccttgtggcagcctttgaacagagtcttggtaacatgacaatcaggctccagagtctgaccatgacagctgagcagaaggactcagaactgaatgagttaagaaaaaccattgagctgctaaagaaacagaacgcagctgcccaggctgccattaatggagtaattaacacacctgagctcaactgcaaaggaaacggcactgcccagtctgcagacctccgcatccgcaggcagcactcctcagacagcgtctccagcatcaacagtgccaccagccactccagcgtgggcagcaacatagagagtgactcaaagaagaagaagcggaagaactggttacgcagctccttcaagcaagctttcgggaagaagaagtccccaaaatctgcgtcctctcattcagatattgaggagatgacggattcttctttgccttcctcaccaaagttaccgcacaatgggtccacaggttccaccccactgctgaggaattctcactccaactctctaatttcagaatgcatggatagtgaagctgagaccgtcatgcagctccgaaatgagttaagagacaaggagatgaagctgacggatatccgcttagaagctctcagttctgcccaccagctggaccagctccgggaggccatgaacaggatgcagagtgaaatagagaagctgaaagctgagaatgatcggctgaagtcagagtctcaaggcagtggctgcagccgggctccttcccaagtgtccatctctgcctccccgaggcagtccatgggcctctcccagcacagcttgaacctcactgagtcaaccagcctggacatgttgctggatgacactggtgaatgctcggctcggaaggaaggaggcaggcatgttaagatagttgtcagctttcaggaggaaatgaagtggaaggaggattccagaccacatctctttcttattggctgcattggagttagtggcaagacgaagtgggatgtgctcgatggggtggttagacggctgttcaaagaatacatcattcatgtcgacccagtgagtcagctagggctgaattcagacagcgttcttggctacagcattggagaaatcaagcgcagcaacacttccgaaacaccggagctgcttccttgtggctatctggttggagagaacacgaccatctcagtgactgtgaaagggctcgcagaaaacagcctggactcactggtgtttgagtccttgattcccaagcccatcctgcagcgctacgtctccctcctgatagagcaccgtcggatcattctctctggccccagcggcactgggaaaacctacctggccaaccggctgtctgagtatatagtgcttcgagagggacgggagttgacagacggggttatcgccacctttaacgtggaccataagtccagcaaggaattgcgccagtacctgtccaaccttgctgaccagtgcaacagtgagaacaatgctgtggacatgcccctcgtcatcatcctggacaacctacaccacgtgagctctctgggagagatcttcaatgggctgctcaactgcaagtaccacaaatgcccttacataattggcacaatgaaccaggctacctcttcgactcccaacctgcagcttcaccataacttcagatgggtgctttgtgccaaccacacggagcctgtgaagggtttccttggccgattcctgaggaggaagctcatggaaacagagatcagtgggcgggtgcgcaatatggagctggtaaaaatcattgactggattcccaaggtctggcatcacctcaaccgcttcctggaggctcacagttcctcggacgtcaccatcggcccccggctcttcctgtcatgccccatcgatgtggacggctcgagagtgtggttcaccgacttgtggaactattccattatcccctatctcctggaagccgtcagagaaggactccagctctatggaaggcgcgccccctgggaggatcctgccaagtgggtgatggacacatatccatgggcagccagcccacaacagcacgagtggcctcccctgctgcagttacggcctgaggatgtcggcttcgacggctactccatgcctcgggagggatcgacaagcaagcagatgccccccagtgatgctgaaggtgacccgctgatgaacatgctgatgaggctgcaggaggcagccaactactccagcccccagagctatgacagcgactccaacagcaacagccatcacgatgacatcttggactcctctttggagtccactctgtgacaggggcccggagcccagcgccctcctcttctcctcaccgcattccacctgcatcccccacatcaccctgaagatgacttcctgagccagcccccagccacagccttagagctgcgggaacaccgagaccccccgtccttcagcctcgacctgggtgcaggcatcccgggccagctgcctgcggaccgcttccttccacagcgagaactgcactaccttctgttgtactttaattattgttttgccttgttgctgtgacctccctaagacactgaagatacttctcgggaaaggatcatcgccgttgaaatgaaaagagagacagagagaaaaaaaaaaagagaacccacatgaagctctgaaaccaaacagcatcctgccatgagcttcccagagacagaaga

SEQ ID NO: 20787 - protein, 2485 aa, Homo sapiens
MPAILVASKMKSGLPKPVHSAAPILHVPPARAGPQPCYLKLGSKVEVSKTTYPSQIPLKSQVLQGLQEPAGEGLPLRKSGSVENGFDTQIYTDWANHYLAKSGHKRLIRDLQQDVTDGVLLAQIIQVVANEKIEDINGCPKNRSQMIENIDACLNFLAAKGINIQGLSAEEIRNGNLKAILGLFFSLSRYKQQQQQPQKQHLSSPLPPAVSQVAGAPSQCQAGTPQQQVPVTPQAPCQPHQPAPHQQSKAQAEMQSSASSKDSSQSKIIRFTLGQKKISRLPGPTARVSAAGSEAKTRGGSTTANNRRSQSFNNYDKSKPVTSPPPPPSSHEKEPLASSASSHPGMSDNAPASLESGSSSTPTNCSTSSAIPQPGAATKPWRSKSLSVKHSATVSMLSVKPPGPEAPRPTPEAMKPAPNNQKSMLEKLKLFNSKGGSKAGEGPGSRDTSCERLETLPSFEESEELEAASRMLTTVGPASSSPKIALKGIAQRTFSRALTNKKSSLKGNEKEKEKQQREKDKEKSKDLAKRASVTERLDLKEEPKEDPSGAAVPEMPKKSSKIASFIPKGGKLNSAKKEPMAPSHSGIPKPGMKSMPGKSPSAPAPSKEGERSRSGKLSSGLPQQKPQLDGRHSSSSSSLASSEGKGPGGTTLNHSISSQTVSGSVGTTQTTGSNTVSVQLPQPQQQYNHPNTATVAPFLYRSQTDTEGNVTAESSSTGVSVEPSHFTKTGQPALEELTGEDPEARRLRTVKNIADLRQNLEETMSSLRGTQVTHSTLETTFDTNVTTEMSGRSILSLTGRPTPLSWRLGQSSPRLQAGDAPSMGNGYPPRANASRFINTESGRYVYSAPLRRQLASRGSSVCHVDVSDKAGDEMDLEGISMDAPGYMSDGDVLSKNIRTDDITSGYMTDGGLGLYTRRLNRLPDGMAVVRETLQRNTSLGLGDADSWDDSSSVSSGISDTIDNLSTDDINTSSSISSYANTPASSRKNLDVQTDAEKHSQVERNSLWSGDDVKKSDGGSDSGIKMEPGSKWRRNPSDVSDESDKSTSGKKNPVISQTGSWRRGMTAQVGITMPRTKPSAPAGALKTPGTGKTDDAKVSEKGRLSPKASQVKRSPSDAGRSSGDESKKPLPSSSRTPTANANSFGFKKQSGSAAGLAMITASGVTVTSRSATLGKIPKSSALVSRSAGRKSSMDGAQNQDDGYLALSSRTNLQYRSLPRPSKSNSRNGAGNRSSTSSIDSNISSKSAGLPVPKLREPSKTALGSSLPGLVNQTDKEKGISSDNESVASCNSVKVNPAAQPVSSPAQTSLQPGAKYPDVASPTLRRLFGGKPTKQVPIATAENMKNSVVISNPHATMTQQGNLDSPSGSGVLSSGSSSPLYSKNVDLNQSPLASSPSSAHSAPSNSLTWGTNASSSSAVSKDGLGFQSVSSLHTSCESIDISLSSGGVPSHNSSTGLIASSKDDSLTPFVRTNSVKTTLSESPLSSPAASPKFCRSTLPRKQDSDPHLDRNTLPKKGLRYTPTSQLRTQEDAKEWLRSHSAGGLQDTAANSPFSSGSSVTSPSGTRFNFSQLASPTTVTQMSLSNPTMLRTHSLSNADGQYDPYTDSRFRNSSMSLDEKSRTMSRSGSFRDGFEEESWEKSSVDNFVSRLHSSLHFSLPLFHHARYELVHGSSLSLVSSTSSVYSTPEEKCQSEIRKLRRELDASQEKVSALTTQLTANAHLVAAFEQSLGNMTIRLQSLTMTAEQKDSELNELRKTIELLKKQNAAAQAAINGVINTPELNCKGNGTAQSADLRIRRQHSSDSVSSINSATSHSSVGSNIESDSKKKKRKNWLRSSFKQAFGKKKSPKSASSHSDIEEMTDSSLPSSPKLPHNGSTGSTPLLRNSHSNSLISECMDSEAETVMQLRNELRDKEMKLTDIRLEALSSAHQLDQLREAMNRMQSEIEKLKAENDRLKSESQGSGCSRAPSQVSISASPRQSMGLSQHSLNLTESTSLDMLLDDTGECSARKEGGRHVKIVVSFQEEMKWKEDSRPHLFLIGCIGVSGKTKWDVLDGVVRRLFKEYIIHVDPVSQLGLNSDSVLGYSIGEIKRSNTSETPELLPCGYLVGENTTISVTVKGLAENSLDSLVFESLIPKPILQRYVSLLIEHRRIILSGPSGTGKTYLANRLSEYIVLREGRELTDGVIATFNVDHKSSKELRQYLSNLADQCNSENNAVDMPLVIILDNLHHVSSLGEIFNGLLNCKYHKCPYIIGTMNQATSSTPNLQLHHNFRWVLCANHTEPVKGFLGRFLRRKLMETEISGRVRNMELVKIIDWIPKVWHHLNRFLEAHSSSDVTIGPRLFLSCPIDVDGSRVWFTDLWNYSIIPYLLEAVREGLQLYGRRAPWEDPAKWVMDTYPWAASPQQHEWPPLLQLRPEDVGFDGYSMPREGSTSKQMPPSDAEGDPLMNMLMRLQEAANYSSPQSYDSDSNSNSHHDDILDSSLESTL

SEQ ID NO: 20788 - DNA, 7869 bp, Homo sapiens
taaggcccggcgcctgctctgctacccgcgctgcctttagcggtcgcccccgccgccgctgccagggacgtgctgggaaagcccaagccccgggagaagatgccggccatcctggtcgcctccaaaatgaagtcgggactgcccaaacccgtgcacagcgccgcgcccatcctgcacgtgcccccggcccgggcgggcccccagccctgctacctgaagttgggaagcaaggtggaggtgagcaagaccacctatcctagccagatccccctgaaatcgcaggtgctgcaggggctgcaggagccagcgggggaggggctcccgctgcggaagagcggctcggtggaaaacgggttcgatacccagatctacacagactgggccaatcattacctagccaaatccggccacaagcgtctcatcagggatctccagcaagatgtgacagatggcgtcctcctggcccagattatccaggttgtggcaaatgaaaagattgaagacatcaatggctgtccgaagaacagatcccaaatgattgaaaacatagatgcctgcttgaatttcctggcagctaagggaataaacatccaggggctgtctgcagaagagatcaggaatggaaacctcaaggccattctaggcctcttcttcagcctctcccgatacaagcagcagcagcagcagccccagaagcagcacctctcctcacctctgccgcccgccgtatcccaggtggccggggccccctcccagtgccaggctggcacccctcagcagcaggtgccagtcactccccaagccccgtgccagcctcaccagccagcgccacatcagcagtcaaaagcacaagctgaaatgcagtccagtgcatcatccaaggactcatctcaaagcaaaatcatccgcttcactctgggtcagaaaaagatctctagacttccaggtcctaccgcgagggtatccgctgcaggcagcgaggccaaaacacgcggagggtcaactactgctaacaaccgacgcagccagagctttaacaactatgataaatccaaaccagtcacctccccacccccaccgccaagcagccacgagaaagagcctttggcaagttcagcctcctcccaccccggaatgagtgacaatgcacctgcttccttggagagcggcagcagctccacccctactaattgcagtacctcctcggccatcccgcagcccggtgcagccaccaagccttggcgcagcaaatccctcagcgtgaagcacagtgccacggtatccatgctctcggtcaagcctcctgggcctgaggcccccaggcccacacctgaagccatgaagccggcccccaacaatcagaagtccatgctggaaaagctgaaacttttcaacagtaaagggggctcaaaggcaggtgaggggccggggtcccgggacacaagctgtgagcggctggagactctgcccagcttcgaagagagcgaggagctggaggccgccagtcgcatgctcaccaccgtgggccctgcttccagcagccccaagattgcactcaagggcattgcccagaggacttttagccgggcactgaccaacaagaagagttctctgaaaggcaatgagaaagagaaggagaaacaacagcgggagaaggataaggagaaaagcaaggaccttgccaagagagcctctgtgacggagaggctggacctcaaggaggagccaaaagaagaccccagtggagcagctgtgcccgagatgccaaaaaagtcctccaagattgccagcttcatccccaaaggggggaagctcaacagtgccaagaaggagcccatggccccttcccacagtggaataccaaaaccaggaatgaaaagcatgcccgggaaatccccaagtgccccagcgccttccaaggaaggggagcggagccggagtgggaagctgagctcaggactcccccagcagaagccccagctggacggcagacactccagttcctcttccagcctggcgtcctcagaaggaaaaggcccaggagggaccaccctgaaccacagcatcagcagccagactgtcagtgggtctgtcgggaccacccagaccacaggaagcaataccgtcagtgttcagctacctcagccccagcagcaatacaaccatcccaacactgccacggttgcacctttcctgtacaggtctcagacggacactgaagggaatgttactgccgagtcaagctcaacaggtgtgagcgtggagcccagccacttcaccaagactggacagcctgctctggaagaactcactggggaagatcctgaggctcggcggctgcggacagtgaagaacatcgctgatctgcggcagaatttggaggaaaccatgtccagtttaaggggaactcaggttacacacagcacattggaaaccacgtttgacaccaatgtcaccacggagatgagtggccgtagcatactcagcttgacagggaggcccacacctctgtcctggagactgggccagtccagccctcggctccaagcaggagacgccccctcaatgggcaatgggtatccccctcgagccaacgccagcaggttcatcaacactgagtcaggtcgctatgtgtactccgcccctctgagaaggcagctggcctcccggggcagtagtgtctgccatgtggacgtctcagacaaggcaggagatgagatggacctggaaggcatcagcatggatgcccccggctacatgagcgacggggatgttctgagcaagaacatccggaccgatgacattacaagcggatacatgactgatggtggacttggcctctatacccgtcgcctgaaccggctccctgatgggatggctgtggtacgggagaccctgcaacgaaatacctccctgggcctcggagacgctgacagctgggacgacagcagctccgtcagcagcggcatcagcgacaccatagacaacctcagcactgatgacatcaacaccagctcctccatcagctcttatgccaacacacctgcctcctctcgaaaaaacctggatgtgcagactgatgctgagaagcactcacaggtggagaggaattccctgtggtctggtgatgatgtcaagaaatcagacggaggctcagacagcggcataaaaatggagccaggttccaagtggaggcggaatccttctgatgtgtctgacgagtccgacaaaagcacgtcgggcaagaagaatcctgtcatctcccagacaggctcatggcggcgaggcatgacagctcaggtgggcatcaccatgccaaggacgaagccttcagccccggcaggcgcactgaagaccccaggaactggaaaaacagacgacgcaaaggtgtctgagaaaggaaggctttctcctaaagcctcccaggtgaagcgctccccatcagatgcaggccggagcagtggtgacgaatccaaaaagcccctccccagcagctctaggacacctactgccaatgccaacagctttgggttcaagaagcagagtggttccgccgccggcctggccatgatcacagccagcggggtgactgtcaccagcaggtcagccacactgggcaaaatcccaaagtcatctgcactcgtcagtcggtctgctggtcggaagtcaagtatggatggggctcagaatcaggatgacgggtatctagccctaagctcccggacaaaccttcagtaccggagtttgccgaggcccagtaagtccaacagccggaacggggctgggaacaggtctagcaccagcagcatagattccaacattagcagcaagtccgcaggcctgccagtgcccaaactgagggagccttccaaaacagccctaggcagctctctaccaggtctggtcaaccaaacagacaaggagaaaggcatctcatcagacaacgagagtgtggcttcctgtaactcggtgaaagtgaatccggcagcccagcctgtgtccagtccggctcagaccagtctccagcctggagccaagtacccagatgtggcctctcccacactccgcagactctttggtgggaagcctaccaagcaagtgcccatcgccacagctgaaaacatgaaaaattcggtggtcatctccaatcctcatgccaccatgactcagcaaggtaacctagactccccgtcaggcagtggcgtcctgagcagtgggagcagcagtcctctctacagcaagaatgtggacctcaaccagtctccgctagcctccagccccagctcagcccactcggccccttccaacagcctcacctggggcaccaacgccagcagctcctccgcagttagcaaggatggcctgggctttcagtctgtcagcagcctccacaccagctgtgagtccatcgacatctccctcagcagtggaggggtccccagccacaattcttccactggcctcatcgcctcctccaaggacgactccttgactccctttgtcagaactaacagtgtgaagaccacactgtcagaaagccctctctcttcccctgctgctagccctaagttctgcagaagtactctgcccaggaaacaggacagtgacccgcaccttgataggaacactttgcctaagaaaggactcaggtatactcccacctcccagcttcgcacgcaagaagatgcaaaagaatggttacggtcccattctgcaggaggccttcaggacaccgctgccaattcccccttttcctctggctccagcgtgacttctccctccggaacaagattcaacttttcccagcttgcgagtcccaccactgtcacccagatgagcttgtccaacccgaccatgctgaggactcacagcctctccaatgctgatgggcagtatgatccatacactgacagccgcttccggaatagctccatgtccctggatgagaagagcagaaccatgagccgttcaggctcattccgggatgggtttgaagaagaatcatgggagaaaagttctgtggacaactttgtcagccgtcttcacagctcacttcatttctctcttcctttgttccatcacgcaaggtatgagttagttcatggatcctcactctccttggtttccagcacatcgtcagtttattctacaccagaagaaaaatgccagtcagagattcgcaagctgcggcgggaactggatgcctcccaggagaaagtttcagctttgaccacccagctgacagcaaatgctcaccttgtggcagcctttgaacagagtcttggtaacatgacaatcaggctccagagtctgaccatgacagctgagcagaaggactcagaactgaatgagttaagaaaaaccattgagctgctaaagaaacagaacgcagctgcccaggctgccattaatggagtaattaacacacctgagctcaactgcaaaggaaacggcactgcccagtctgcagacctccgcatccgcaggcagcactcctcagacagcgtctccagcatcaacagtgccaccagccactccagcgtgggcagcaacatagagagtgactcaaagaagaagaagcggaagaactggttacgcagctccttcaagcaagctttcgggaagaagaagtccccaaaatctgcgtcctctcattcagatattgaggagatgacggattcttctttgccttcctcaccaaagttaccgcacaatgggtccacaggttccaccccactgctgaggaattctcactccaactctctaatttcagaatgcatggatagtgaagctgagaccgtcatgcagctccgaaatgagttaagagacaaggagatgaagctgacggatatccgcttagaagctctcagttctgcccaccagctggaccagctccgggaggccatgaacaggatgcagagtgaaatagagaagctgaaagctgagaatgatcggctgaagtcagagtctcaaggcagtggctgcagccgggctccttcccaagtgtccatctctgcctccccgaggcagtccatgggcctctcccagcacagcttgaacctcactgagtcaaccagcctggacatgttgctggatgacactggtgaatgctcggctcggaaggaaggaggcaggcatgttaagatagttgtcagctttcaggaggaaatgaagtggaaggaggattccagaccacatctctttcttattggctgcattggagttagtggcaagacgaagtgggatgtgctcgatggggtggttagacggctgttcaaagaatacatcattcatgtcgacccagtgagtcagctagggctgaattcagacagcgttcttggctacagcattggagaaatcaagcgcagcaacacttccgaaacaccggagctgcttccttgtggctatctggttggagagaacacgaccatctcagtgactgtgaaagggctcgcagaaaacagcctggactcactggtgtttgagtccttgattcccaagcccatcctgcagcgctacgtctccctcctgatagagcaccgtcggatcattctctctggccccagcggcactgggaaaacctacctggccaaccggctgtctgagtatatagtgcttcgagagggacgggagttgacagacggggttatcgccacctttaacgtggaccataagtccagcaaggaattgcgccagtacctgtccaaccttgctgaccagtgcaacagtgagaacaatgctgtggacatgcccctcgtcatcatcctggacaacctacaccacgtgagctctctgggagagatcttcaatgggctgctcaactgcaagtaccacaaatgcccttacataattggcacaatgaaccaggctacctcttcgactcccaacctgcagcttcaccataacttcagatgggtgctttgtgccaaccacacggagcctgtgaagggtttccttggccgattcctgaggaggaagctcatggaaacagagatcagtgggcgggtgcgcaatatggagctggtaaaaatcattgactggattcccaaggtctggcatcacctcaaccgcttcctggaggctcacagttcctcggacgtcaccatcggcccccggctcttcctgtcatgccccatcgatgtggacggctcgagagtgtggttcaccgacttgtggaactattccattatcccctatctcctggaagccgtcagagaaggactccagctctatggaaggcgcgccccctgggaggatcctgccaagtgggtgatggacacatatccatgggcagccagcccacaacagcacgagtggcctcccctgctgcagttacggcctgaggatgtcggcttcgacggctactccatgcctcgggagggatcgacaagcaagcagatgccccccagtgatgctgaaggtgacccgctgatgaacatgctgatgaggctgcaggaggcagccaactactccagcccccagagctatgacagcgactccaacagcaacagccatcacgatgacatcttggactcctctttggagtccactctgtgacaggggcccggagcccagcgccctcctcttctcctcaccgcattccacctgcatcccccacatcaccctgaagatgacttcctgagccagcccccagccacagccttagagctgcgggaacaccgagaccccccgtccttcagcctcgacctgggtgcaggcatcccgggccagctgcctgcggaccgcttccttccacagcgagaactgcactaccttctgttgtactttaattattgttttgccttgttgctgtgacctccctaagacactgaagatacttctcgggaaaggatcatcgccgttgaaatg

SEQ ID NO: 20789 - protein, 2485 aa, Homo sapiens; identical to SEQ ID NO: 20787

SEQ ID NO: 20790 - DNA, 7678 bp, Homo sapiens
acccgcgctgcctttagcggtcgcccccgccgccgctgccagggacgtgctgggaaagcccaagccccgggagaagatgccggccatcctggtcgcctccaaaatgaagtcgggactgcccaaacccgtgcacagcgccgcgcccatcctgcacgtgcccccggcccgggcgggcccccagccctgctacctgaagttgggaagcaaggtggaggtgagcaagaccacctatcctagccagatccccctgaaatcgcaggtgctgcaggggctgcaggagccagcgggggaggggctcccgctgcggaagagcggctcggtggaaaacgggttcgatacccagatctacacagactgggccaatcattacctagccaaatccggccacaagcgtctcatcagggatctccagcaagatgtgacagatggcgtcctcctggcccagattatccaggttgtggcaaatgaaaagattgaagacatcaatggctgtccgaagaacagatcccaaatgattgaaaacatagatgcctgcttgaatttcctggcagctaagggaataaacatccaggggctgtctgcagaagagatcaggaatggaaacctcaaggccattctaggcctcttcttcagcctctcccgatacaagcagcagcagcagcagccccagaagcagcacctctcctcacctctgccgcccgccgtatcccaggtggccggggccccctcccagtgccaggctggcacccctcagcagcaggtgccagtcactccccaagccccgtgccagcctcaccagccagcgccacatcagcagtcaaaagcacaagctgaaatgcagtccagacttccaggtcctaccgcgagggtatccgctgcaggcagcgaggccaaaacacgcggagggtcaactactgctaacaaccgacgcagccagagctttaacaactatgataaatccaaaccagtcacctccccacccccaccgccaagcagccacgagaaagagcctttggcaagttcagcctcctcccaccccggaatgagtgacaatgcacctgcttccttggagagcggcagcagctccacccctactaattgcagtacctcctcggccatcccgcagcccggtgcagccaccaagccttggcgcagcaaatccctcagcgtgaagcacagtgccacggtatccatgctctcggtcaagcctcctgggcctgaggcccccaggcccacacctgaagccatgaagccggcccccaacaatcagaagtccatgctggaaaagctgaaacttttcaacagtaaagggggctcaaaggcaggtgaggggccggggtcccgggacacaagctgtgagcggctggagactctgcccagcttcgaagagagcgaggagctggaggccgccagtcgcatgctcaccaccgtgggccctgcttccagcagccccaagattgcactcaagggcattgcccagaggacttttagccgggcactgaccaacaagaagagttctctgaaaggcaatgagaaagagaaggagaaacaacagcgggagaaggataaggagaaaagcaaggaccttgccaagagagcctctgtgacggagaggctggacctcaaggaggagccaaaagaagaccccagtggagcagctgtgcccgagatgccaaaaaagtcctccaagattgccagcttcatccccaaaggggggaagctcaacagtgccaagaaggagcccatggccccttcccacagtggaataccaaaaccaggaatgaaaagcatgcccgggaaatccccaagtgccccagcgccttccaaggaaggggagcggagccggagtgggaagctgagctcaggactcccccagcagaagccccagctggacggcagacactccagttcctcttccagcctggcgtcctcagaaggaaaaggcccaggagggaccaccctgaaccacagcatcagcagccagactgtcagtgggtctgtcgggaccacccagaccacaggaagcaataccgtcagtgttcagctacctcagccccagcagcaatacaaccatcccaacactgccacggttgcacctttcctgtacaggtctcagacggacactgaagggaatgttactgccgagtcaagctcaacaggtgtgagcgtggagcccagccacttcaccaagactggacagcctgctctggaagaactcactggggaagatcctgaggctcggcggctgcggacagtgaagaacatcgctgatctgcggcagaatttggaggaaaccatgtccagtttaaggggaactcaggttacacacagcacattggaaaccacgtttgacaccaatgtcaccacggagatgagtggccgtagcatactcagcttgacagggaggcccacacctctgtcctggagactgggccagtccagccctcggctccaagcaggagacgccccctcaatgggcaatgggtatccccctcgagccaacgccagcaggttcatcaacactgagtcaggtcgctatgtgtactccgcccctctgagaaggcagctggcctcccggggcagtagtgtctgccatgtggacgtctcagacaaggcaggagatgagatggacctggaaggcatcagcatggatgcccccggctacatgagcgacggggatgttctgagcaagaacatccggaccgatgacattacaagcggatacatgactgatggtggacttggcctctatacccgtcgcctgaaccggctccctgatgggatggctgtggtacgggagaccctgcaacgaaatacctccctgggcctcggagacgctgacagctgggacgacagcagctccgtcagcagcggcatcagcgacaccatagacaacctcagcactgatgacatcaacaccagctcctccatcagctcttatgccaacacacctgcctcctctcgaaaaaacctggatgtgcagactgatgctgagaagcactcacaggtggagaggaattccctgtggtctggtgatgatgtcaagaaatcagacggaggctcagacagcggcataaaaatggagccaggttccaagtggaggcggaatccttctgatgtgtctgacgagtccgacaaaagcacgtcgggcaagaagaatcctgtcatctcccagacaggctcatggcggcgaggcatgacagctcaggtgggcatcaccatgccaaggacgaagccttcagccccggcaggcgcactgaagaccccaggaactggaaaaacagacgacgcaaaggtgtctgagaaaggaaggctttctcctaaagcctcccaggtgaagcgctccccatcagatgcaggccggagcagtggtgacgaatccaaaaagcccctccccagcagctctaggacacctactgccaatgccaacagctttgggttcaagaagcagagtggttccgccgccggcctggccatgatcacagccagcggggtgactgtcaccagcaggtcagccacactgggcaaaatcccaaagtcatctgcactcgtcagtcggtctgctggtcggaagtcaagtatggatggggctcagaatcaggatgacgggtatctagccctaagctcccggacaaaccttcagtaccggagtttgccgaggcccagtaagtccaacagccggaacggggctgggaacaggtctagcaccagcagcatagattccaacattagcagcaagtccgcaggcctgccagtgcccaaactgagggagccttccaaaacagccctaggcagctctctaccaggtctggtcaaccaaacagacaaggagaaaggcatctcatcagacaacgagagtgtggcttcctgtaactcggtgaaagtgaatccggcagcccagcctgtgtccagtccggctcagaccagtctccagcctggagccaagtacccagatgtggcctctcccacactccgcagactctttggtgggaagcctaccaagcaagtgcccatcgccacagctgaaaacatgaaaaattcggtggtcatctccaatcctcatgccaccatgactcagcaaggtaacctagactccccgtcaggcagtggcgtcctgagcagtgggagcagcagtcctctctacagcaagaatgtggacctcaaccagtctccgctagcctccagccccagctcagcccactcggccccttccaacagcctcacctggggcaccaacgccagcagctcctccgcagttagcaaggatggcctgggctttcagtctgtcagcagcctccacaccagctgtgagtccatcgacatctccctcagcagtggaggggtccccagccacaattcttccactggcctcatcgcctcctccaaggacgactccttgactccctttgtcagaactaacagtgtgaagaccacactgtcagaaagccctctctcttcccctgctgctagccctaagttctgcagaagtactctgcccaggaaacaggacagtgacccgcaccttgataggaacactttgcctaagaaaggactcaggtatactcccacctcccagcttcgcacgcaagaagatgcaaaagaatggttacggtcccattctgcaggaggccttcaggacaccgctgccaattcccccttttcctctggctccagcgtgacttctccctccggaacaagattcaacttttcccagcttgcgagtcccaccactgtcacccagatgagcttgtccaacccgaccatgctgaggactcacagcctctccaatgctgatgggcagtatgatccatacactgacagccgcttccggaatagctccatgtccctggatgagaagagcagaaccatgagccgttcaggctcattccgggatgggtttgaagaagttcatggatcctcactctccttggtttccagcacatcgtcagtttattctacaccagaagaaaaatgccagtcagagattcgcaagctgcggcgggaactggatgcctcccaggagaaagtttcagctttgaccacccagctgacagcaaatgctcaccttgtggcagcctttgaacagagtcttggtaacatgacaatcaggctccagagtctgaccatgacagctgagcagaaggactcagaactgaatgagttaagaaaaaccattgagctgctaaagaaacagaacgcagctgcccaggctgccattaatggagtaattaacacacctgagctcaactgcaaaggaaacggcactgcccagtctgcagacctccgcatccgcaggcagcactcctcagacagcgtctccagcatcaacagtgccaccagccactccagcgtgggcagcaacatagagagtgactcaaagaagaagaagcggaagaactggttacgcagctccttcaagcaagctttcgggaagaagaagtccccaaaatctgcgtcctctcattcagatattgaggagatgacggattcttctttgccttcctcaccaaagttaccgcacaatgggtccacaggttccaccccactgctgaggaattctcactccaactctctaatttcagaatgcatggatagtgaagctgagaccgtcatgcagctccgaaatgagttaagagacaaggagatgaagctgacggatatccgcttagaagctctcagttctgcccaccagctggaccagctccgggaggccatgaacaggatgcagagtgaaatagagaagctgaaagctgagaatgatcggctgaagtcagagtctcaaggcagtggctgcagccgggctccttcccaagtgtccatctctgcctccccgaggcagtccatgggcctctcccagcacagcttgaacctcactgagtcaaccagcctggacatgttgctggatgacactggtgaatgctcggctcggaaggaaggaggcaggcatgttaagatagttgtcagctttcaggaggaaatgaagtggaaggaggattccagaccacatctctttcttattggctgcattggagttagtggcaagacgaagtgggatgtgctcgatggggtggttagacggctgttcaaagaatacatcattcatgtcgacccagtgagtcagctagggctgaattcagacagcgttcttggctacagcattggagaaatcaagcgcagcaacacttccgaaacaccggagctgcttccttgtggctatctggttggagagaacacgaccatctcagtgactgtgaaagggctcgcagaaaacagcctggactcactggtgtttgagtccttgattcccaagcccatcctgcagcgctacgtctccctcctgatagagcaccgtcggatcattctctctggccccagcggcactgggaaaacctacctggccaaccggctgtctgagtatatagtgcttcgagagggacgggagttgacagacggggttatcgccacctttaacgtggaccataagtccagcaaggaattgcgccagtacctgtccaaccttgctgaccagtgcaacagtgagaacaatgctgtggacatgcccctcgtcatcatcctggacaacctacaccacgtgagctctctgggagagatcttcaatgggctgctcaactgcaagtaccacaaatgcccttacataattggcacaatgaaccaggctacctcttcgactcccaacctgcagcttcaccataacttcagatgggtgctttgtgccaaccacacggagcctgtgaagggtttccttggccgattcctgaggaggaagctcatggaaacagagatcagtgggcgggtgcgcaatatggagctggtaaaaatcattgactggattcccaaggtctggcatcacctcaaccgcttcctggaggctcacagttcctcggacgtcaccatcggcccccggctcttcctgtcatgccccatcgatgtggacggctcgagagtgtggttcaccgacttgtggaactattccattatcccctatctcctggaagccgtcagagaaggactccagctctatggaaggcgcgccccctgggaggatcctgccaagtgggtgatggacacatatccatgggcagccagcccacaacagcacgagtggcctcccctgctgcagttacggcctgaggatgtcggcttcgacggctactccatgcctcgggagggatcgacaagcaagcagatgccccccagtgatgctgaaggtgacccgctgatgaacatgctgatgaggctgcaggaggcagccaactactccagcccccagagctatgacagcgactccaacagcaacagccatcacgatgacatcttggactcctctttggagtccactctgtgacaggggcccggagcccagcgccctcctcttctcctcaccgcattccacctgcatcccccacatcaccctgaagatgacttcctgagccagcccccagccacagccttagagctgcgggaacaccgagaccccccgtccttcagcctcgacctgggtgcaggcatcccgggccagctgcctgcggaccgcttccttccacagcgagaactgcactaccttctgttgtactttaattattgttttgccttgttgctgtgacctccctaagacactgaagatacttctcgggaaaggatcatcgccgttgaaatg

SEQ ID NO: 20791 - protein, 2429 aa, Homo sapiens; identical to SEQ ID NO: 2635

SEQ ID NO: 20792 - DNA, 459 bp, Homo sapiens
ttctgccctttctccttcccaaggtgcttatcactcagtaaggatgactgcacacctaccttacaccaggcaagaaggaagccagaaatactgatggagctttctttggggaatccaagtgggaacctgggggagagggaaaaggggaggagttccctttcttccctacatagctccctactgtccagtttacaacataattggctagggaggctggactagagggaagacacttctacaaattacccagcaagaactgtgtgttaaggtgggtgtggtagcgtgcacctgtagcctcagctactggggaggtggacgggggtgggtgctgagttgggaggatgttttgaggccaggagttgaaggctgtagtgtgctgtatttgtgcctgtgaatagccactgaactcctgcctggacagcataacaagaccccatattttttaaaaagttagaaaca

SEQ ID NO: 20793 - protein, 42 aa, Homo sapiens
MELSLGNPSGNLGEREKGRSSLSSLHSSLLSSLQHNWLGRLD

SEQ ID NO: 20794 - DNA, 625 bp, Homo sapiens
agcccagctacacccgggtgcaacgtggatgtatcagaaaacgacaaccccagaaaagcgggaaagcctctgagaaatgggactgaaatggaactgaacatatttttcagaacacaccatttcctagtcctgtctgagtcatcccagacctctgggagctggccagacttgaagggtagtcctcaccatccctccagtcaagacagacctgtgaaggcaacatgccttttacaaaaggaactttctctacagaataggttggtaactgacactagctatgaaaaagctgtggaatctaacaggacctgctagaacaaatactccagacttcaagtctaacatttagtaaacagatttcttccctttctttaaatgtaatgatgcaacaatgtggaaccaagtgaaactggctttgtgagtcaccttcagaagcggcgaaaggtggcttctcatttccaaagttcacagttcaacatggcctgcataagtaatacaaactgactgccactaatctcaccagaaatcacctctgtcaagaactgtgtgaggagagaggggacagagaaggaaagaaatacgtaccgacttgctctagtcgagtgcatttctaatagagcatgacata

SEQ ID NO: 20795 - protein, 74 aa, Homo sapiens
MELNIFFRTHHFLVLSESSQTSGSWPDLKGSPHHPSSQDRPVKATCLLQKELSLQNRLVTDTSYEKAVESNRTC

SEQ ID NO: 20796 - DNA, 394 bp, Homo sapiens
tagccacgtgaggatgggaagtctcatttgccaaatgactgggctgggtgcagtggctcaagcctataatcccagcactttgggaggctgaggcagatggatcacctgaggtcaggagttgaagaccagcttggctaacaagagttccccaaggacagaggtcagggaataagagctgagtgagacctcccaaagcagatcacaaagagaaggggacactgcaccatggaggtgacacaggccagtggccacggtgctggacctggggctgagaggacccacatgtatatcctggccgatttaggtatcttagactttctgtgcctcactttccttatctgtgaaatcagcattctgatcatgactaaataaaaattgctgccattgatcaagg

SEQ ID NO: 20797 - protein, 48 aa, Homo sapiens [sequence omitted]

SEQ ID NO: 20798 - DNA, 547 bp, Homo sapiens
acacatgtgaacagctagcgccaatagctttggtcagcattaatatgctgggtgtagatcttctccctccaagactccatacattcagcgtcttaagaagcagacccagagttccagggcacagcctcagcagcccaaggccagctccaaggtcactggcctttcctgatttgaccttcacttgggatcaagtcttcctgaaccagaaacaagctgaatccgagaagcccaggcaggctgtgctgctagcatcctgtgtatttcgcttcatctctccccgttacagaccaggaattccaaattcctagcccaaggtcagagaggtctcactgatgcctgtgtagccacgtgaggatgggaagtctcatttgccagtaagcactacaggaagtgatggttgaacacgatgggactaataagaaggaaacgtagttagagtgatcttattcatttaaaaacaaaagcagcaacaatacagcagtcgaggaaaagaatcaattctatttaagcaaagcaatttaaagtaataaaaaatgtttccagcatt

SEQ ID NO: 20799 - protein, 87 aa, Homo sapiens
MLGVDLLPPRLHTFSVLRSRPRVPGHSLSSPRPAPRSLAFPDLTFTWDQVFLNQKQAESEKPRQAVLLASCVFRFISPRYRPGIPNS

SEQ ID NO: 20800 - DNA, 5051 bp, Homo sapiens
aatcttttcaatcgaatgctttgccttcagacgtcaatggaatgagctaagaaatgttatagtcaatgatttttgcatcattaaaagtagcacttagggctggaaagactttctgcaatgtttctgtgcagtctgtgaggatttaaagtagtttttcattcttagattttcttcaatttgacccgctgttgcaaactcccctgggaccacatggagggcccttccattcagtgctttacgggccgcaatgtagtgaaatgctctggcctaggaaccttacaagctgggacgacagcagctccgtcagcagcggcatcagcgacaccatagacaacctcagcactgatgacatcaacaccagctcctccatcagctcttatgccaacacacctgcctcctctcgaaaaaacctggatgtgcagactgatgctgagaagcactcacaggtggagaggaattccctgtggtctggtgatgatgtcaagaaatcagacggaggctcagacagcggcataaaaatggagccaggttccaagtggaggcggaatccttctgatgtgtctgacgagtccgacaaaagcacgtcgggcaagaagaatcctgtcatctcccagacaggctcatggcggcgaggcatgacagctcaggtgggcatcaccatgccaaggacgaagccttcagccccggcaggcgcactgaagaccccaggaactggaaaaacagacgacgcaaaggtgtctgagaaaggaaggctttctcctaaagcctcccaggtgaagcgctccccatcagatgcaggccggagcagtggtgacgaatccaaaaagcccctccccagcagctctaggacacctactgccaatgccaacagctttgggttcaagaagcagagtggttccgccgccggcctggccatgatcacagccagcggggtgactgtcaccagcaggtcagccacactgggcaaaatcccaaagtcatctgcactcgtcagtcggtctgctggtcggaagtcaagtatggatggggctcagaatcaggatgacgggtatctagccctaagctcccggacaaaccttcagtaccggagtttgccgaggcccagtaagtccaacagccggaacggggctgggaacaggtctagcaccagcagcatagattccaacattagcagcaagtccgcaggcctgccagtgcccaaactgagggagccttccaaaacagccctaggcagctctctaccaggtctggtcaaccaaacagacaaggagaaaggcatctcatcagacaacgagagtgtggcttcctgtaactcggtgaaagtgaatccggcagcccagcctgtgtccagtccggctcagaccagtctccagcctggagccaagtacccagatgtggcctctcccacactccgcagactctttggtgggaagcctaccaagcaagtgcccatcgccacagctgaaaacatgaaaaattcggtggtcatctccaatcctcatgccaccatgactcagcaaggtaacctagactccccgtcaggcagtggcgtcctgagcagtgggagcagcagtcctctctacagcaagaatgtggacctcaaccagtctccgctagcctccagccccagctcagcccactcggccccttccaacagcctcacctggggcaccaacgccagcagctcctccgcagttagcaaggatggcctgggctttcagtctgtcagcagcctccacaccagctgtgagtccatcgacatctccctcagcagtggaggggtccccagccacaattcttccactggcctcatcgcctcctccaaggacgactccttgactccctttgtcagaactaacagtgtgaagaccacactgtcagaaagtgacccgcaccttgataggaacactttgcctaagaaaggactcaggtatactcccacctcccagcttcgcacgcaagaagatgcaaaagaatggttacggtcccattctgcaggaggccttcaggacaccgctgccaattcccccttttcctctggctccagcgtgacttctccctccggaacaagattcaacttttcccagcttgcgagtcccaccactgtcacccagatgagcttgtccaacccgaccatgctgaggactcacagcctctccaatgctgatgggcagtatgatccatacactgacagccgcttccggaatagctccatgtccctggatgagaagagcagaaccatgagccgttcaggctcattccgggatgggtttgaagaagttcatggatcctcactctccttggtttccagcacatcgtcagtttattctacaccagaagaaaaatgccagtcagagattcgcaagctgcggcgggaactggatgcctcccaggagaaagtttcagctttgaccacccagctgacagcaaatgctcaccttgtggcagcctttgaacagagtcttggtaacatgacaatcaggctccagagtctgaccatgacagctgagcagaaggactcagaactgaatgagttaagaaaaaccattgagctgctaaagaaacagaacgcagctgcccaggctgccattaatggagtaattaacacacctgagctcaactgcaaaggaaacggcactgcccagtctgcagacctccgcatccgcaggcagcactcctcagacagcgtctccagcatcaacagtgccaccagccactccagcgtgggcagcaacatagagagtgactcaaagaagaagaagcggaagaactggttacgcagctccttcaagcaagctttcgggaagaagaagtccccaaaatctgcgtcctctcattcagatattgaggagatgacggattcttctttgccttcctcaccaaagttaccgcacaatgggtccacaggttccaccccactgctgaggaattctcactccaactctctaatttcagaatgcatggatagtgaagctgagaccgtcatgcagctccgaaatgagttaagagacaaggagatgaagctgacggatatccgcttagaagctctcagttctgcccaccagctggaccagctccgggaggccatgaacaggatgcagagtgaaatagagaagctgaaagctgagaatgatcggctgaagtcagagtctcaaggcagtggctgcagccgggctccttcccaagtgtccatctctgcctccccgaggcagtccatgggcctctcccagcacagcttgaacctcactgagtcaaccagcctggacatgttgctggatgacactggtgaatgctcggctcggaaggaaggaggcaggcatgttaagatagttgtcagctttcaggaggaaatgaagtggaaggaggattccagaccacatctctttcttattggctgcattggagttagtggcaagacgaagtgggatgtgctcgatggggtggttagacggctgttcaaagaatacatcattcatgtcgacccagtgagtcagctagggctgaattcagacagcgttcttggctacagcattggagaaatcaagcgcagcaacacttccgaaacaccggagctgcttccttgtggctatctggttggagagaacacgaccatctcagtgactgtgaaagggctcgcagaaaacagcctggactcactggtgtttgagtccttgattcccaagcccatcctgcagcgctacgtctccctcctgatagagcaccgtcggatcattctctctggccccagcggcactgggaaaacctacctggccaaccggctgtctgagtatatagtgcttcgagagggacgggagttgacagacggggttatcgccacctttaacgtggaccataagtccagcaaggaattgcgccagtacctgtccaaccttgctgaccagtgcaacagtgagaacaatgctgtggacatgcccctcgtcatcatcctggacaacctacaccacgtgagctctctgggagagatcttcaatgggctgctcaactgcaagtaccacaaatgcccttacataattggcacaatgaaccaggctacctcttcgactcccaacctgcagcttcaccataacttcagatgggtgctttgtgccaaccacacggagcctgtgaagggtttccttggccgattcctgaggaggaagctcatggaaacagagatcagtgggcgggtgcgcaatatggagctggtaaaaatcattgactggattcccaaggtctggcatcacctcaaccgcttcctggaggctcacagttcctcggacgtcaccatcggcccccggctcttcctgtcatgccccatcgatgtggacggctcgagagtgtggttcaccgacttgtggaactattccattatcccctatctcctggaagccgtcagagaaggactccagctctatggaaggcgcgccccctgggaggatcctgccaagtgggtgatggacacatatccatgggcagccagcccacaacagcacgagtggcctcccctgctgcagttacggcctgaggatgtcggcttcgacggctactccatgcctcgggagggatcgacaagcaagcagatgccccccagtgatgctgaaggtgacccgctgatgaacatgctgatgaggctgcaggaggcagccaactactccagcccccagagctatgacagcgactccaacagcaacagccatcacgatgacatcttggactcctctttggagtccactctgtgacaggggcccggagcccagcgccctcctcttctcctcaccgcattccacctgcatcccccacatcaccctgaagatgacttcctgagccagcccccagccacagccttagagctgcgggaacaccgagaccccccgtccttcagcctcgacctgggtgcaggcatcccgggccagctgcctgcggaccgcttccttccacagcgagaactgcactaccttctgttgtactttaattattgttttgccttgttgctgtgacctccctaagacactgaagatacttctcgggaaaggatcatcgccgttgaaatg

SEQ ID NO: 20801 - protein, 1493 aa, Homo sapiens
MLWPRNLTSWDDSSSVSSGISDTIDNLSTDDINTSSSISSYANTPASSRKNLDVQTDAEKHSQVERNSLWSGDDVKKSDGGSDSGIKMEPGSKWRRNPSDVSDESDKSTSGKKNPVISQTGSWRRGMTAQVGITMPRTKPSAPAGALKTPGTGKTDDAKVSEKGRLSPKASQVKRSPSDAGRSSGDESKKPLPSSSRTPTANANSFGFKKQSGSAAGLAMITASGVTVTSRSATLGKIPKSSALVSRSAGRKSSMDGAQNQDDGYLALSSRTNLQYRSLPRPSKSNSRNGAGNRSSTSSIDSNISSKSAGLPVPKLREPSKTALGSSLPGLVNQTDKEKGISSDNESVASCNSVKVNPAAQPVSSPAQTSLQPGAKYPDVASPTLRRLFGGKPTKQVPIATAENMKNSVVISNPHATMTQQGNLDSPSGSGVLSSGSSSPLYSKNVDLNQSPLASSPSSAHSAPSNSLTWGTNASSSSAVSKDGLGFQSVSSLHTSCESIDISLSSGGVPSHNSSTGLIASSKDDSLTPFVRTNSVKTTLSESDPHLDRNTLPKKGLRYTPTSQLRTQEDAKEWLRSHSAGGLQDTAANSPFSSGSSVTSPSGTRFNFSQLASPTTVTQMSLSNPTMLRTHSLSNADGQYDPYTDSRFRNSSMSLDEKSRTMSRSGSFRDGFEEVHGSSLSLVSSTSSVYSTPEEKCQSEIRKLRRELDASQEKVSALTTQLTANAHLVAAFEQSLGNMTIRLQSLTMTAEQKDSELNELRKTIELLKKQNAAAQAAINGVINTPELNCKGNGTAQSADLRIRRQHSSDSVSSINSATSHSSVGSNIESDSKKKKRKNWLRSSFKQAFGKKKSPKSASSHSDIEEMTDSSLPSSPKLPHNGSTGSTPLLRNSHSNSLISECMDSEAETVMQLRNELRDKEMKLTDIRLEALSSAHQLDQLREAMNRMQSEIEKLKAENDRLKSESQGSGCSRAPSQVSISASPRQSMGLSQHSLNLTESTSLDMLLDDTGECSARKEGGRHVKIVVSFQEEMKWKEDSRPHLFLIGCIGVSGKTKWDVLDGVVRRLFKEYIIHVDPVSQLGLNSDSVLGYSIGEIKRSNTSETPELLPCGYLVGENTTISVTVKGLAENSLDSLVFESLIPKPILQRYVSLLIEHRRIILSGPSGTGKTYLANRLSEYIVLREGRELTDGVIATFNVDHKSSKELRQYLSNLADQCNSENNAVDMPLVIILDNLHHVSSLGEIFNGLLNCKYHKCPYIIGTMNQATSSTPNLQLHHNFRWVLCANHTEPVKGFLGRFLRRKLMETEISGRVRNMELVKIIDWIPKVWHHLNRFLEAHSSSDVTIGPRLFLSCPIDVDGSRVWFTDLWNYSIIPYLLEAVREGLQLYGRRAPWEDPAKWVMDTYPWAASPQQHEWPPLLQLRPEDVGFDGYSMPREGSTSKQMPPSDAEGDPLMNMLMRLQEAANYSSPQSYDSDSNSNSHHDDILDSSLESTL

SEQ ID NO: 20802 - DNA, 8082 bp, Homo sapiens
aatcttttcaatcgaatgctttgccttcagacgtcaatggaatgagctaagaaatgttatagtcaatgatttttgcatcattaaaagtagcacttagggctggaaagactttctgcaatgtttctgtgcagtctgtgaggatttaaagtagtttttcattcttagattttcttcaatttgacccgctgttgcaaactcccctgggaccacatggagggcccttccattcagtgctttacgggccgcaatgtagtgaaatgctctggcctaggaaccttacaagctgggacgacagcagctccgtcagcagcggcatcagcgacaccatagacaacctcagcactgatgacatcaacaccagctcctccatcagctcttatgccaacacacctgcctcctctcgaaaaaacctggatgtgcagactgatgctgagaagcactcacaggtggagaggaattccctgtggtctggtgatgatgtcaagaaatcagacggaggctcagacagcggcataaaaatggagccaggttccaagtggaggcggaatccttctgatgtgtctgacgagtccgacaaaagcacgtcgggcaagaagaatcctgtcatctcccagacaggctcatggcggcgaggcatgacagctcaggtgggcatcaccatgccaaggacgaagccttcagccccggcaggcgcactgaagaccccaggaactggaaaaacagacgacgcaaaggtgtctgagaaaggaaggctttctcctaaagcctcccaggtgaagcgctccccatcagatgcaggccggagcagtggtgacgaatccaaaaagcccctccccagcagctctaggacacctactgccaatgccaacagctttgggttcaagaagcagagtggttccgccgccggcctggccatgatcacagccagcggggtgactgtcaccagcaggtcagccacactgggcaaaatcccaaagtcatctgcactcgtcagtcggtctgctggtcggaagtcaagtatggatggggctcagaatcaggatgacgggtatctagccctaagctcccggacaaaccttcagtaccggagtttgccgaggcccagtaagtccaacagccggaacggggctgggaacaggtctagcaccagcagcatagattccaacattagcagcaagtccgcaggcctgccagtgcccaaactgagggagccttccaaaacagccctaggcagctctctaccaggtctggtcaaccaaacagacaaggagaaaggcatctcatcagacaacgagagtgtggcttcctgtaactcggtgaaagtgaatccggcagcccagcctgtgtccagtccggctcagaccagtctccagcctggagccaagtacccagatgtggcctctcccacactccgcagactctttggtgggaagcctaccaagcaagtgcccatcgccacagctgaaaacatgaaaaattcggtggtcatctccaatcctcatgccaccatgactcagcaaggtaacctagactccccgtcaggcagtggcgtcctgagcagtgggagcagcagtcctctctacagcaagaatgtggacctcaaccagtctccgctagcctccagccccagctcagcccactcggccccttccaacagcctcacctggggcaccaacgccagcagctcctccgcagttagcaaggatggcctgggctttcagtctgtcagcagcctccacaccagctgtgagtccatcgacatctccctcagcagtggaggggtccccagccacaattcttccactggcctcatcgcctcctccaaggacgactccttgactccctttgtcagaactaacagtgtgaagaccacactgtcagaaagtgacccgcaccttgataggaacactttgcctaagaaaggactcaggtatactcccacctcccagcttcgcacgcaagaagatgcaaaagaatggttacggtcccattctgcaggaggccttcaggacaccgctgccaattcccccttttcctctggctccagcgtgacttctccctccggaacaagattcaacttttcccagcttgcgagtcccaccactgtcacccagatgagcttgtccaacccgaccatgctgaggactcacagcctctccaatgctgatgggcagtatgatccatacactgacagccgcttccggaatagctccatgtccctggatgagaagagcagaaccatgagccgttcaggctcattccgggatgggtttgaagaagttcatggatcctcactctccttggtttccagcacatcgtcagtttattctacaccagaagaaaaatgccagtcagagattcgcaagctgcggcgggaactggatgcctcccaggagaaagtttcagctttgaccacccagctgacagcaaatgctcaccttgtggcagcctttgaacagagtcttggtaacatgacaatcaggctccagagtctgaccatgacagctgagcagaaggactcagaactgaatgagttaagaaaaaccattgagctgctaaagaaacagaacgcagctgcccaggctgccattaatggagtaattaacacacctgagctcaactgcaaaggaaacggcactgcccagtctgcagacctccgcatccgcaggcagcactcctcagacagcgtctccagcatcaacagtgccaccagccactccagcgtgggcagcaacatagagagtgactcaaagaagaagaagcggaagaactggttacgcagctccttcaagcaagctttcgggaagaagaagtccccaaaatctgcgtcctctcattcagatattgaggagatgacggattcttctttgccttcctcaccaaagttaccgcacaatgggtccacaggttccaccccactgctgaggaattctcactccaactctctaatttcagaatgcatggatagtgaagctgagaccgtcatgcagctccgaaatgagttaagagacaaggagatgaagctgacggatatccgcttagaagctctcagttctgcccaccagctggaccagctccgggaggccatgaacaggatgcagagtgaaatagagaagctgaaagctgagaatgatcggctgaagtcagagtctcaaggcagtggctgcagccgggctccttcccaagtgtccatctctgcctccccgaggcagtccatgggcctctcccagcacagcttgaacctcactgagtcaaccagcctggacatgttgctggatgacactggtgaatgctcggctcggaaggaaggaggcaggcatgttaagatagttgtcagctttcaggaggaaatgaagtggaaggaggattccagaccacatctctttcttattggctgcattggagttagtggcaagacgaagtgggatgtgctcgatggggtggttagacggctgttcaaagaatacatcattcatgtcgacccagtgagtcagctagggctgaattcagacagcgttcttggctacagcattggagaaatcaagcgcagcaacacttccgaaacaccggagctgcttccttgtggctatctggttggagagaacacgaccatctcagtgactgtgaaagggctcgcagaaaacagcctggactcactggtgtttgagtccttgattcccaagcccatcctgcagcgctacgtctccctcctgatagagcaccgtcggatcattctctctggccccagcggcactgggaaaacctacctggccaaccggctgtctgagtatatagtgcttcgagagggacgggagttgacagacggggttatcgccacctttaacgtggaccataagtccagcaaggaattgcgccagtacctgtccaaccttgctgaccagtgcaacagtgagaacaatgctgtggacatgcccctcgtcatcatcctggacaacctacaccacgtgagctctctgggagagatcttcaatgggctgctcaactgcaagtaccacaaatgcccttacataattggcacaatgaaccaggctacctcttcgactcccaacctgcagcttcaccataacttcagatgggtgctttgtgccaaccacacggagcctgtgaagggtttccttggccgattcctgaggaggaagctcatggaaacagagatcagtgggcgggtgcgcaatatggagctggtaaaaatcattgactggattcccaaggtctggcatcacctcaaccgcttcctggaggctcacagttcctcggacgtcaccatcggcccccggctcttcctgtcatgccccatcgatgtggacggctcgagagtgtggttcaccgacttgtggaactattccattatcccctatctcctggaagccgtcagagaaggactccagctctatggaaggcgcgccccctgggaggatcctgccaagtgggtgatggacacatatccatgggcagccagcccacaacagcacgagtggcctcccctgctgcagttacggcctgaggatgtcggcttcgacggctactccatgcctcgggagggatcgacaagcaagcagatgccccccagtgatgctgaaggtgacccgctgatgaacatgctgatgaggctgcaggaggcagccaactactccagcccccagagctatgacagcgactccaacagcaacagccatcacgatgacatcttggactcctctttggagtccactctgtgacaggggcccggagcccagcgccctcctcttctcctcaccgcattccacctgcatcccccacatcaccctgaagatgacttcctgagccagcccccagccacagccttagagctgcgggaacaccgagaccccccgtccttcagcctcgacctgggtgcaggcatcccgggccagctgcctgcggaccgcttccttccacagcgagaactgcactaccttctgttgtactttaattattgttttgccttgttgctgtgacctccctaagacactgaagatacttctcgggaaaggatcatcgccgttgaaatgaaaagagagacagagagaaaaaaaaaaagagaacccacatgaagctctgaaaccaaacagcatcctgccatgagcttcccagagacagaagagactggagcaaagtcggaaacacagagaagcacggcttcccctcagcacagaccctccagactgggtctcagagccgtgccacccaccctcccacacagccggccacagggagaactggtgctaaccagggtgcttgctttggtcacgttcaacgcactacagagctacgacacagggaaaccttaggagcaaataaaccgtgctttcatgttttttaaatggtgctttccttacccgagaggtattttgcctgttccaatcaaaccaccccattcaggtccatcagcctctgattaatatccgtgagagtgagtgacggagtgagagtgtgagcgagtggatgtggctgtcagtgcagaacagcatgtgtctctttccttctgatatatgaatgaatcaggtttttttttttttttttctgcaaacactgtgtatagtgagacttgttctactttggagaacaggttaccttttgaaaatgaggttgagtttcttcctttctgatgcattgatttttgaagatttttttttcccccttcccctcttggtcagaatcaatcctttggtgaaagtaagaaccgcaggagttgagttttggtttggtcctgctcagttttggtttttagttgtccatcctcacagtcctacacactcgcctcctcctgctagggctgggggtatctgtgtcctttaaaatggatgaggacctggtcctcgacatgtgggtgagccatggaccttgccttcccttctcgtccttgagggtttagaacacacaccaacacctccagcgtccccgccccagcttccggtggggtgatgcggtcaccctgcaaaagacttgcactttcctcagaaccaacatgacgcagctcaataagggtgagggtcactccctcccagaagccccgtctggacgagccttgcctgacctcttcggtgctgaccttcccaaagtgatgccttactggttttgtactaactgtgttcattttacataagtgtcgtgcctgcctggggtttgttttttttgtcattgttttccccattgaaacaaacagggctaaaaagtcatctgttcattaggagaactcaagttgctgtgacttttctcatccaaaagactcatttgtgtggatgcgtgaccatgggaaaaagaaaaaaaaaaagatccattttttaggttcttttcggtctccagctgacaacccaactggacaatgatctgtctggtgcaggagaaggcaaaagtttctacaagtctacatgaccttgctgatacttgttctaatagaaacccagtctgctgtgtcttcaacatactggtattttcattacaaagtatggtaaatttttgagttgtttgtttctgttttgtaaagagaatccttattggacaccagtgaaggtgtctctgttttaatgatcagggtttttattccatcttttgcatttcttctatttctgaaggtttgtctcttggcatctttttttagtttcttaccataagagtttgacccgaaactgctcacttcacattggatgacaccatgttcttcctctttgaaaagaaaaggggaatgtgtcccactagtgaaaggaaaacttttcaacactatccctgctttagtctcagcaaactcagactattctgcttagccttcattagtcatctgggtgtgagtgtgtcttgttctgtttttctttttaataaaacttttaaaccatatatttagcctgtgaccaggggggccaaaccctaagatttctggtaaacctgaagggtggccctcctcagacaatttatctcccagcaatgaccctactacactcgcgtactgtgaatttgggaggaggtaaagttgacttctcctcgtgggcagttttccaatcaccttgtgagtagacacctgccaatattgtttgaaacctttttttaatatgacatcctctcttgtcattctcttctcccctttcccacagacttccctcctgggtccaggttcagaaccaagacttctgtacctagtgctgcctgattggtgaacattgacttcaagtagcatagcccttgtgtgactcacaactccgtgtccttcctaaagtttcgggaagcagggttgtctaatatgcacatttcttattttggtcatatttttactttagtgtcactcaccttttacaaagtgactttgtactcatttagggctctatcggaaatgcttccattttgccttttctacagttaggccaattttgaaatatataaattctatgcaacatttatgttgagttaccaatggaagccaaaagttctcttcccaaactgccaagaatgatacaggccataattgaaatgggaataccttttaagtttcattaggggtggggtgggagtgggacaggaacaagacttgcctagatctttgttgtatcttggggacttttactttgttgtttgatgcttaaacttcaaaattctctgtattcaaatttgattgtggcgaatctacttcaaaaaggaaaaataatccaactttgtggatattaaatggaaggtttgctgttttgatctagttgtttccagtggagcagttttatgaaatatgttctataagatgtacattttttcattgtaacatagaaattgtaaataattgattaaagtgctgcattttgatgaattttttctagccatttttaaagagaaaactaggaattgagtattttgtgtacggtatgtttccatcctccctccccttcctcctcccctcctctctctctcttcctacctatttaattttcatttgtcatgaggtttttggatttgccaatgatctgctggacatcatgccccatgtcatagagaataaagctgatgattgtaccagtcttaaattattcatgattcaataaaattgatgcttatttattcaga

SEQ ID NO: 20803 - protein, 1493 aa, Homo sapiens; identical to SEQ ID NO: 20801

SEQ ID NO: 20804 - DNA, 853 bp, Homo sapiens
agaaatcttacaggcaaaggctattcgacatttgggattcctaagctaatctttttatttttggaagggtgtctttctgagaaaggcagccagaggcacagcaccaacctttctgacagtgtggtcttcacactgttagttctgacaaagggagtcaaggagtcgtccttggaggaggcgatgaggccagtggaagaattgtggctggggacccctccactgctgagggagatgtcgatggactcacagctggtgtggaggctgctgacagactgaaagcccaggccatccttgctaactgcggaggagctgctggcgttggtgccccagggccaagacagccccggcctcttaccagttcctggggtcttcagtgcgcctgccggggctgaaggcttcgtccttggcatggtgatgcccacctgagctgtcatgcctcgccgccatgagcctgtctgggagatgacaggattcttcttgcccgacgtgcttttgtcggactcgtcagacacatcagaaggattccgcctccacttggaacctggctccatttttatgccgctgtctgagcctccgtctgatttcttgacatcatcaccagaccacagggaattcctctccacctgtgagtgcttctcagcatcagtctgtggacagagactctctgaattagtccttccccagtcccaggctgggaagcccctcactccaaaggcaaaaatgccaaaacactggagtagttaagggaaaaataagcattactttaaagatgtttggacttttgtactctggttatcttgttagaaagactgattttttttttttggaaaaaaaaataaaaaagtaaataata

SEQ ID NO: 20805 - protein, 103 aa, Homo sapiens
MPRRHEPVWEMTGFFLPDVLLSDSSDTSEGFRLHLEPGSIFMPLSEPPSDFLTSSPDHREFLSTCECFSASVCGQRLSELVLPQSQAGKPLTPKAKMPKHWSS

SEQ ID NO: 20806 - DNA, 2653 bp, Homo sapiens
agcaagtgcccatcgccacagctgaaaacatgaaaaattcggtggtcatctccaatcctcatgccaccatgactcagcaaggtaacctagactccccgtcaggcagtggcgtcctgagcagtgggagcagcagtcctctctacagcaagaatgtggacctcaaccagtctccgctagcctccagccccagctcagcccactcggccccttccaacagcctcacctggggcaccaacgccagcagctcctccgcagttagcaaggatggcctgggctttcagtctgtcagcagcctccacaccagctgtgagtccatcgacatctccctcagcagtggaggggtccccagccacaattcttccactggcctcatcgcctcctccaaggacgactccttgactccctttgtcagaactaacagtgtgaagaccacactgtcagaaagccatggaccttgccttcccttctcgtccttgagggtttagaacacacaccaacacctccagcgtccccgccccagcttccggtggggtgatgcggtcaccctgcaaaagacttgcactttcctcagaaccaacatgacgcagctcaataagggtgagggtcactccctcccagaagccccgtctggacgagccttgcctgacctcttcggtgctgaccttcccaaagtgatgccttactggttttgtactaactgtgttcattttacataagtgtcgtgcctgcctggggtttgttttttttgtcattgttttccccattgaaacaaacagggctaaaaagtcatctgttcattaggagaactcaagttgctgtgacttttctcatccaaaagactcatttgtgtggatgcgtgaccatgggaaaaagaaaaaaaaaaagatccattttttaggttcttttcggtctccagctgacaacccaactggacaatgatctgtctggtgcaggagaaggcaaaagtttctacaagtctacatgaccttgctgatacttgttctaatagaaacccagtctgctgtgtcttcaacatactggtattttcattacaaagtatggtaaatttttgagttgtttgtttctgttttgtaaagagaatccttattggacaccagtgaaggtgtctctgttttaatgatcagggtttttattccatcttttgcatttcttctatttctgaaggtttgtctcttggcatctttttttagtttcttaccataagagtttgacccgaaactgctcacttcacattggatgacaccatgttcttcctctttgaaaagaaaaggggaatgtgtcccactagtgaaaggaaaacttttcaacactatccctgctttagtctcagcaaactcagactattctgcttagccttcattagtcatctgggtgtgagtgtgtcttgttctgtttttctttttaataaaacttttaaaccatatatttagcctgtgaccaggggggccaaaccctaagatttctggtaaacctgaagggtggccctcctcagacaatttatctcccagcaatgaccctactacactcgcgtactgtgaatttgggaggaggtaaagttgacttctcctcgtgggcagttttccaatcaccttgtgagtagacacctgccaatattgtttgaaacctttttttaatatgacatcctctcttgtcattctcttctcccctttcccacagacttccctcctgggtccaggttcagaaccaagacttctgtacctagtgctgcctgattggtgaacattgacttcaagtagcatagcccttgtgtgactcacaactccgtgtccttcctaaagtttcgggaagcagggttgtctaatatgcacatttcttattttggtcatatttttactttagtgtcactcaccttttacaaagtgactttgtactcatttagggctctatcggaaatgcttccattttgccttttctacagttaggccaattttgaaatatataaattctatgcaacatttatgttgagttaccaatggaagccaaaagttctcttcccaaactgccaagaatgatacaggccataattgaaatgggaataccttttaagtttcattaggggtggggtgggagtgggacaggaacaagacttgcctagatctttgttgtatcttggggacttttactttgttgtttgatgcttaaacttcaaaattctctgtattcaaatttgattgtggcgaatctacttcaaaaaggaaaaataatccaactttgtggatattaaatggaaggtttgctgttttgatctagttgtttccagtggagcagttttatgaaatatgttctataagatgtacattttttcattgtaacatagaaattgtaaataattgattaaagtgctgcattttgatgaattttttctagccatttttaaagagaaaactaggaattgagtattttgtgtacggtatgtttccatcctccctccccttcctcctcccctcctctctctctcttcctacctatttaattttcatttgtcatgaggtttttggatttgccaatgatctgctggacatcatgccccatgtcatagagaataaagctgatgattgtaccagtcttaaattattcatgattcaataaaattgatgcttatttattcaga

SEQ ID NO: 20807 - protein, 151 aa, Homo sapiens
MKNSVVISNPHATMTQQGNLDSPSGSGVLSSGSSSPLYSKNVDLNQSPLASSPSSAHSAPSNSLTWGTNASSSSAVSKDGLGFQSVSSLHTSCESIDISLSSGGVPSHNSSTGLIASSKDDSLTPFVRTNSVKTTLSESHGPCLPFSSLRV

SEQ ID NO: 20808 - DNA, 2278 bp, Homo sapiens
cccgctgccatagcaccacgctggtgctctctcatggccaggatgtgggaggggctgttcacctcggttgtgctagattgcattgctgcctgattgacatcaccaaacaccccttgccccatattgaatctcagttgactccacctctcctgcctgggcccttagaggtggatgtgaaggtgtctcctgggctaggacccccggctcatttccactggccattctatgggcatctctgagggagatctattgaaagtgggtctgtatgtaattaccagagaaatgttgactcctccagcacactgagagcatggctcacctctgcatttaggctgtcctggtcttgttcatgctttcccctaattatccctcaagtccatcgtcctcctctttccccctatcactgccccatcatcacccagcacaccattgccatcacctagctggtacgtctgcttgcagctttccccctgcactctgtagccaatcctctgcactgtggcagccagaccagagtgagcattctagagtacacatctgaccatagaactctcgtgcttaaagtccttcagtagctccagctccctatggcctgcaggatgaaatccagactccgttggttggcaggtcaagtatgaacttcagctacactaaacctctggtagtttccccaaacatccatgctatttcccatgcctttgcaaaggctgcagcatcaccccactcctgaccccaacaactgctcctgcctttccttatgttgctgcccattatctgtccagtctcagcccagacatcccctcctctaaggagccttccctgattcccttaggcttcatcatatttcatttctttctttgcctgtctgcctcctccaccagactgtgagctcctgggaaccaggacggtgtcttagtcatagtgatagttccatagcctagcaccgggcctgacatcaagcacaagaggcagtttgtctcagtggttagagcctagcctctggagccaggcttcttggttctcatcttagctcttcaattaactagctgtttgatcctggaaaagttacatgacctgtctgttcctcagcatttctgtccgtaaaacggaggtggagataatatctatgttagagggttggtatcaggaactgtgagttaatacatagttacaatgtttagaagagtgttcggtgcatagctaatccaatttgttgcattagcatatacaccttctgtttctaacgtgctttggttcctgaggtcagccatcatttggatcaccatcatcagcttgaaaagtgtttctgacttcctccagatgggtgctttgtgccaaccacacggagcctgtgaagggtttccttggccgattcctgaggaggaagctcatggaaacagagatcagtgggcgggtgcgcaatatggagctggtaaaaatcattgactggattcccaaggtctggcatcacctcaaccgcttcctggaggctcacagttcctcggacgtcaccatcggcccccggctcttcctgtcatgccccatcgatgtggacggctcgagagtgtggttcaccgacttgtggaactattccattatcccctatctcctggaagccgtcagagaaggactccagctctatggaaggcgcgccccctgggaggatcctgccaagtgggtgatggacacatatccatgggcagccagcccacaacagcacgagtggcctcccctgctgcagttacggcctgaggatgtcggcttcgacggctactccatgcctcgggagggatcgacaagcaagcagatgccccccagtgatgctgaaggtgacccgctgatgaacatgctgatgaggctgcaggaggcagccaactactccagcccccagagctatgacagcgactccaacagcaacagccatcacgatgacatcttggactcctctttggagtccactctgtgacaggggcccggagcccagcgccctcctcttctcctcaccgcattccacctgcatcccccacatcaccctgaagatgacttcctgagccagcccccagccacagccttagagctgcgggaacaccgagaccccccgtccttcagcctcgacctgggtgcaggcatcccgggccagctgcctgcggaccgcttccttccacagcgagaactgcactaccttctgttgtactttaattattgttttgccttgttgctgtgacctccctaagacactgaagatacttctcgggaaaggatcatcgccgttgaaatg

SEQ ID NO: 20809 - protein, 191 aa, Homo sapiens [sequence omitted]

SEQ ID NO: 20810 - DNA, 5309 bp, Homo sapiens
cccgctgccatagcaccacgctggtgctctctcatggccaggatgtgggaggggctgttcacctcggttgtgctagattgcattgctgcctgattgacatcaccaaacaccccttgccccatattgaatctcagttgactccacctctcctgcctgggcccttagaggtggatgtgaaggtgtctcctgggctaggacccccggctcatttccactggccattctatgggcatctctgagggagatctattgaaagtgggtctgtatgtaattaccagagaaatgttgactcctccagcacactgagagcatggctcacctctgcatttaggctgtcctggtcttgttcatgctttcccctaattatccctcaagtccatcgtcctcctctttccccctatcactgccccatcatcacccagcacaccattgccatcacctagctggtacgtctgcttgcagctttccccctgcactctgtagccaatcctctgcactgtggcagccagaccagagtgagcattctagagtacacatctgaccatagaactctcgtgcttaaagtccttcagtagctccagctccctatggcctgcaggatgaaatccagactccgttggttggcaggtcaagtatgaacttcagctacactaaacctctggtagtttccccaaacatccatgctatttcccatgcctttgcaaaggctgcagcatcaccccactcctgaccccaacaactgctcctgcctttccttatgttgctgcccattatctgtccagtctcagcccagacatcccctcctctaaggagccttccctgattcccttaggcttcatcatatttcatttctttctttgcctgtctgcctcctccaccagactgtgagctcctgggaaccaggacggtgtcttagtcatagtgatagttccatagcctagcaccgggcctgacatcaagcacaagaggcagtttgtctcagtggttagagcctagcctctggagccaggcttcttggttctcatcttagctcttcaattaactagctgtttgatcctggaaaagttacatgacctgtctgttcctcagcatttctgtccgtaaaacggaggtggagataatatctatgttagagggttggtatcaggaactgtgagttaatacatagttacaatgtttagaagagtgttcggtgcatagctaatccaatttgttgcattagcatatacaccttctgtttctaacgtgctttggttcctgaggtcagccatcatttggatcaccatcatcagcttgaaaagtgtttctgacttcctccagatgggtgctttgtgccaaccacacggagcctgtgaagggtttccttggccgattcctgaggaggaagctcatggaaacagagatcagtgggcgggtgcgcaatatggagctggtaaaaatcattgactggattcccaaggtctggcatcacctcaaccgcttcctggaggctcacagttcctcggacgtcaccatcggcccccggctcttcctgtcatgccccatcgatgtggacggctcgagagtgtggttcaccgacttgtggaactattccattatcccctatctcctggaagccgtcagagaaggactccagctctatggaaggcgcgccccctgggaggatcctgccaagtgggtgatggacacatatccatgggcagccagcccacaacagcacgagtggcctcccctgctgcagttacggcctgaggatgtcggcttcgacggctactccatgcctcgggagggatcgacaagcaagcagatgccccccagtgatgctgaaggtgacccgctgatgaacatgctgatgaggctgcaggaggcagccaactactccagcccccagagctatgacagcgactccaacagcaacagccatcacgatgacatcttggactcctctttggagtccactctgtgacaggggcccggagcccagcgccctcctcttctcctcaccgcattccacctgcatcccccacatcaccctgaagatgacttcctgagccagcccccagccacagccttagagctgcgggaacaccgagaccccccgtccttcagcctcgacctgggtgcaggcatcccgggccagctgcctgcggaccgcttccttccacagcgagaactgcactaccttctgttgtactttaattattgttttgccttgttgctgtgacctccctaagacactgaagatacttctcgggaaaggatcatcgccgttgaaatgaaaagagagacagagagaaaaaaaaaaagagaacccacatgaagctctgaaaccaaacagcatcctgccatgagcttcccagagacagaagagactggagcaaagtcggaaacacagagaagcacggcttcccctcagcacagaccctccagactgggtctcagagccgtgccacccaccctcccacacagccggccacagggagaactggtgctaaccagggtgcttgctttggtcacgttcaacgcactacagagctacgacacagggaaaccttaggagcaaataaaccgtgctttcatgttttttaaatggtgctttccttacccgagaggtattttgcctgttccaatcaaaccaccccattcaggtccatcagcctctgattaatatccgtgagagtgagtgacggagtgagagtgtgagcgagtggatgtggctgtcagtgcagaacagcatgtgtctctttccttctgatatatgaatgaatcaggtttttttttttttttttctgcaaacactgtgtatagtgagacttgttctactttggagaacaggttaccttttgaaaatgaggttgagtttcttcctttctgatgcattgatttttgaagatttttttttcccccttcccctcttggtcagaatcaatcctttggtgaaagtaagaaccgcaggagttgagttttggtttggtcctgctcagttttggtttttagttgtccatcctcacagtcctacacactcgcctcctcctgctagggctgggggtatctgtgtcctttaaaatggatgaggacctggtcctcgacatgtgggtgagccatggaccttgccttcccttctcgtccttgagggtttagaacacacaccaacacctccagcgtccccgccccagcttccggtggggtgatgcggtcaccctgcaaaagacttgcactttcctcagaaccaacatgacgcagctcaataagggtgagggtcactccctcccagaagccccgtctggacgagccttgcctgacctcttcggtgctgaccttcccaaagtgatgccttactggttttgtactaactgtgttcattttacataagtgtcgtgcctgcctggggtttgttttttttgtcattgttttccccattgaaacaaacagggctaaaaagtcatctgttcattaggagaactcaagttgctgtgacttttctcatccaaaagactcatttgtgtggatgcgtgaccatgggaaaaagaaaaaaaaaaagatccattttttaggttcttttcggtctccagctgacaacccaactggacaatgatctgtctggtgcaggagaaggcaaaagtttctacaagtctacatgaccttgctgatacttgttctaatagaaacccagtctgctgtgtcttcaacatactggtattttcattacaaagtatggtaaatttttgagttgtttgtttctgttttgtaaagagaatccttattggacaccagtgaaggtgtctctgttttaatgatcagggtttttattccatcttttgcatttcttctatttctgaaggtttgtctcttggcatctttttttagtttcttaccataagagtttgacccgaaactgctcacttcacattggatgacaccatgttcttcctctttgaaaagaaaaggggaatgtgtcccactagtgaaaggaaaacttttcaacactatccctgctttagtctcagcaaactcagactattctgcttagccttcattagtcatctgggtgtgagtgtgtcttgttctgtttttctttttaataaaacttttaaaccatatatttagcctgtgaccaggggggccaaaccctaagatttctggtaaacctgaagggtggccctcctcagacaatttatctcccagcaatgaccctactacactcgcgtactgtgaatttgggaggaggtaaagttgacttctcctcgtgggcagttttccaatcaccttgtgagtagacacctgccaatattgtttgaaacctttttttaatatgacatcctctcttgtcattctcttctcccctttcccacagacttccctcctgggtccaggttcagaaccaagacttctgtacctagtgctgcctgattggtgaacattgacttcaagtagcatagcccttgtgtgactcacaactccgtgtccttcctaaagtttcgggaagcagggttgtctaatatgcacatttcttattttggtcatatttttactttagtgtcactcaccttttacaaagtgactttgtactcatttagggctctatcggaaatgcttccattttgccttttctacagttaggccaattttgaaatatataaattctatgcaacatttatgttgagttaccaatggaagccaaaagttctcttcccaaactgccaagaatgatacaggccataattgaaatgggaataccttttaagtttcattaggggtggggtgggagtgggacaggaacaagacttgcctagatctttgttgtatcttggggacttttactttgttgtttgatgcttaaacttcaaaattctctgtattcaaatttgattgtggcgaatctacttcaaaaaggaaaaataatccaactttgtggatattaaatggaaggtttgctgttttgatctagttgtttccagtggagcagttttatgaaatatgttctataagatgtacattttttcattgtaacatagaaattgtaaataattgattaaagtgctgcattttgatgaattttttctagccatttttaaagagaaaactaggaattgagtattttgtgtacggtatgtttccatcctccctccccttcctcctcccctcctctctctctcttcctacctatttaattttcatttgtcatgaggtttttggatttgccaatgatctgctggacatcatgccccatgtcatagagaataaagctgatgattgtaccagtcttaaattattcatgattcaataaaattgatgcttatttattcaga

SEQ ID NO: 20811 - protein, 191 aa, Homo sapiens [sequence omitted]

SEQ ID NO: 20812 - DNA, 1263 bp, Homo sapiens
agaagagaatgacaagagaggatgtcatattaaaaaaaggtttcaaacaatattggcagggatagtgttgaaaagttttcctttcactagtgggacacattccccttttcttttcaaagaggaagaacatggtgtcatccaatgtgaagtgagcagtttcgggtcaaactcttatggtaagaaactaaaaaaagatgccaagagacaaaccttcagaaatagaagaaatgcaaaagatggaataaaaaccctgatcattaaaacagagacaccttcactggtgtccaataaggattctctttacaaaacagaaacaaacaactcaaaaatttaccatactttgtaatgaaaataccagtatgttgaagacacagcagactgggtttctattagaacaagtatcagcaaggtcatgtagacttgtagaaacttttgccttctcctgcaccagacagatcattgtccagttgggttgtcagctggagaccgaaaagaacctaaaaaatggatctttttttttttctttttcccatggtcacgcatccacacaaatgagtcttttggatgagaaaagtcacagcaacttgagttctcctaatgaacagatgactttttagccctgtttgtttcaatggggaaaacaatgacaaaaaaaacaaaccccaggcaggcacgacacttatgtaaaatgaacacagttagtacaaaaccagtaaggcatcactttgggaaggtcagcaccgaagaggtcaggcaaggctcgtccagacggggcttctgggagggagtgaccctcacccttattgagctgcgtcatgttggttctgaggaaagtgcaagtcttttgcagggtgaccgcatcaccccaccggaagctggggcggggacgctggaggtgttggtgtgtgttctaaaccctcaaggacgagaagggaaggcaaggtccatggctcacccacatgtcgaggaccaggtcctcatccattttaaaggacacagatacccccagccctagcaggaggaggcgagtgtgtaggactgtgaggatggacaactaaaaaccaaaactgagcaggaccaaaccaaaactcaactcctgcggttcttactttcaccaaaggattgattctgaccaagaggggaagggggaaaaaaaaatcttcaaaaatcaatgcatcagaaaggaagaaactcaacctcattttcaaaaggtaacctgttctccaaagtagaacaagtctcactatacacagtgtttgcaga

SEQ ID NO: 20813 - protein, 127 aa, Homo sapiens [sequence omitted]

SEQ ID NO: 20814 - DNA, 1482 bp, Homo sapiens
atgaagcctgtcgacggacaggaaacggtgaaaactacaccccggcaaatgccccaacagggaaggaggagctgggaagggctcacgctggcttcaagttcttaccgttcccccctccaaaaaaaaacaaaatccaagttgattttggcaaatatagactctattctgatcatccggaagacttggacaagcgcttcaccgggctgtgagtttcaacttaaactgccgagagctccctgtgtttggagaacggccagcatagcactcacagcctttggatacccttgcccgaggcagtttccggtcagcctaagctctttgcaagcggaatcctgccgctcggcagcccagcgccgctctcctccgctcctcccgcaagagagtccagagcctccggcgaatgaagctcgagtggagaactttgttgaacttcattgtcagagctgtcacttttcaaagtgctttagcgggcgggccactataaaaccatcacctcgacgagaggaccacggaggactcgcagacgcccaatccttgcagtcggcattttccggccactccagcttcctggtggaggatctgatccgcatcagccgaccccccgcctacctgccccgcagcgtgcccaccgccagcatgtcgccgcccaggcagggggcccccacggccctcaccgacacgggggcctcggacctgggctccccgggtcccggcagccgacggggcggctctccgccgactgccttctcccctgccagcgagacgacgtttctgaagtttggagtgaacgccatcctctcctcggggcccagaacagaaacatccccagccttgctccagagcgtccctcccaagaccttcgcctttccctacttcgaagggtcttttcagcctttcatcagatcttcttatttcccagcttcctccagcgtggtgcccatccccgggaccttctcctggccgctggccgcgcgcgggaagcctcggcggggcatgctgcgtcgagcagtcttctccgacgtgcagcggaaggcgctggagaagatgttccagaagcagaagtacatcagcaagcccgaccgcaagaagctggcggccaagctgggcctgaaagactcgcaggtgaaaatctggttccagaaccgacgcatgaaatggcggaactccaaggagcgcgaactcctgtctagcgggggctgtcgcgagcagaccctgcccaccaagctcaatccgcacccggacctcagcgacgtgggccagaagggccctgggaacgaagaggaggaggagggcccgggcagccccagccaccgcctggcctaccacgcgtcctccgacccccagcacctgcgggacccgcggctgccagggccgctgcccccctcgcccgcgcactcgagcagtcccgggaaaccttcggacttctcagattccgaggaggaagaggagggcgaggaacaggaggaaatcaccgtgtcctag

SEQ ID NO: 20815 - protein, 493 aa, Homo sapiens
MKPVDGQETVKTTPRQMPQQGRRSWEGLTLASSSYRSPLQKKTKSKLILANIDSILIIRKTWTSASPGCEFQLKLPRAPCVWRTASIALTAFGYPCPRQFPVSLSSLQAESCRSAAQRRSPPLLPQESPEPPANEARVENFVELHCQSCHFSKCFSGRATIKPSPRREDHGGLADAQSLQSAFSGHSSFLVEDLIRISRPPAYLPRSVPTASMSPPRQGAPTALTDTGASDLGSPGPGSRRGGSPPTAFSPASETTFLKFGVNAILSSGPRTETSPALLQSVPPKTFAFPYFEGSFQPFIRSSYFPASSSVVPIPGTFSWPLAARGKPRRGMLRRAVFSDVQRKALEKMFQKQKYISKPDRKKLAAKLGLKDSQVKIWFQNRRMKWRNSKERELLSSGGCREQTLPTKLNPHPDLSDVGQKGPGNEEEEEGPGSPSHRLAYHASSDPQHLRDPRLPGPLPPSPAHSSSPGKPSDFSDSEEEEEGEEQEEITVS

SEQ ID NO: 20816 - DNA, 740 bp, Homo sapiens
aggtcccgcccctgtgggcggggcgaggcagcgtcgccgcgaggccacccggaagaccaagccggcatggccgaaacagaagccctgtcgaagcttcgggaagacttcaggatgcagaataaatccgtctttattttgggcgccagcggagaaaccggcagagtgctcttaaaggaaatcctggagcagggcctgttttccaaagtcacgctcattggccggaggaagctcaccttcgacgaggaagcttataaaaatgtgaatcaagaagtggtggactttgaaaagttggatgactacgcctctgcctttcaaggtcatgatgttggattctgttgcctgggtaccaccagagggaaagctggggcggtaaggaaggcatatgctcttttccctttttgctggccagtaatatcaaggattcttttcttgctcactctttttctttgtgcctgttgcaatgcttaaatgtgaataagcctttattgtttaagattctatatgctgcactaacctttggtatccttttaatagtactgataagttcgtctttcaaagtaatccttgagttcaggccccagtgctggagacgtcgtaaatatttacatgattttgcctattgtgattatcgctatcactacatcccctgactaagggaaaccatgatgtctgagtaaaactaattggtttatgctgttaacaatcagctgtttttccccttaataaatgtttgaaatttg

SEQ ID NO: 20817 - protein, 133 aa, Homo sapiens
MAETEALSKLREDFRMQNKSVFILGASGETGRVLLKEILEQGLFSKVTLIGRRKLTFDEEAYKNVNQEVVDFEKLDDYASAFQGHDVGFCCLGTTRGKAGAVRKAYALFPFCWPVISRILFLLTLFLCACCNA

SEQ ID NO: 20818 - DNA, 1076 bp, Homo sapiens
aggtcccgcccctgtgggcggggcgaggcagcgtcgccgcgaggccacccggaagaccaagccggcatggccgaaacagaagccctgtcgaagcttcgggaagacttcaggatgcagaataaatccgtctttattttgggcgccagcggagaaaccggcagagtgctcttaaaggaaatcctggagcagggcctgttttccaaagtcacgctcattggccggaggaagctcaccttcgacgaggaagcttataaaaatgtgaatcaagaagtggtggactttgaaaagttggatgactacgcctctgcctttcaaggtcatgatgttggattctgttgcctgggtaccaccagagggaaagctggggcggtaaggaaggcatatgctcttttccctttttgctggccagtaatatcaaggattcttttcttgctcactctttttctttgtgcctgttgcaatgcttaaatgtgaataagcctttattgtttaagattctatatgctgcactaacctttggtatccttttaatagtactgataagttcgtctttcaaagtaatccttgagttcaggccccagtgctggagacgtcgtaaatatttacatgattttgcctattgtgattatcgctatcactacatcccctgactaagggaaaccatgatgtctgagtaaaactaattggtttatgctgttaacaatcagctgtttttccccttaataaatgtttgaaatttgaaatgttctgtctcacttgagtgatttgcttcaacttattttcatgtcaagctttaaacttctggaatagaacatcagaacacaggcacgattcaaccagcctccagcgatgactcagccttcagcgatgattcaaccccactaatgattcagtctttactgacgcaaaagtcttttaacgcacattttattttctttttaatggtgttctaaattgagtcagctcctgtacagaagtcatagtttactacatagttagaaatcagagtttactacctggattctgggcaaatgttagtgcgggtacatcttatttaatttatactttgactatag

SEQ ID NO: 20819 - protein, 133 aa, Homo sapiens; identical to SEQ ID NO: 20817

SEQ ID NO: 20820 - DNA, 1337 bp, Homo sapiens
gccgcgaggccacccggaagaccaagccggcatggccgaaacagaagccctgtcgaagcttcgggaagacttcaggatgcagaataaatccgtctttattttgggcgccagcggagaaaccggcagagtgctcttaaaggaaatcctggagcagggcctgttttccaaagtcacgctcattggccggaggaagctcaccttcgacgaggaagcttataaaaatgtgaatcaagaagtggtggactttgaaaagttggatgactacgcctctgcctttcaaggtcatgatgttggattctgttgcctgggtaccaccagagggaaagctggggcggagggatttgttcgtgttgaccgagattatgtgctgaagtctgcagagctggcaaaagctggagggtgcaaacatttcaacttgctatcctctaaaggagctgataaatcaagcaattttttatatctacaagttaagggagaagtagaagccaaggttgaagaattaaaatttgatcgttactctgtatttaggcctggagttctgttatgtgataggcaagaatctcgcccaggtgaatggctggttagaaagttctttggctccttaccagactcttgggccagtgggcattctgtgcctgtggtgaccgtggttagagcaatgctgaacaatgtggtgagaccaagagacaagcagatggaactgctggagaacaaggccatccatgacctggggaaagcgcatggctctctcaagccatgaccacattggagaaatggtttttattgtcaaccttaacacccatcaccaaatcggtaatttcagggtctaaaaaaagtcagcatgttttaactttgttgttttactatcctcaggcatccattccaatcaagaaatgatggtgctctgcatcagtggttcagagcctggttatacatatagatcactcagggagctttggaaaaataaagatttgtcagccctatctcaaacttgaatcaaaatttctggggtgtgggcacaataatctgtaattttctttgtttatacttcccctgatgccactggttccgatgccactggctggggggcctgctttgaaatgcttgtctgcagagtcacagcagccatgaaaaccttatgaccgtgcaaatgagctctgctctaaaattgttgacattcatgtctctgagttacaaaagtgctaattcactacatgtaattgtgtaagtaaacattgtgcctttactacttctttatgtaatagaagttatatacctaagcttatataatacatggggaggattaaataaaggaataaagatgaatggacaactcc

SEQ ID NO: 20821 - protein, 242 aa, Homo sapiens
MAETEALSKLREDFRMQNKSVFILGASGETGRVLLKEILEQGLFSKVTLIGRRKLTFDEEAYKNVNQEVVDFEKLDDYASAFQGHDVGFCCLGTTRGKAGAEGFVRVDRDYVLKSAELAKAGGCKHFNLLSSKGADKSSNFLYLQVKGEVEAKVEELKFDRYSVFRPGVLLCDRQESRPGEWLVRKFFGSLPDSWASGHSVPVVTVVRAMLNNVVRPRDKQMELLENKAIHDLGKAHGSLKP

SEQ ID NO: 20822 - DNA, 1423 bp, Homo sapiens
gccgcgaggccacccggaagaccaagccggcatggccgaaacagaagccctgtcgaagcttcgggaagacttcaggatgcagaataaatccgtctttattttgggcgccagcggagaaaccggcagagtgctcttaaaggaaatcctggagcagggcctgttttccaaagtcacgctcattggccggaggaagctcaccttcgacgaggaagcttataaaaatgtgaatcaagaagtggtggactttgaaaagttggatgactacgcctctgcctttcaaggtcatgatgttggattctgttgcctgggtaccaccagagggaaagctggggcggagggatttgttcgtgttgaccgagattatgtgctgaagtctgcagagctggcaaaagctggagggtgcaaacatttcaacttgctatcctctaaaggagctgataaatcaagcaattttttatatctacaagttaagggagaagtagaagccaaggttgaagaattaaaatttgatcgttactctgtatttaggcctggagttctgttatgtgataggcaagaatctcgcccaggtgaatggctggttagaaagttctttggctccttaccagactcttgggccagtgggcattctgtgcctgtggtgaccgtggttagagcaatgctgaacaatgtggtgagaccaagagacaagcagatggaactgctggagaacaaggccatccatgacctggggaaagcgcatggctctctcaagccatgaccacattggagaaatggtttttattgtcaaccttaacacccatcaccaaatcggtaatttcagggtctaaaaaaagtcagcatgttttaactttgttgttttactatcctcaggcatccattccaatcaagaaatgatggtgctctgcatcagtggttcagagcctggttatacatatagatcactcagggagctttggaaaaataaagatttgtcagccctatctcaaacttgaatcaaaatttctggggtgtgggcacaataatctgtaattttctttgtttatacttcccctgatgccactggttccgatgccactggctggggggcctgctttgaaatgcttgtctgcagagtcacagcagccatgaaaaccttatgaccgtgcaaatgagctctgctctaaaattgttgacattcatgtctctgagttacaaaagtgctaattcactacatgtaattgtgtaagtaaacattgtgcctttactacttctttatgtaatagaagttatatacctaagcttatataatacatggggaggattaaataaaggaataaagatgaatggacaactcctgggtgcctcttagattgcttgaaaatgcccatgtagtgtgatatgcagcatttcagcctatggggtgatataatagcagctaata

SEQ ID NO: 20823 - protein, 242 aa, Homo sapiens; identical to SEQ ID NO: 20821

SEQ ID NO: 20824 - DNA, 1371 bp, Homo sapiens
ggaagaccaagccgggtaggcgctgtctccgtcgcctccaacccccccggtccgaccagggaagcatggccgaaacagaagccctgtcgaagcttcgggaagacttcaggatgcagaataaatccgtctttattttgggcgccagcggagaaaccggcagagtgctcttaaaggaaatcctggagcagggcctgttttccaaagtcacgctcattggccggaggaagctcaccttcgacgaggaagcttataaaaatgtgaatcaagaagtggtggactttgaaaagttggatgactacgcctctgcctttcaaggtcatgatgttggattctgttgcctgggtaccaccagagggaaagctggggcggagggatttgttcgtgttgaccgagattatgtgctgaagtctgcagagctggcaaaagctggagggtgcaaacatttcaacttgctatcctctaaaggagctgataaatcaagcaattttttatatctacaagttaagggagaagtagaagccaaggttgaagaattaaaatttgatcgttactctgtatttaggcctggagttctgttatgtgataggcaagaatctcgcccaggtgaatggctggttagaaagttctttggctccttaccagactcttgggccagtgggcattctgtgcctgtggtgaccgtggttagagcaatgctgaacaatgtggtgagaccaagagacaagcagatggaactgctggagaacaaggccatccatgacctggggaaagcgcatggctctctcaagccatgaccacattggagaaatggtttttattgtcaaccttaacacccatcaccaaatcggtaatttcagggtctaaaaaaagtcagcatgttttaactttgttgttttactatcctcaggcatccattccaatcaagaaatgatggtgctctgcatcagtggttcagagcctggttatacatatagatcactcagggagctttggaaaaataaagatttgtcagccctatctcaaacttgaatcaaaatttctggggtgtgggcacaataatctgtaattttctttgtttatacttcccctgatgccactggttccgatgccactggctggggggcctgctttgaaatgcttgtctgcagagtcacagcagccatgaaaaccttatgaccgtgcaaatgagctctgctctaaaattgttgacattcatgtctctgagttacaaaagtgctaattcactacatgtaattgtgtaagtaaacattgtgcctttactacttctttatgtaatagaagttatatacctaagcttatataatacatggggaggattaaataaaggaataaagatgaatggacaactcc

SEQ ID NO: 20825 - protein, 242 aa, Homo sapiens; identical to SEQ ID NO: 20821

SEQ ID NO: 20826 - DNA, 1485 bp, Homo sapiens
ggaagaccaagccgggtaggcgctgtctccgtcgcctccaacccccccggtccgaccagggaaggtgggatgctctgatggccgggcctgcggcgctgagcgcggcggcggcggctgctctggcggccgccctgctcctgctgcgtcgtgaggacccggggccgggggctggccccagcatggccgaaacagaagccctgtcgaagcttcgggaagacttcaggatgcagaataaatccgtctttattttgggcgccagcggagaaaccggcagagtgctcttaaaggaaatcctggagcagggcctgttttccaaagtcacgctcattggccggaggaagctcaccttcgacgaggaagcttataaaaatgtgaatcaagaagtggtggactttgaaaagttggatgactacgcctctgcctttcaaggtcatgatgttggattctgttgcctgggtaccaccagagggaaagctggggcggagggatttgttcgtgttgaccgagattatgtgctgaagtctgcagagctggcaaaagctggagggtgcaaacatttcaacttgctatcctctaaaggagctgataaatcaagcaattttttatatctacaagttaagggagaagtagaagccaaggttgaagaattaaaatttgatcgttactctgtatttaggcctggagttctgttatgtgataggcaagaatctcgcccaggtgaatggctggttagaaagttctttggctccttaccagactcttgggccagtgggcattctgtgcctgtggtgaccgtggttagagcaatgctgaacaatgtggtgagaccaagagacaagcagatggaactgctggagaacaaggccatccatgacctggggaaagcgcatggctctctcaagccatgaccacattggagaaatggtttttattgtcaaccttaacacccatcaccaaatcggtaatttcagggtctaaaaaaagtcagcatgttttaactttgttgttttactatcctcaggcatccattccaatcaagaaatgatggtgctctgcatcagtggttcagagcctggttatacatatagatcactcagggagctttggaaaaataaagatttgtcagccctatctcaaacttgaatcaaaatttctggggtgtgggcacaataatctgtaattttctttgtttatacttcccctgatgccactggttccgatgccactggctggggggcctgctttgaaatgcttgtctgcagagtcacagcagccatgaaaaccttatgaccgtgcaaatgagctctgctctaaaattgttgacattcatgtctctgagttacaaaagtgctaattcactacatgtaattgtgtaagtaaacattgtgcctttactacttctttatgtaatagaagttatatacctaagcttatataatacatggggaggattaaataaaggaataaagatgaatggacaactcc

SEQ ID NO: 20827 - protein, 276 aa, Homo sapiens
MAGPAALSAAAAAALAAALLLLRREDPGPGAGPSMAETEALSKLREDFRMQNKSVFILGASGETGRVLLKEILEQGLFSKVTLIGRRKLTFDEEAYKNVNQEVVDFEKLDDYASAFQGHDVGFCCLGTTRGKAGAEGFVRVDRDYVLKSAELAKAGGCKHFNLLSSKGADKSSNFLYLQVKGEVEAKVEELKFDRYSVFRPGVLLCDRQESRPGEWLVRKFFGSLPDSWASGHSVPVVTVVRAMLNNVVRPRDKQMELLENKAIHDLGKAHGSLKP

SEQ ID NO: 20828 - DNA, 1457 bp, Homo sapiens
ggaagaccaagccgggtaggcgctgtctccgtcgcctccaacccccccggtccgaccagggaagcatggccgaaacagaagccctgtcgaagcttcgggaagacttcaggatgcagaataaatccgtctttattttgggcgccagcggagaaaccggcagagtgctcttaaaggaaatcctggagcagggcctgttttccaaagtcacgctcattggccggaggaagctcaccttcgacgaggaagcttataaaaatgtgaatcaagaagtggtggactttgaaaagttggatgactacgcctctgcctttcaaggtcatgatgttggattctgttgcctgggtaccaccagagggaaagctggggcggagggatttgttcgtgttgaccgagattatgtgctgaagtctgcagagctggcaaaagctggagggtgcaaacatttcaacttgctatcctctaaaggagctgataaatcaagcaattttttatatctacaagttaagggagaagtagaagccaaggttgaagaattaaaatttgatcgttactctgtatttaggcctggagttctgttatgtgataggcaagaatctcgcccaggtgaatggctggttagaaagttctttggctccttaccagactcttgggccagtgggcattctgtgcctgtggtgaccgtggttagagcaatgctgaacaatgtggtgagaccaagagacaagcagatggaactgctggagaacaaggccatccatgacctggggaaagcgcatggctctctcaagccatgaccacattggagaaatggtttttattgtcaaccttaacacccatcaccaaatcggtaatttcagggtctaaaaaaagtcagcatgttttaactttgttgttttactatcctcaggcatccattccaatcaagaaatgatggtgctctgcatcagtggttcagagcctggttatacatatagatcactcagggagctttggaaaaataaagatttgtcagccctatctcaaacttgaatcaaaatttctggggtgtgggcacaataatctgtaattttctttgtttatacttcccctgatgccactggttccgatgccactggctggggggcctgctttgaaatgcttgtctgcagagtcacagcagccatgaaaaccttatgaccgtgcaaatgagctctgctctaaaattgttgacattcatgtctctgagttacaaaagtgctaattcactacatgtaattgtgtaagtaaacattgtgcctttactacttctttatgtaatagaagttatatacctaagcttatataatacatggggaggattaaataaaggaataaagatgaatggacaactcctgggtgcctcttagattgcttgaaaatgcccatgtagtgtgatatgcagcatttcagcctatggggtgatataatagcagctaata

SEQ ID NO: 20829 - protein, 242 aa, Homo sapiens; identical to SEQ ID NO: 20821

SEQ ID NO: 20830 - DNA, 1571 bp, Homo sapiens
ggaagaccaagccgggtaggcgctgtctccgtcgcctccaacccccccggtccgaccagggaaggtgggatgctctgatggccgggcctgcggcgctgagcgcggcggcggcggctgctctggcggccgccctgctcctgctgcgtcgtgaggacccggggccgggggctggccccagcatggccgaaacagaagccctgtcgaagcttcgggaagacttcaggatgcagaataaatccgtctttattttgggcgccagcggagaaaccggcagagtgctcttaaaggaaatcctggagcagggcctgttttccaaagtcacgctcattggccggaggaagctcaccttcgacgaggaagcttataaaaatgtgaatcaagaagtggtggactttgaaaagttggatgactacgcctctgcctttcaaggtcatgatgttggattctgttgcctgggtaccaccagagggaaagctggggcggagggatttgttcgtgttgaccgagattatgtgctgaagtctgcagagctggcaaaagctggagggtgcaaacatttcaacttgctatcctctaaaggagctgataaatcaagcaattttttatatctacaagttaagggagaagtagaagccaaggttgaagaattaaaatttgatcgttactctgtatttaggcctggagttctgttatgtgataggcaagaatctcgcccaggtgaatggctggttagaaagttctttggctccttaccagactcttgggccagtgggcattctgtgcctgtggtgaccgtggttagagcaatgctgaacaatgtggtgagaccaagagacaagcagatggaactgctggagaacaaggccatccatgacctggggaaagcgcatggctctctcaagccatgaccacattggagaaatggtttttattgtcaaccttaacacccatcaccaaatcggtaatttcagggtctaaaaaaagtcagcatgttttaactttgttgttttactatcctcaggcatccattccaatcaagaaatgatggtgctctgcatcagtggttcagagcctggttatacatatagatcactcagggagctttggaaaaataaagatttgtcagccctatctcaaacttgaatcaaaatttctggggtgtgggcacaataatctgtaattttctttgtttatacttcccctgatgccactggttccgatgccactggctggggggcctgctttgaaatgcttgtctgcagagtcacagcagccatgaaaaccttatgaccgtgcaaatgagctctgctctaaaattgttgacattcatgtctctgagttacaaaagtgctaattcactacatgtaattgtgtaagtaaacattgtgcctttactacttctttatgtaatagaagttatatacctaagcttatataatacatggggaggattaaataaaggaataaagatgaatggacaactcctgggtgcctcttagattgcttgaaaatgcccatgtagtgtgatatgcagcatttcagcctatggggtgatataatagcagctaata

SEQ ID NO: 20831 - protein, 276 aa, Homo sapiens; identical to SEQ ID NO: 20827

SEQ ID NO: 20832 - DNA, 731 bp, Homo sapiens
gcggccgccctgctcctgctgcgtcgtgaggacccggggccgggggctggccccagcatggccgaaacagaagccctgtcgaagcttcgggaagacttcaggatgcagaataaatccgtctttattttgggcgccagcggagaaaccggcagagtgctcttaaaggaaatcctggagcagggcctgttttccaaagtcacgctcattggccggaggaagctcaccttcgacgaggaagcttataaaaatgtgaatcaagaagtggtggactttgaaaagttggatgactacgcctctgcctttcaaggtcatgatgttggattctgttgcctgggtaccaccagagggaaagctggggcggtaaggaaggcatatgctcttttccctttttgctggccagtaatatcaaggattcttttcttgctcactctttttctttgtgcctgttgcaatgcttaaatgtgaataagcctttattgtttaagattctatatgctgcactaacctttggtatccttttaatagtactgataagttcgtctttcaaagtaatccttgagttcaggccccagtgctggagacgtcgtaaatatttacatgattttgcctattgtgattatcgctatcactacatcccctgactaagggaaaccatgatgtctgagtaaaactaattggtttatgctgttaacaatcagctgtttttccccttaataaatgtttgaaatttg

SEQ ID NO: 20833 - protein, 133 aa, Homo sapiens; identical to SEQ ID NO: 20817

SEQ ID NO: 20834 - DNA, 1067 bp, Homo sapiens
gcggccgccctgctcctgctgcgtcgtgaggacccggggccgggggctggccccagcatggccgaaacagaagccctgtcgaagcttcgggaagacttcaggatgcagaataaatccgtctttattttgggcgccagcggagaaaccggcagagtgctcttaaaggaaatcctggagcagggcctgttttccaaagtcacgctcattggccggaggaagctcaccttcgacgaggaagcttataaaaatgtgaatcaagaagtggtggactttgaaaagttggatgactacgcctctgcctttcaaggtcatgatgttggattctgttgcctgggtaccaccagagggaaagctggggcggtaaggaaggcatatgctcttttccctttttgctggccagtaatatcaaggattcttttcttgctcactctttttctttgtgcctgttgcaatgcttaaatgtgaataagcctttattgtttaagattctatatgctgcactaacctttggtatccttttaatagtactgataagttcgtctttcaaagtaatccttgagttcaggccccagtgctggagacgtcgtaaatatttacatgattttgcctattgtgattatcgctatcactacatcccctgactaagggaaaccatgatgtctgagtaaaactaattggtttatgctgttaacaatcagctgtttttccccttaataaatgtttgaaatttgaaatgttctgtctcacttgagtgatttgcttcaacttattttcatgtcaagctttaaacttctggaatagaacatcagaacacaggcacgattcaaccagcctccagcgatgactcagccttcagcgatgattcaaccccactaatgattcagtctttactgacgcaaaagtcttttaacgcacattttattttctttttaatggtgttctaaattgagtcagctcctgtacagaagtcatagtttactacatagttagaaatcagagtttactacctggattctgggcaaatgttagtgcgggtacatcttatttaatttatactttgactatag

SEQ ID NO: 20835 - protein, 133 aa, Homo sapiens; identical to SEQ ID NO: 20817

SEQ ID NO: 20836 - DNA, 1640 bp, Homo sapiens
ggccccaggtaacccctccgcgtatgggaccgagctgggccaggtctcctggccgggccggggataccgtggggtatgcccagtgatgccagcagcttgtggcacctgggcgcaccctccagctcgggccccttccgatgggtctgctggctcaggtgcgggcgatggccggggagccgcgccccgcacgtgactcagcactttccccagagcccggactgcggagaacaatatcctcctccctaacagataaacagcccttgttcctcgggataaggactggcagtcccctgacaccctaagaccggcatctgtcgatgttatttccccagcatggccgaaacagaagccctgtcgaagcttcgggaagacttcaggatgcagaataaatccgtctttattttgggcgccagcggagaaaccggcagagtgctcttaaaggaaatcctggagcagggcctgttttccaaagtcacgctcattggccggaggaagctcaccttcgacgaggaagcttataaaaatgtgaatcaagaagtggtggactttgaaaagttggatgactacgcctctgcctttcaaggtcatgatgttggattctgttgcctgggtaccaccagagggaaagctggggcggagggatttgttcgtgttgaccgagattatgtgctgaagtctgcagagctggcaaaagctggagggtgcaaacatttcaacttgctatcctctaaaggagctgataaatcaagcaattttttatatctacaagttaagggagaagtagaagccaaggttgaagaattaaaatttgatcgttactctgtatttaggcctggagttctgttatgtgataggcaagaatctcgcccaggtgaatggctggttagaaagttctttggctccttaccagactcttgggccagtgggcattctgtgcctgtggtgaccgtggttagagcaatgctgaacaatgtggtgagaccaagagacaagcagatggaactgctggagaacaaggccatccatgacctggggaaagcgcatggctctctcaagccatgaccacattggagaaatggtttttattgtcaaccttaacacccatcaccaaatcggtaatttcagggtctaaaaaaagtcagcatgttttaactttgttgttttactatcctcaggcatccattccaatcaagaaatgatggtgctctgcatcagtggttcagagcctggttatacatatagatcactcagggagctttggaaaaataaagatttgtcagccctatctcaaacttgaatcaaaatttctggggtgtgggcacaataatctgtaattttctttgtttatacttcccctgatgccactggttccgatgccactggctggggggcctgctttgaaatgcttgtctgcagagtcacagcagccatgaaaaccttatgaccgtgcaaatgagctctgctctaaaattgttgacattcatgtctctgagttacaaaagtgctaattcactacatgtaattgtgtaagtaaacattgtgcctttactacttctttatgtaatagaagttatatacctaagcttatataatacatggggaggattaaataaaggaataaagatgaatggacaactcct

SEQ ID NO: 20837 - protein, 242 aa, Homo sapiens; identical to SEQ ID NO: 20821

SEQ ID NO: 20838 - DNA, 1725 bp, Homo sapiens
ggccccaggtaacccctccgcgtatgggaccgagctgggccaggtctcctggccgggccggggataccgtggggtatgcccagtgatgccagcagcttgtggcacctgggcgcaccctccagctcgggccccttccgatgggtctgctggctcaggtgcgggcgatggccggggagccgcgccccgcacgtgactcagcactttccccagagcccggactgcggagaacaatatcctcctccctaacagataaacagcccttgttcctcgggataaggactggcagtcccctgacaccctaagaccggcatctgtcgatgttatttccccagcatggccgaaacagaagccctgtcgaagcttcgggaagacttcaggatgcagaataaatccgtctttattttgggcgccagcggagaaaccggcagagtgctcttaaaggaaatcctggagcagggcctgttttccaaagtcacgctcattggccggaggaagctcaccttcgacgaggaagcttataaaaatgtgaatcaagaagtggtggactttgaaaagttggatgactacgcctctgcctttcaaggtcatgatgttggattctgttgcctgggtaccaccagagggaaagctggggcggagggatttgttcgtgttgaccgagattatgtgctgaagtctgcagagctggcaaaagctggagggtgcaaacatttcaacttgctatcctctaaaggagctgataaatcaagcaattttttatatctacaagttaagggagaagtagaagccaaggttgaagaattaaaatttgatcgttactctgtatttaggcctggagttctgttatgtgataggcaagaatctcgcccaggtgaatggctggttagaaagttctttggctccttaccagactcttgggccagtgggcattctgtgcctgtggtgaccgtggttagagcaatgctgaacaatgtggtgagaccaagagacaagcagatggaactgctggagaacaaggccatccatgacctggggaaagcgcatggctctctcaagccatgaccacattggagaaatggtttttattgtcaaccttaacacccatcaccaaatcggtaatttcagggtctaaaaaaagtcagcatgttttaactttgttgttttactatcctcaggcatccattccaatcaagaaatgatggtgctctgcatcagtggttcagagcctggttatacatatagatcactcagggagctttggaaaaataaagatttgtcagccctatctcaaacttgaatcaaaatttctggggtgtgggcacaataatctgtaattttctttgtttatacttcccctgatgccactggttccgatgccactggctggggggcctgctttgaaatgcttgtctgcagagtcacagcagccatgaaaaccttatgaccgtgcaaatgagctctgctctaaaattgttgacattcatgtctctgagttacaaaagtgctaattcactacatgtaattgtgtaagtaaacattgtgcctttactacttctttatgtaatagaagttatatacctaagcttatataatacatggggaggattaaataaaggaataaagatgaatggacaactcctgggtgcctcttagattgcttgaaaatgcccatgtagtgtgatatgcagcatttcagcctatggggtgatataatagcagctaata

SEQ ID NO: 20839 - protein, 242 aa, Homo sapiens; identical to SEQ ID NO: 20821

SEQ ID NO: 20840 - DNA, 771 bp, Homo sapiens
tcctccctaacagataaacagcccttgttcctcgggataaggactggcagtcccctgacaccctaagaccggcatctgtcgatgttatttccccagcatggccgaaacagaagccctgtcgaagcttcgggaagacttcaggatgcagaataaatccgtctttattttgggcgccagcggagaaaccggcagagtgctcttaaaggaaatcctggagcagggcctgttttccaaagtcacgctcattggccggaggaagctcaccttcgacgaggaagcttataaaaatgtgaatcaagaagtggtggactttgaaaagttggatgactacgcctctgcctttcaaggtcatgatgttggattctgttgcctgggtaccaccagagggaaagctggggcggtaaggaaggcatatgctcttttccctttttgctggccagtaatatcaaggattcttttcttgctcactctttttctttgtgcctgttgcaatgcttaaatgtgaataagcctttattgtttaagattctatatgctgcactaacctttggtatccttttaatagtactgataagttcgtctttcaaagtaatccttgagttcaggccccagtgctggagacgtcgtaaatatttacatgattttgcctattgtgattatcgctatcactacatcccctgactaagggaaaccatgatgtctgagtaaaactaattggtttatgctgttaacaatcagctgtttttccccttaataaatgtttgaaatttg

SEQ ID NO: 20841 - protein, 133 aa, Homo sapiens; identical to SEQ ID NO: 20817

SEQ ID NO: 20842 - DNA, 1258 bp, Homo sapiens
taacagataaacagcccttgttcctcgggataaggactggcagtcccctgacaccctaagaccggcatctgtcgatgttatttccccagcatggccgaaacagaagccctgtcgaagcttcgggaagacttcaggatgcagaataaatccgtctttattttgggcgccagcggagaaaccggcagagtgctcttaaaggaaatcctggagcagggcctgttttccaaagtcacgctcattggccggaggaagctcaccttcgacgaggaagcttataaaaatgtgaatcaagaagtggtggactttgaaaagttggatgactacgcctctgcctttcaaggtcatgatgttggattctgttgcctgggtaccaccagagggaaagctggggcgggagaagtagaagccaaggttgaagaattaaaatttgatcgttactctgtatttaggcctggagttctgttatgtgataggcaagaatctcgcccaggtgaatggctggttagaaagttctttggctccttaccagactcttgggccagtgggcattctgtgcctgtggtgaccgtggttagagcaatgctgaacaatgtggtgagaccaagagacaagcagatggaactgctggagaacaaggccatccatgacctggggaaagcgcatggctctctcaagccatgaccacattggagaaatggtttttattgtcaaccttaacacccatcaccaaatcggtaatttcagggtctaaaaaaagtcagcatgttttaactttgttgttttactatcctcaggcatccattccaatcaagaaatgatggtgctctgcatcagtggttcagagcctggttatacatatagatcactcagggagctttggaaaaataaagatttgtcagccctatctcaaacttgaatcaaaatttctggggtgtgggcacaataatctgtaattttctttgtttatacttcccctgatgccactggttccgatgccactggctggggggcctgctttgaaatgcttgtctgcagagtcacagcagccatgaaaaccttatgaccgtgcaaatgagctctgctctaaaattgttgacattcatgtctctgagttacaaaagtgctaattcactacatgtaattgtgtaagtaaacattgtgcctttactacttctttatgtaatagaagttatatacctaagcttatataatacatggggaggattaaataaaggaataaagatgaatggacaactcc

SEQ ID NO: 20843 - protein, 196 aa, Homo sapiens
MAETEALSKLREDFRMQNKSVFILGASGETGRVLLKEILEQGLFSKVTLIGRRKLTFDEEAYKNVNQEVVDFEKLDDYASAFQGHDVGFCCLGTTRGKAGAGEVEAKVEELKFDRYSVFRPGVLLCDRQESRPGEWLVRKFFGSLPDSWASGHSVPVVTVVRAMLNNVVRPRDKQMELLENKAIHDLGKAHGSLKP

SEQ ID NO: 20844 - DNA, 1344 bp, Homo sapiens
taacagataaacagcccttgttcctcgggataaggactggcagtcccctgacaccctaagaccggcatctgtcgatgttatttccccagcatggccgaaacagaagccctgtcgaagcttcgggaagacttcaggatgcagaataaatccgtctttattttgggcgccagcggagaaaccggcagagtgctcttaaaggaaatcctggagcagggcctgttttccaaagtcacgctcattggccggaggaagctcaccttcgacgaggaagcttataaaaatgtgaatcaagaagtggtggactttgaaaagttggatgactacgcctctgcctttcaaggtcatgatgttggattctgttgcctgggtaccaccagagggaaagctggggcgggagaagtagaagccaaggttgaagaattaaaatttgatcgttactctgtatttaggcctggagttctgttatgtgataggcaagaatctcgcccaggtgaatggctggttagaaagttctttggctccttaccagactcttgggccagtgggcattctgtgcctgtggtgaccgtggttagagcaatgctgaacaatgtggtgagaccaagagacaagcagatggaactgctggagaacaaggccatccatgacctggggaaagcgcatggctctctcaagccatgaccacattggagaaatggtttttattgtcaaccttaacacccatcaccaaatcggtaatttcagggtctaaaaaaagtcagcatgttttaactttgttgttttactatcctcaggcatccattccaatcaagaaatgatggtgctctgcatcagtggttcagagcctggttatacatatagatcactcagggagctttggaaaaataaagatttgtcagccctatctcaaacttgaatcaaaatttctggggtgtgggcacaataatctgtaattttctttgtttatacttcccctgatgccactggttccgatgccactggctggggggcctgctttgaaatgcttgtctgcagagtcacagcagccatgaaaaccttatgaccgtgcaaatgagctctgctctaaaattgttgacattcatgtctctgagttacaaaagtgctaattcactacatgtaattgtgtaagtaaacattgtgcctttactacttctttatgtaatagaagttatatacctaagcttatataatacatggggaggattaaataaaggaataaagatgaatggacaactcctgggtgcctcttagattgcttgaaaatgcccatgtagtgtgatatgcagcatttcagcctatggggtgatataatagcagctaata

SEQ ID NO: 20845 - protein, 196 aa, Homo sapiens; identical to SEQ ID NO: 20843

SEQ ID NO: 20846 - DNA, 551 bp, Homo sapiens
ggagttgtccattcatctttattcctttatttaatcctccccatgtattatataagcttaggtatataacttctattacataaagaagtagtaaaggcacaatgtttacttacacaattacatgtagtgaattagcactttttgatctatatgtataaccaggctctgaaccactgatgcagagcaccatcatttcttgattggaatggatgcctgaggatagtaaaacaacaaagttaaaacatgctgactttttttagaccctgaaattaccgatttggtgatgggtgttaaggttgacaataaaaaccatttctccaatgtggtcatggcttgagagagccatgcgctttccccaggtcatggatggccttgttctccagcagttccatctgcttgtctcttggtctcaccacattgttcagcattgctctaaccacggtcaccacaggcacagaatgcccactggcccaagagtctggtaaggagccaaagaactttctaaccagccattcacctgggcgagattcttgcctatcacataacagaac

SEQ ID NO: 20847 - protein, 60 aa, Homo sapiens
MALFSSSSICLSLGLTTLFSIALTTVTTGTECPLAQESGKEPKNFLTSHSPGRDSCLSHN

SEQ ID NO: 20848 - DNA, 641 bp, Homo sapiens
ggagttgtccattcatctttattcctttatttaatcctccccatgtattatataagcttaggtatataacttctattacataaagaagtagtaaaggcacaatgtttacttacacaattacatgtagtgaattagcacttttgtaactcagagacatgaatgtcaacaattttagagcagagctcatttgcacggtcataaggttttcatggctgctgtgactctgcagacaagcatttcaaagcaggccccccagccagtggcatcggaaccagtggcatcaggggaagtataaacaaagaaaattacagattattgtgcccacaccccagaaattttgattcaagtttgagatagggctgacaaatctttatttttccaaagctccctgagtgatctatatgtataaccaggctctgaaccactgatgcagagcaccatcatttcttgattggaatggatgcctgaggatagtaaaacaacaaagttaaaacatgctgactttttttagaccctgaaattaccgatttggtgatgggtgttaaggttgacaataaaaaccatttctccaatgtggtcatggcttgagagagccatgcgctttccccaggtcatggatggccttaatgcccactggccca

SEQ ID NO: 20849 - protein, 51 aa, Homo sapiens
GFHGCCDSADKHFKAGPPASGIGTSGIRGSINKENYRLLCPHPRNFDSSLR

SEQ ID NO: 20850 - DNA, 2606 bp, Homo sapiens
gaggccggaagcgattgcgagccagcgcgcgcgcttcggcgttcccggcggtctgcgaagtttccggagcccgggtcccgccgcgggttcgcgcttgtgctcgcgctcgttcctggagtcggcggccgctgcgcgcgctcgttgcccaacccggtccccgcccccagacacgccgggctctcggggcaccacagccatgtgctcgttagcgtcaggcgctaccggcggccggggcgctgtggagaatgaggaggacctgccagaactgtcggacagcggggacgaggccgcctgggaggatgaggacgatgcagatctcccccacggcaagcagcagaccccctgcctgttctgtaacaggttattcacatctgctgaagaaacattttcacactgtaagtctgagcatcagtttaatattgacagcatggttcataaacatggacttgaattttatggatacattaagctaataaattttattagacttaagaatcctacagttgagtacatgaattccatatacaacccagtgccttgggagaaagaagagtatttgaagccagtattagaagatgaccttttacttcaatttgatgtagaagatctttatgaaccggtgtcagtacccttctcataccccaatggactcagtgaaaatacatctgttgttgaaaaattgaaacatatggaagccagggcactgtctgctgaagccgcattggccagagcacgtgaggatctgcaaaaaatgaaacaatttgctcaggattttgtgatgcacacagatgtcagaacctgctcgtcatctactagtgtcattgcggacctccaggaggatgaggatggtgtttatttcagctcatacgggcattatgggatacatgaagaaatgctaaaggacaaaatacgaacagaaagctaccgagatttcatataccaaaatccacatatcttcaaagacaaggtagttttggatgttgggtgtggaactggaattctctctatgtttgctgctaaagctggggcgaagaaggttcttggagttgatcaatctgaaatactttaccaggcaatggatattataagactaaataaacttgaagatactattacactaattaaaggaaagattgaagaagttcatcttcctgtagaaaaagtagatgttatcatatctgagtggatgggctattttcttctgtttgagtctatgttagattctgtcctttatgcaaagaacaaatacttggcaaaaggaggctcggtctaccctgacatttgcactatcagccttgtagcagtgagtgatgtgaataaacatgctgatagaattgctttttgggatgatgtctatggcttcaagatgtcctgcatgaagaaagcagttattccagaagctgttgtggaagttttagatccgaagactcttatttcagaaccttgtggtattaagcatatagattgccatacgacgtctatctcagatttggaattttcatcagattttaccctgaaaatcacaaggacatccatgtgcacggcaattgctggctactttgatatatattttgagaagaattgccacaacagggtcgtgttctctacgggccctcagagcaccaaaacacactggaaacaaacagtatttctactggaaaaaccattttcagttaaagcaggtgaagccttgaaaggaaaggtcacagttcacaagagtaagaaagatccacgttctctcaccgtgaccctcacgttgaataattcaactcaaacttatggtctccagtgaaacagccataaaagcacactaccttgtagtttttaatgtgggggtagagtgggtcagcaggagggagctggttttatgtgagcagatggatggatgatggaccctttcctaatgagcctcctcaataagagagaagttctcattgtgggaatctgacatagttcagctgaggaagagaatcagctgatcctcatggtctgccacgtaatcattttcttagacgtttgctccaccagatttaaccaaatgtaactcccacattgagtttatctatattgaaaatcatttacattggcctatatttggaagagagatagtcttttgtttttaataagtttcttactataaattttaaacaaattggttagttatttggatattttattaaactagtaacacaggtactacacattttattatggactcctctgaggaggagtttttaattgtatttgctagaaaatcaggatgtaataaagatttgtataaaaaaactaaaatatggaaaagagcttcagccttcatatacaaatcatatatgcagacagcctagttgattatctagcatacttagggttctcattttgtagtttcttccctctttgtgactattccttagccttatagatttctagtactgcccaggaaatctaatttcaatacatttatcctaggtttcatgaaagtttttaaagattgggataaatatgtacttatttactaacgtattatctttttcaaaccagatttatgtgcaaaggttaaacatgtaactgttactaagcagtctataaagttgtcatttacaattact

SEQ ID NO: 20851 - protein, 531 aa, Homo sapiens
MCSLASGATGGRGAVENEEDLPELSDSGDEAAWEDEDDADLPHGKQQTPCLFCNRLFTSAEETFSHCKSEHQFNIDSMVHKHGLEFYGYIKLINFIRLKNPTVEYMNSIYNPVPWEKEEYLKPVLEDDLLLQFDVEDLYEPVSVPFSYPNGLSENTSVVEKLKHMEARALSAEAALARAREDLQKMKQFAQDFVMHTDVRTCSSSTSVIADLQEDEDGVYFSSYGHYGIHEEMLKDKIRTESYRDFIYQNPHIFKDKVVLDVGCGTGILSMFAAKAGAKKVLGVDQSEILYQAMDIIRLNKLEDTITLIKGKIEEVHLPVEKVDVIISEWMGYFLLFESMLDSVLYAKNKYLAKGGSVYPDICTISLVAVSDVNKHADRIAFWDDVYGFKMSCMKKAVIPEAVVEVLDPKTLISEPCGIKHIDCHTTSISDLEFSSDFTLKITRTSMCTAIAGYFDIYFEKNCHNRVVFSTGPQSTKTHWKQTVFLLEKPFSVKAGEALKGKVTVHKSKKDPRSLTVTLTLNNSTQTYGLQ

SEQ ID NO: 20852 - DNA, 2675 bp, Homo sapiens
gaggccggaagcgattgcgagccagcgcgcgcgcttcggcgttcccggcggtctgcgaagtttccggagcccgggtcccgccgcgggttcgcgcttgtgctcgcgctcgttcctggagtcggcggccgctgcgcgcgctcgttgcccaacccggtccccgcccccagacacgccgggctctcggggcaccacagccatgtgctcgttagcgtcaggcgctaccggcggccggggcgctgtggagaatgaggaggacctgccagaactgtcggacagcggggacgaggccgcctgggaggatgaggacgatgcagatctcccccacggcaagcagcagaccccctgcctgttctgtaacaggttattcacatctgctgaagaaacattttcacactgtaagtctgagcatcagtttaatattgacagcatggttcataaacatggacttgaattttatggatacattaagctaataaattttattagacttaagaatcctacagttgagtacatgaattccatatacaacccagtgccttgggagaaagaagagtatttgaagccagtattagaagatgaccttttacttcaatttgatgtagaagatctttatgaaccggtgtcagtacccttctcataccccaatggactcagtgaaaatacatctgttgttgaaaaattgaaacatatggaagccagggcactgtctgctgaagccgcattggccagagcacgtgaggatctgcaaaaaatgaaacaatttgctcaggattttgtgatgcacacagatgtcagaacctgctcgtcatctactagtgtcattgcggacctccaggaggatgaggatggtgtttatttcagctcatacgggcattatgggatacatgaagaaatgctaaaggacaaaatacgaacagaaagctaccgagatttcatataccaaaatccacatatcttcaaagacaaggtagttttggatgttgggtgtggaactggaattctctctatgtttgctgctaaagctggggcgaagaaggttcttggagttgatcaatctgaaatactttaccaggcaatggatattataagactaaataaacttgaagatactattacactaattaaaggaaagattgaagaagttcatcttcctgtagaaaaagtagatgttatcatatctgagtggatgggctattttcttctgtttgagtctatgttagattctgtcctttatgcaaagaacaaatacttggcaaaaggaggctcggtctaccctgacatttgcactatcagccttgtagcagtgagtgatgtgaataaacatgctgatagaattgctttttgggatgatgtctatggcttcaagatgtcctgcatgaagaaagcagttattccagaagctgttgtggaagttttagatccgaagactcttatttcagaaccttgtggtattaagcatatagattgccatacgacgtctatctcagatttggaattttcatcagattttaccctgaaaatcacaaggacatccatgtgcacggcaattgctggctactttgatatatattttgagaagaattgccacaacagggtcgtgttctctacgggccctcagagcaccaaaacacactggaaacaaacagtatttctactggaaaaaccattttcagttaaagcaggtgaagccttgaaaggaaaggtcacagttcacaagagtaagaaagatccacgttctctcaccgtgaccctcacgttgaataattcaactcaaacttatggtctccagtgaaacagccataaaagcacactaccttgtagtttttaatgtgggggtagagtgggtcagcaggagggagctggttttatgtgagcagatggatggatgatggaccctttcctaatgagcctcctcaataagagagaagttctcattgtgggaatctgacatagttcagctgaggaagagaatcagctgatcctcatggtctgccacgtaatcattttcttagacgtttgctccaccagatttaaccaaatgtaactcccacattgagtttatctatattgaaaatcatttacattggcctatatttggaagagagatagtcttttgtttttaataagtttcttactataaattttaaacaaattggttagttatttggatattttattaaactagtaacacaggtactacacattttattatggactcctctgaggaggagtttttaattgtatttgctagaaaatcaggatgtaataaagatttgtataaaaaaactaaaatatggaaaagagcttcagccttcatatacaaatcatatatgcagacagcctagttgattatctagcatacttagggttctcattttgtagtttcttccctctttgtgactattccttagccttatagatttctagtactgcccaggaaatctaatttcaatacatttatcctaggtttcatgaaagtttttaaagattgggataaatatgtacttatttactaacgtattatctttttcaaaccagatttatgtgcaaaggttaaacatgtaactgttactaagcagtctataaagttgtcatttacaattactgattcaatttgaaatgtagaataaaattttaataaaatgtatcaacttataaaatattttaaaaatatt

SEQ ID NO: 20853 - protein, 531 aa, Homo sapiens; identical to SEQ ID NO: 20851

SEQ ID NO: 20854 - DNA, 2710 bp, Homo sapiens
gaggccggaagcgattgcgagccagcgcgcgcgcttcggcgttcccggcggtctgcgaagtttccggagcccgggtcccgccgcgggttcgcgcttgtgctcgcgctcgttcctggagtcggcggccgctgcgcgcgctcgttgcccaacccggtccccgcccccagacacgccgggctctcggggcaccacagccatgtgctcgttagcgtcaggcgctaccggcggccggggcgctgtggagaatgaggaggacctgccagaactgtcggacagcggggacgaggccgcctgggaggatgaggacgatgcagatctcccccacggcaagcagcagaccccctgcctgttctgtaacaggttattcacatctgctgaagaaacattttcacactgtaagtctgagcatcagtttaatattgacagcatggttcataaacatggacttgaattttatggatacattaagctaataaattttattagacttaagaatcctacagttgagtacatgaattccatatacaacccagtgccttgggagaaagaagagtatttgaagccagtattagaagatgaccttttacttcaatttgatgtagaagatctttatgaaccggtgtcagtacccttctcataccccaatggactcagtgaaaatacatctgttgttgaaaaattgaaacatatggaagccagggcactgtctgctgaagccgcattggccagagcacgtgaggatctgcaaaaaatgaaacaatttgctcaggattttgtgatgcacacagatgtcagaacctgctcgtcatctactagtgtcattgcggacctccaggaggatgaggatggtgtttatttcagctcatacgggcattatgggatacatgaagaaatgctaaaggacaaaatacgaacagaaagctaccgagatttcatataccaaaatccacatatcttcaaagacaaggtagttttggatgttgggtgtggaactggaattctctctatgtttgctgctaaagctggggcgaagaaggttcttggagttgatcaatctgaaatactttaccaggcaatggatattataagactaaataaacttgaagatactattacactaattaaaggaaagattgaagaagttcatcttcctgtagaaaaagtagatgttatcatatctgagtggatgggctattttcttctgtttgagtctatgttagattctgtcctttatgcaaagaacaaatacttggcaaaaggaggctcggtctaccctgacatttgcactatcagccttgtagcagtgagtgatgtgaataaacatgctgatagaattgctttttgggatgatgtctatggcttcaagatgtcctgcatgaagaaagcagttattccagaagctgttgtggaagttttagatccgaagactcttatttcagaaccttgtggtattaagcatatagattgccatacgacgtctatctcagatttggaattttcatcagattttaccctgaaaatcacaaggacatccatgtgcacggcaattgctggctactttgatatatattttgagaagaattgccacaacagggtcgtgttctctacgggccctcagagcaccaaaacacactggaaacaaacagtatttctactggaaaaaccattttcagttaaagcaggtgaagccttgaaaggaaaggtcacagttcacaagagtaagaaagatccacgttctctcaccgtgaccctcacgttgaataattcaactcaaacttatggtctccagtgaaacagccataaaagcacactaccttgtagtttttaatgtgggggtagagtgggtcagcaggagggagctggttttatgtgagcagatggatggatgatggaccctttcctaatgagcctcctcaataagagagaagttctcattgtgggaatctgacatagttcagctgaggaagagaatcagctgatcctcatggtctgccacgtaatcattttcttagacgtttgctccaccagatttaaccaaatgtaactcccacattgagtttatctatattgaaaatcatttacattggcctatatttggaagagagatagtcttttgtttttaataagtttcttactataaattttaaacaaattggttagttatttggatattttattaaactagtaacacaggtactacacattttattatggactcctctgaggaggagtttttaattgtatttgctagaaaatcaggatgtaataaagatttgtataaaaaaactaaaatatggaaaagagcttcagccttcatatacaaatcatatatgcagacagcctagttgattatctagcatacttagggttctcattttgtagtttcttccctctttgtgactattccttagccttatagatttctagtactgcccaggaaatctaatttcaatacatttatcctaggtttcatgaaagtttttaaagattgggataaatatgtacttatttactaacgtattatctttttcaaaccagatttatgtgcaaaggttaaacatgtaactgttactaagcagtctataaagttgtcatttacaattactgattcaatttgaaatgtagaataaaattttaataaaatgtatcaacttataaaatattttaaaaatattgatattataaaagttttcaataaaatatatcaaac

SEQ ID NO: 20855 - protein, 531 aa, Homo sapiens; identical to SEQ ID NO: 20851

SEQ ID NO: 20856 - DNA, 2532 bp, Homo sapiens
gaagcgattgcgagccagcgcgcgcgcttcggcgttcccggcggtctgcgaagtttccggagcccgggtcccgccgcgggttcgcgcttgtgctcgcgctcgttcctggagtcggcggccgctgcgcgcgctcgttgcccaacccggtccccgcccccagacacgccgggctctcggggcaccacagccatgtgctcgttagcgtcaggcgctaccggttattcacatctgctgaagaaacattttcacactgtaagtctgagcatcagtttaatattgacagcatggttcataaacatggacttgaattttatggatacattaagctaataaattttattagacttaagaatcctacagttgagtacatgaattccatatacaacccagtgccttgggagaaagaagagtatttgaagccagtattagaagatgaccttttacttcaatttgatgtagaagatctttatgaaccggtgtcagtacccttctcataccccaatggactcagtgaaaatacatctgttgttgaaaaattgaaacatatggaagccagggcactgtctgctgaagccgcattggccagagcacgtgaggatctgcaaaaaatgaaacaatttgctcaggattttgtgatgcacacagatgtcagaacctgctcgtcatctactagtgtcattgcggacctccaggaggatgaggatggtgtttatttcagctcatacgggcattatgggatacatgaagaaatgctaaaggacaaaatacgaacagaaagctaccgagatttcatataccaaaatccacatatcttcaaagacaaggtagttttggatgttgggtgtggaactggaattctctctatgtttgctgctaaagctggggcgaagaaggttcttggagttgatcaatctgaaatactttaccaggcaatggatattataagactaaataaacttgaagatactattacactaattaaaggaaagattgaagaagttcatcttcctgtagaaaaagtagatgttatcatatctgagtggatgggctattttcttctgtttgagtctatgttagattctgtcctttatgcaaagaacaaatacttggcaaaaggaggctcggtctaccctgacatttgcactatcagccttgtagcagtgagtgatgtgaataaacatgctgatagaattgctttttgggatgatgtctatggcttcaagatgtcctgcatgaagaaagcagttattccagaagctgttgtggaagttttagatccgaagactcttatttcagaaccttgtggtattaagcatatagattgccatacgacgtctatctcagatttggaattttcatcagattttaccctgaaaatcacaaggacatccatgtgcacggcaattgctggctactttgatatatattttgagaagaattgccacaacagggtcgtgttctctacgggccctcagagcaccaaaacacactggaaacaaacagtatttctactggaaaaaccattttcagttaaagcaggtgaagccttgaaaggaaaggtcacagttcacaagagtaagaaagatccacgttctctcaccgtgaccctcacgttgaataattcaactcaaacttatggtctccagtgaaacagccataaaagcacactaccttgtagtttttaatgtgggggtagagtgggtcagcaggagggagctggttttatgtgagcagatggatggatgatggaccctttcctaatgagcctcctcaataagagagaagttctcattgtgggaatctgacatagttcagctgaggaagagaatcagctgatcctcatggtctgccacgtaatcattttcttagacgtttgctccaccagatttaaccaaatgtaactcccacattgagtttatctatattgaaaatcatttacattggcctatatttggaagagagatagtcttttgtttttaataagtttcttactataaattttaaacaaattggttagttatttggatattttattaaactagtaacacaggtactacacattttattatggactcctctgaggaggagtttttaattgtatttgctagaaaatcaggatgtaataaagatttgtataaaaaaactaaaatatggaaaagagcttcagccttcatatacaaatcatatatgcagacagcctagttgattatctagcatacttagggttctcattttgtagtttcttccctctttgtgactattccttagccttatagatttctagtactgcccaggaaatctaatttcaatacatttatcctaggtttcatgaaagtttttaaagattgggataaatatgtacttatttactaacgtattatctttttcaaaccagatttatgtgcaaaggttaaacatgtaactgttactaagcagtctataaagttgtcatttacaattactgattcaatttgaaatgtagaataaaattttaataaaatgtatcaacttataaaatattttaaaaatatt

SEQ ID NO: 20857 - protein, 454 aa, Homo sapiens
MVHKHGLEFYGYIKLINFIRLKNPTVEYMNSIYNPVPWEKEEYLKPVLEDDLLLQFDVEDLYEPVSVPFSYPNGLSENTSVVEKLKHMEARALSAEAALARAREDLQKMKQFAQDFVMHTDVRTCSSSTSVIADLQEDEDGVYFSSYGHYGIHEEMLKDKIRTESYRDFIYQNPHIFKDKVVLDVGCGTGILSMFAAKAGAKKVLGVDQSEILYQAMDIIRLNKLEDTITLIKGKIEEVHLPVEKVDVIISEWMGYFLLFESMLDSVLYAKNKYLAKGGSVYPDICTISLVAVSDVNKHADRIAFWDDVYGFKMSCMKKAVIPEAVVEVLDPKTLISEPCGIKHIDCHTTSISDLEFSSDFTLKITRTSMCTAIAGYFDIYFEKNCHNRVVFSTGPQSTKTHWKQTVFLLEKPFSVKAGEALKGKVTVHKSKKDPRSLTVTLTLNNSTQTYGLQ

SEQ ID NO: 20858 - DNA, 356 bp, Homo sapiens
gatcaaaagattgtctggttttgcctttaattgcttcatgtattttggagctcttatgtgaggtttatacacatttataattgttatattttactgaaaaattggtcagcctttgcagtaattcttctctgcccgaaagaagtatccaggtgatttgaacatcctgagacagaaggtagatgtagatgttcatctttctgaatatggtttaggcctttgaattagactgttctagcaaattgtagttaggaatcagaatgtaattatggtgtagtatgaacccagaaaaccagatatacagtgacagttttttccagtgaataaattagcattctactggtgtagtacttttcaaa

SEQ ID NO: 20859 - protein, 40 aa, Homo sapiens
LLHVFWSSYVRFIHIYNCYILLKNWSAFAVILLCPKEVSR

SEQ ID NO: 20860 - DNA, 4173 bp, Homo sapiens
atgtgataaataactaacatacaattaaaaatataggctttagaagaaggttaacctgtgtttgaatgcaggccctacaatttaccagctgtgtgaccctggacctatttctttgcctctctgaagctcacattcttcatttgtaaaatgagaattaaataaggatttcatacacatacacatatatgcatttgtatatacattatatatgaatgtatgtatggatagtcttacaaaaaaacacatactcttattggaatatactaaacatatctttctatacttaactttcttcactcagcagcttttcttggagaaattccttattatctttttacccccgtgttttttcttatggtaaataaacatgatacaaaatttgccatcttagctatccctaagtgtataggtaagtggtattaaatacatttataatgtcatgcagccatcaccacctccatctccagaactcttcatcttataaaactggaactgttctcattaaacggtaattccccattctcccttcctcccagcccctggaaatcactgttctactttctgtctctatgattttgactactcatatacatcatataagtggaatcttacagtacagtcgttccttcagtatctgtgagggattggttccaggaccctctgtggataccagcatccacaaatgctcatttaccggatataaaatggtgtagtgtttgcatataacctgcacacatcttcctgtgtactttaaatcatctccagattacttataatacctaatacaatgtaagtgctatataaatagttgttatgctgtattgtttagaaccgtgacaagagaaagaagacttcatgttcagtacagaagcaatttgttttcccgaatgttttcgattagcagttggttgactccctggatggggaacccagggatataaagggctgactgtatttccttttgtaaccggcttattgcacttagcataatgtcctcaagatttgaccttgttacagcgaatgtcagaatttttttcatttttaaggctcaataatccattttacatatgtatgacattttgcttatccattcattcatctgtctatggatatttgggttacttatatattaaagctgttgtgaatattgctgctattaacataggtatacagatatctcttaggggccatgcttttaattcttttgggtatatacccagaaatgaaattgctgagtcatatggtaattccatttttaattccttgagaaatcactgtgctgtttttcacagtgggtgtaccattttgtattcccaccagcagtgcacaagggttccaatttttccatatccttagcaatacttgttgttttctagttttttgataatagctatcctagttggtgtgaggtgatatttatattgatttgcatttttctaacgattagtgattttgagcatcttttcattaatattcttttaatagttcgtatatccaatgtaagaatgtccataagttgtttcagtttttatgttagaaacaatgcttcatataaaatattaaaaatatttgtatacatatgcgagcacaattataaggtaatttgttagcactggactccctaggtcatgaagggtatataccatgtatggtgtcaccagttgtgctgccagcttgtctttggtacacagcaagggagtgttgatcttcccagacagtatcaccaaagcactttcagcaaacttctaaattccacactgatcttttatttttcattttttagttttgtaaatgttttattttaatgagagtttctggaaacttattatatactgttctattgtgtatatttttctattttttcattttctgccgtacagtatttcaagttgaggtactataactgtactggatacatatatactatgtagtatactgttttcttgccatttttgttactacgttttatttggaacttttaaaaaattctttttgtttgcagtgatgtatacagattgcatgttaaagtaaaattcttaatgtttataaaagtaattatgttaaaatgtactgactcacccagacaggccatgtgttcaagaacagacaaattcccactgaaaccatctgggcataggataggaagcacaaagtagtagcctttcaacaactttatttcttcagtggatatcaggatggttagattatctctcttctggagtcaatactaataaattataatttcaatacgtaatggaaagagccgggcatggtgactcctgcctgtaatcccagcactttgggaggccaaaggattacaggcgtgagccaccgcgcctggccagtttcagatttttattgtgatcttttcctagccagaaacatcataatatatgaatagaatttaatatagagacctttttgataacatctgttttgttttggttttttcttaattaccctaggtagttttggatgttgggtgtggaactggaattctctctatgtttgctgctaaagctggggcgaagaaggttcttggagttgatcaatctgaaatactttaccaggcaatggatattataagactaaataaacttgaagatactattacactaattaaaggaaagattgaagaagttcatcttcctgtagaaaaagtagatgttatcatatctgagtggatgggctattttcttctgtttgagtctatgttagattctgtcctttatgcaaagaacaaatacttggcaaaaggaggctcggtctaccctgacatttgcactatcagccttgtagcagtgagtgatgtgaataaacatgctgatagaattgctttttgggatgatgtctatggcttcaagatgtcctgcatgaagaaagcagttattccagaagctgttgtggaagttttagatccgaagactcttatttcagaaccttgtggtattaagcatatagattgccatacgacgtctatctcagatttggaattttcatcagattttaccctgaaaatcacaaggacatccatgtgcacggcaattgctggctactttgatatatattttgagaagaattgccacaacagggtcgtgttctctacgggccctcagagcaccaaaacacactggaaacaaacagtatttctactggaaaaaccattttcagttaaagcaggtgaagccttgaaaggaaaggtcacagttcacaagagtaagaaagatccacgttctctcaccgtgaccctcacgttgaataattcaactcaaacttatggtctccagtgaaacagccataaaagcacactaccttgtagtttttaatgtgggggtagagtgggtcagcaggagggagctggttttatgtgagcagatggatggatgatggaccctttcctaatgagcctcctcaataagagagaagttctcattgtgggaatctgacatagttcagctgaggaagagaatcagctgatcctcatggtctgccacgtaatcattttcttagacgtttgctccaccagatttaaccaaatgtaactcccacattgagtttatctatattgaaaatcatttacattggcctatatttggaagagagatagtcttttgtttttaataagtttcttactataaattttaaacaaattggttagttatttggatattttattaaactagtaacacaggtactacacattttattatggactcctctgaggaggagtttttaattgtatttgctagaaaatcaggatgtaataaagatttgtataaaaaaactaaaatatggaaaagagcttcagccttcatatacaaatcatatatgcagacagcctagttgattatctagcatacttagggttctcattttgtagtttcttccctctttgtgactattccttagccttatagatttctagtactgcccaggaaatctaatttcaatacatttatcctaggtttcatgaaagtttttaaagattgggataaatatgtacttatttactaacgtattatctttttcaaaccagatttatgtgcaaaggttaaacatgtaactgttactaagcagtctataaagttgtcatttacaattactgattcaatttgaaatgtagaataaaattttaataaaatgtatcaacttataaaatattttaaaaatatt

SEQ ID NO: 20861 - protein, 261 aa, Homo sapiens
MFAAKAGAKKVLGVDQSEILYQAMDIIRLNKLEDTITLIKGKIEEVHLPVEKVDVIISEWMGYFLLFESMLDSVLYAKNKYLAKGGSVYPDICTISLVAVSDVNKHADRIAFWDDVYGFKMSCMKKAVIPEAVVEVLDPKTLISEPCGIKHIDCHTTSISDLEFSSDFTLKITRTSMCTAIAGYFDIYFEKNCHNRVVFSTGPQSTKTHWKQTVFLLEKPFSVKAGEALKGKVTVHKSKKDPRSLTVTLTLNNSTQTYGLQ

SEQ ID NO: 20862 - DNA, 4208 bp, Homo sapiens
atgtgataaataactaacatacaattaaaaatataggctttagaagaaggttaacctgtgtttgaatgcaggccctacaatttaccagctgtgtgaccctggacctatttctttgcctctctgaagctcacattcttcatttgtaaaatgagaattaaataaggatttcatacacatacacatatatgcatttgtatatacattatatatgaatgtatgtatggatagtcttacaaaaaaacacatactcttattggaatatactaaacatatctttctatacttaactttcttcactcagcagcttttcttggagaaattccttattatctttttacccccgtgttttttcttatggtaaataaacatgatacaaaatttgccatcttagctatccctaagtgtataggtaagtggtattaaatacatttataatgtcatgcagccatcaccacctccatctccagaactcttcatcttataaaactggaactgttctcattaaacggtaattccccattctcccttcctcccagcccctggaaatcactgttctactttctgtctctatgattttgactactcatatacatcatataagtggaatcttacagtacagtcgttccttcagtatctgtgagggattggttccaggaccctctgtggataccagcatccacaaatgctcatttaccggatataaaatggtgtagtgtttgcatataacctgcacacatcttcctgtgtactttaaatcatctccagattacttataatacctaatacaatgtaagtgctatataaatagttgttatgctgtattgtttagaaccgtgacaagagaaagaagacttcatgttcagtacagaagcaatttgttttcccgaatgttttcgattagcagttggttgactccctggatggggaacccagggatataaagggctgactgtatttccttttgtaaccggcttattgcacttagcataatgtcctcaagatttgaccttgttacagcgaatgtcagaatttttttcatttttaaggctcaataatccattttacatatgtatgacattttgcttatccattcattcatctgtctatggatatttgggttacttatatattaaagctgttgtgaatattgctgctattaacataggtatacagatatctcttaggggccatgcttttaattcttttgggtatatacccagaaatgaaattgctgagtcatatggtaattccatttttaattccttgagaaatcactgtgctgtttttcacagtgggtgtaccattttgtattcccaccagcagtgcacaagggttccaatttttccatatccttagcaatacttgttgttttctagttttttgataatagctatcctagttggtgtgaggtgatatttatattgatttgcatttttctaacgattagtgattttgagcatcttttcattaatattcttttaatagttcgtatatccaatgtaagaatgtccataagttgtttcagtttttatgttagaaacaatgcttcatataaaatattaaaaatatttgtatacatatgcgagcacaattataaggtaatttgttagcactggactccctaggtcatgaagggtatataccatgtatggtgtcaccagttgtgctgccagcttgtctttggtacacagcaagggagtgttgatcttcccagacagtatcaccaaagcactttcagcaaacttctaaattccacactgatcttttatttttcattttttagttttgtaaatgttttattttaatgagagtttctggaaacttattatatactgttctattgtgtatatttttctattttttcattttctgccgtacagtatttcaagttgaggtactataactgtactggatacatatatactatgtagtatactgttttcttgccatttttgttactacgttttatttggaacttttaaaaaattctttttgtttgcagtgatgtatacagattgcatgttaaagtaaaattcttaatgtttataaaagtaattatgttaaaatgtactgactcacccagacaggccatgtgttcaagaacagacaaattcccactgaaaccatctgggcataggataggaagcacaaagtagtagcctttcaacaactttatttcttcagtggatatcaggatggttagattatctctcttctggagtcaatactaataaattataatttcaatacgtaatggaaagagccgggcatggtgactcctgcctgtaatcccagcactttgggaggccaaaggattacaggcgtgagccaccgcgcctggccagtttcagatttttattgtgatcttttcctagccagaaacatcataatatatgaatagaatttaatatagagacctttttgataacatctgttttgttttggttttttcttaattaccctaggtagttttggatgttgggtgtggaactggaattctctctatgtttgctgctaaagctggggcgaagaaggttcttggagttgatcaatctgaaatactttaccaggcaatggatattataagactaaataaacttgaagatactattacactaattaaaggaaagattgaagaagttcatcttcctgtagaaaaagtagatgttatcatatctgagtggatgggctattttcttctgtttgagtctatgttagattctgtcctttatgcaaagaacaaatacttggcaaaaggaggctcggtctaccctgacatttgcactatcagccttgtagcagtgagtgatgtgaataaacatgctgatagaattgctttttgggatgatgtctatggcttcaagatgtcctgcatgaagaaagcagttattccagaagctgttgtggaagttttagatccgaagactcttatttcagaaccttgtggtattaagcatatagattgccatacgacgtctatctcagatttggaattttcatcagattttaccctgaaaatcacaaggacatccatgtgcacggcaattgctggctactttgatatatattttgagaagaattgccacaacagggtcgtgttctctacgggccctcagagcaccaaaacacactggaaacaaacagtatttctactggaaaaaccattttcagttaaagcaggtgaagccttgaaaggaaaggtcacagttcacaagagtaagaaagatccacgttctctcaccgtgaccctcacgttgaataattcaactcaaacttatggtctccagtgaaacagccataaaagcacactaccttgtagtttttaatgtgggggtagagtgggtcagcaggagggagctggttttatgtgagcagatggatggatgatggaccctttcctaatgagcctcctcaataagagagaagttctcattgtgggaatctgacatagttcagctgaggaagagaatcagctgatcctcatggtctgccacgtaatcattttcttagacgtttgctccaccagatttaaccaaatgtaactcccacattgagtttatctatattgaaaatcatttacattggcctatatttggaagagagatagtcttttgtttttaataagtttcttactataaattttaaacaaattggttagttatttggatattttattaaactagtaacacaggtactacacattttattatggactcctctgaggaggagtttttaattgtatttgctagaaaatcaggatgtaataaagatttgtataaaaaaactaaaatatggaaaagagcttcagccttcatatacaaatcatatatgcagacagcctagttgattatctagcatacttagggttctcattttgtagtttcttccctctttgtgactattccttagccttatagatttctagtactgcccaggaaatctaatttcaatacatttatcctaggtttcatgaaagtttttaaagattgggataaatatgtacttatttactaacgtattatctttttcaaaccagatttatgtgcaaaggttaaacatgtaactgttactaagcagtctataaagttgtcatttacaattactgattcaatttgaaatgtagaataaaattttaataaaatgtatcaacttataaaatattttaaaaatattgatattataaaagttttcaataaaatatatcaaac

SEQ ID NO: 20863 - protein, 261 aa, Homo sapiens; identical to SEQ ID NO: 20861

SEQ ID NO: 20864 - DNA, 2856 bp, Homo sapiens
caaacacgcagccccctcccgctggagtgacaactggccagcatactctaggctgttgtccctttaaaacttgaatccaagggggtaatgatttatcaaacttgtattatcaagaaaatgtcaaaccaagggcaccttgctttgcactgacgcaaacccggcctttcccaaggagatatagaaagcgcctctcctgcctgagccaaacccagtcttgtcaatagcgggtttcaccctccaccagttcagtctgttgcctgtgtcagacatggattgcagtgctcccaaggaaatgaataaactgccagccaacagcccggaggcggcggcggcgcagggccacccggatggcccatgcgctcccaggacgagcccggagcaggagcttcccgcggctgccgccccgccgccgccacgtgtgcccaggtccgcttccaccggcgcccaaactttccagtcagcggacgcgcgagcctgcgaggctgagcggccaggagtggggtcttgcaaactcagtagcccgcgggcgcaggcggcctctgcagctctgcgggacttgagagaggcgcaaggcgcgcaggcctcgccccctcccgggagctccgggcccggcaacgcgctgcactgtaagatcccttttctgcgaggcccggagggggatgcgaacgtgagtgtgggcaagggcaccctggagcggaacaatacccctgttgtgggctgggtgaacatgagccagagcaccgtggtgctggccacggatggaatcacgtccgtgctcccgggcagcgtggccaccgttgccacccaggaggacgagcaaggggatgagaataaggcccgagggaactggtccagcaaactggacttcatcctgtccatggtggggtacgcagtggggctgggcaatgtctggaggtttccctacctggccttccagaacgggggaggtgctttcctcatcccttacctgatgatgctggctctggctggattacccatcttcttcttggaggtgtcgctgggccagtttgccagccagggaccagtgtctgtgtggaaggccatcccagctctacaaggctgtggcatcgcgatgctgatcatctctgtcctaatagccatatactacaatgtgattatttgctatacacttttctacctgtttgcctcctttgtgtctgtactaccctggggctcctgcaacaacccttggaatacgccagaatgcaaagataaaaccaaacttttattagattcctgtgttatcagtgaccatcccaaaatacagatcaagaactcgactttctgcatgaccgcttatcccaacgtgacaatggttaatttcaccagccaggccaataagacatttgtcagtggaagtgaagagtacttcaagtactttgtgctgaagatttctgcagggattgaatatcctggcgagatcaggtggccactagctctctgcctcttcctggcttgggtcattgtgtatgcatcattggctaaaggaatcaagacttcaggaaaagtggtgtacttcacggccacgttcccgtatgtcgtactcgtgatcctcctcatccgaggagtcaccctgcctggagctggagctgggatctggtacttcatcacacccaagtgggagaaactcacggatgccacggtgtggaaagatgctgccactcagattttcttctctttatctgctgcatggggaggcctgatcactctctcttcttacaacaaattccacaacaactgctacagggacactctaattgtcacctgcaccaacagtgccacaagcatctttgccggcttcgtcatcttctccgttatcggcttcatggccaatgaacgcaaagtcaacattgagaatgtggcagaccaagggccaggcattgcatttgtggtttacccggaagccttaaccaggctgcctctctctccgttctgggccatcatctttttcctgatgctcctcactcttggacttgacactatgtttgccaccatcgagaccatagtgacctccatctcagacgagtttcccaagtacctacgcacacacaagccagtgtttactctgggctgctgcatttgtttcttcatcatgggttttccaatgatcactcagggtggaatttacatgtttcagcttgtggacacctatgctgcctcctatgcccttgtcatcattgccatttttgagctcgtggggatctcttatgtgtatggcttgcaaagattctgtgaagatatagagatgatgattggattccagcctaacatcttctggaaagtctgctgggcatttgtaaccccaaccattttaacctttatcctttgcttcagcttttaccagtgggagcccatgacctatggctcttaccgctatcctaactggtccatggtgctcggatggctaatgctcgcctgttccgtcatctggatcccaattatgtttgtgataaaaatgcatctggcccctggaagatttattgagaggctgaagttggtgtgctcgccacagccggactggggcccattcttagctcaacaccgcggggagcgttacaagaacatgatcgaccccttgggaacctcttccttgggactcaaactgccagtgaaggatttggaactgggcactcagtgctagtccagtggtgtgggatggtccagacttgatcctgtttttcctctctgcctcctcctaatgttttccatagctctcctcccatttttcttcatctttcttcctacatcttggttcacatccacgcatgagagtgattatgtagaaaagtaggcatagtgtcgcatgctgcagtaaagagctacatagaccacctg

SEQ ID NO: 20865 - protein, 797 aa, Homo sapiens; identical to SEQ ID NO: 2645

SEQ ID NO: 20866 - DNA, 7263 bp, Homo sapiens
atggattttggatgtttccccaaaattacccactgtggctttcagctagatgaagtcatttccaataactgtggcacgcatgagcggatcgatgaagacccggccaaccggctgagggagcatcgggaccccctttggggatcggaggaggaggattccgacaggagggaagcggcagccctggggaaccaggattcctggtcgtgggtggacccagtggaaaaggacgtgcgaagcctgtacagaatggagcaggccggccaacagggccggggggcggcgggtcccgaggagggacgggaggctgcatgtccggaggaggtgcgggaggcggcagagcagggacctggggacggcttgagcggagaggagggggccagcgtggagccagccgggccggggggcggggagatggcggtctccgagggtggggcgccggccggtcttgcggtctggaggcggggaaagaggcgtggaaacagggacgcagcgaaggggaaaggaaagctgccagagggcaggagtggaaaggatcctggcgagcaccgggaggagtggcggctgcgggatcagctgccgagcaggcacagggacaggtgcctggagaagtactgggagagcgcccaggagcgctaccggctgagggtggggaagcgcagggccaagcgcgcgaagcaggttgtgggggaccgggtcgagtggaagtacccgccggagaggaaggccggctggctgtggcgcccagagacggtggagtccgaggaggaggagaaggaggcctgcagaaggaagagcaggcccttagaagtccagcagcagcaactccggcggcccacagtcagattcagcacctgcctcagatctccacgtctgtctcagctgcccctctcctgctgcctctcaggcaccagtgccattaacgagctggcgaagatgggcgacccggatctcctggaagtgttggcggaggaaggggaaaaagtcaataagcatatagactactctttccaaatgagtgagagcctgagcagcagagagaccagctttctcatcaatgaagaaacaatgcctgcaaagcgattcaatttgttcctgaggcggcggcttatgtttcaaaaaaatcagcaaagcaaagattctatcttcttccgagatgggattaggcaaattgattttgtgctttcctacgttgatgatgtaaagaaagacgcagagttaaaggcggaaagaagaaaagagtttgaaactaatctcagaaaaacaggtcttgagttggaaatagaagacaaaagggactcggaagatggaagaacttattttgtcaagatccatgccccttgggaggtattagttacctatgctgaagtcttgggaatcaaaatgcctattaaggagagtgatattccccgccctaagcacactcctataagctatgtgcttggacctgtaagactcccactgagtgtgaagtatccccatcctgaatattttactgcacaattcagcagacatcggcaggagctcttcctcatcgaagatcaggcaaccttctttccatcctcatcaagaaacagaattgtgtactatattctctcaagatgtccttttggcatagaagatgggaagaaaaggtttgggattgaaagactgctaaactctaacacttactcatctgcctatccactccatgatggccaatattggaagccatcagaacctcccaatcctaccaatgaaagatacacacttcaccagaattgggctcgattttcctatttctacaaggagcagcctttagacttgattaagaattattatggagaaaaaattggtatctattttgtctttcttggattttacacagaaatgctattctttgcagctgtagttggcttagcttgttttatttatggcttattatcaatggaacataacacaagcagcactgaaatctgtgaccctgagattggtggtcagatgatcatgtgcccactctgtgatcaagtgtgtgattattggagactaaatagtacgtgtttggcttcaaagttctcccatttgtttgataatgagtcaacagtgttctttgcaatattcatgggaatttgggtcaccttatttttggagttttggaaacaacgacaagccagactggaatatgaatgggacctggtggactttgaagaggaacagcagcagcttcagctgagaccagaatttgaagctatgtgtaaacacaggaaattgaatgcagtgactaaggagatggaaccttacatgcctctatacacgcgtattccatggtactttctttcaggagccacagtgacattatggatgtctcttgtcgtcaccagtatggtagctgtaattgtgtaccgcctgtcagtctttgctacatttgctagtttcatggaaagtgatgcatccttaaagcaggtcaaaagcttccttactcctcagataaccacatcactcacaggatcatgcttgaactttattgtcatcttgatcttgaatttcttttatgaaaagatatctgcctggatcacaaaaatggaaattcctcgaacataccaggagtatgagagcagtcttaccttgaaaatgttcctgtttcagtttgtaaatttttactcatcctgcttctacgtagctttctttaaagggaagttcgtaggctatcctggaaaatacacatatttatttaatgagtggagaagtgaagagtgtgatcctggaggctgtcttatagaattgacaacccaattgaccattataatgaccgggaaacagatttttggaaacattaaagaagccatttatcccttggctttgaattggtggagacgccgaaaagctcggacaaactctgagaagctgtatagtcgatgggagcaggatcatgaccttgaaagttttggaccccttgggcttttctatgagtacttagaaacagttactcaatttggatttgttacactatttgtggcctcttttcctttggctcctcttcttgctctcataaataatattgtagagattcgagtggatgcctggaaacttaccactcaatacaggagaactgtagcttctaaagctcatagcataggtgtttggcaagacattctttatggaatggctgtcctttctgttgcaactaatgcctttattgttgcatttacgtcagacatcattccccgtctagtttactactatgcttactcaacaaatgccacacagcctatgacaggatatgtgaataatagcctgtcagtattcctgatagctgattttccaaaccacactgcaccttcggaaaaacgagacttcatcacttgcaggtacagagattacagatatcctcctgatgacgagaataaatattttcataatatgcaattctggcatgtccttgctgccaagatgaccttcatcattgttatggaacatgttgtgtttttagttaaatttttgctggcctggatgatacctgatgttccaaaagatgttgtggagagaatcaagagagaaaagttaatgactatcaagattctccatgattttgagctcaacaaattaaaagagaacttgggaattaattctaatgaatttgccaagcatgtcatgattgaggaaaacaaagcacagctggctaaatcaacactctaatcagtatagtgaggaagcagcaggtgatctgccttacttcactttatcctctggttttagggccagacgccagaagccatgtgtcaattttaccctttcttttttttttttttctttttttttttaaactcaaagtttttatacacttttatagaggccaactttgtgatgttggaaatgtactacttctctgcttcattgactgggccctctccagatgttgttttctgaggtgctgtaaatgactgttgaaagtgcaggtagaatcagaatactgggaaattatggagtcttgcagtttagtaagaaacactggccttgggctgtcccatcactttccagtgcatctatttatttttgtggtcttctcttgggttatttgatacctccttccccattaagaaaaatgttggggcaaaaagaaatggatcaaagagactgactgagccctatatatcctatcattttaaaatatgcaaatgaattgccaagatcagatgacataagaaaactcacacattaaggtgttaatgtatcatagcagaggtttattcctaacacattcaactaccatcagaatcccagatagttcttcctggtaaaggcagaattccttttctcgagactgaaattttgggtttcaacataaaacaacttggttcttagagataataatttggttataatagtttcaagactgatcttatctggaaagcaacattatgaagctgttagattgcttcaggttctcaagcaaagacacaatacagaagtaaatgtgttttcttagtagttaatggatgcaggacaatgtatattgattaatttgttgattttaatttagaaaattgttaaattatttcttaaaaatcacttttcttctggaatgccaatttcacatcatgaagcctttttgtataagttagatacgagttgtttatgataaacatttctttgctttaaaataattgcaaatattttaataagtttacaaccttttctattgatgtatcatcttatacaatgctcagtgccttgttccaatacctctgacacacaagaagtcatgttgttagctagtgatttgatgtgatgtaacatcttaaatgtaagcttgtcttaatgaaattgtcagtgtaataacaactacagtcttgaaaaccaaaagtgaatcaaccaactaagaatgagttcatggacttaataatctaagggggaaaaaatgtttgttgaattattcctctcaaatttaggcttgtgttacatgcacaaaaatccttgttctgttttcacttaaaaaaactaaatatgtataactttgtgtatacacacacacacatctatatatataattattagcactagagggatatagtccagttatgtagtatttaaatctccagtttcaaattataattcacctccaaaagaatagttttttaatcacacacataagaaattttatcacaatatttaaaactaatatttcattatctaatgctaataaattattgtggtactgccagtattaaatatatggcagatggtattaactactgatcaatagtaagcatacagaactggggattatggattttataaactatgagacagtcaccccagtttggactgggactaatccccagtactgatttgtcatccactgagtagactttatgaatattttgggtaatttgaaatgatctcattattgaaagatgatttcatatgtagagaagataatatttctttcttgaaaaaacaagtcaggcttaccatgatgtgtgcaaccaatgtaggatctttggcttgtcaaatcagattctccattgctatagtgtacagtgcacacagctcatattgcttccttcctgggtgctgataaaaataagaaagagcatggaaattggtttcttgaatataagctttaatttttaaggcttaaaagtattcatagaggtagactgtatgataaataaaaacaaatttaattcacaaagttatctgtacactgcagttttaaaatataccaactaaattattgggtttctggaagtgaatggagaaaacagcaagggaagaaatcgtttttaagataagtaaataattcccatggattgataaatattttccttttaaaatgttatggactgatattttttattcacctttaaatttcttatcaagaagtttatctttgtttttcagatttaaaaatgaaatacaggtattcgtcactttcctgaaaccatgctaaccaaaatcagtagccaaaccaattcagatagatgtgtctcatctaattaaacccattggtttttatgggagggctgcattaagagcacccaaccaccacatgtaagttgataattaccagcatggcaggtgattttatctgctgaccaagcgcatagttttgttttgttttcagaatgttctagggaacatttgagattttatgtgaaataaaattttaagtgccaaagccaaaaaaatacttaactcttttcaaaggccctctttcatccttgccttcgtcaactttcctttgcacacaggaagcaaaatctacttcaagacatttattttagaggaatccattaagaaaggattgttttacttaaatgaaatgctgtcttatttttgctgtgtcttttgacacctcttagctttaacattcttcttttaaccaagccattatgcaaagttatcaaagaagaggagaaggaaaggaggacagatgaaagtgacgggaaatgagaaagaagaggagtgaggaaacagttatttccttatgaatcctgtgtgtttctttggaagaaagagctgttccgaggaagtttggtccagctgtggttgataagaggtatatctcttaaaaaagacacctaatgaaagtgagagaaaagctaaagaaaatttcaatgtgaccactattatgtgtcaaaataaaacttagattccaaagtggttttgtagtgttgggtgctatgagtaggtatggatctctgttgattgactccagttgaaggtgagaaatctgtaccaatcattcaaaaagggaatctattgttttgaaagaaactctctcatatttcctttaaattgttaatagttgttatgcaactaaagaatgttatgaagaaaaatagcattgcaaaaagtaccattggccagccttacaagtcagccacaatgagtcggtataactactgtgttattctttttctagacaaattttgactcttctacttttatgtgtaataattccagtattctatttatttcagcattatgtgaaaaatgataagaatgttaaaaagaaaataatagtgtggtttaattggtatgagatacctgcttcctcctcctcaaaggtttgactgggtgtatctctcctatgtgtgacattatgtctcctggtgttaacacaggaaatgagtgctcctttttaaaatttctttcttccaagtttttttttccaggaagagaaatatgcagttatgcaggaaaagctctcttaaataatgtgtacataaatctcaagagaatcaaattcacagagtgaataaagtaataatattaaactac

SEQ ID NO: 20867 - protein, 1223 aa, Homo sapiens [sequence omitted]

SEQ ID NO: 20868 - DNA, 7482 bp, Homo sapiens
atggattttggatgtttccccaaaattacccactgtggctttcagctagatgaagtcatttccaataactgtggcacgcatgagcggatcgatgaagacccggccaaccggctgagggagcatcgggaccccctttggggatcggaggaggaggattccgacaggagggaagcggcagccctggggaaccaggattcctggtcgtgggtggacccagtggaaaaggacgtgcgaagcctgtacagaatggagcaggccggccaacagggccggggggcggcgggtcccgaggagggacgggaggctgcatgtccggaggaggtgcgggaggcggcagagcagggacctggggacggcttgagcggagaggagggggccagcgtggagccagccgggccggggggcggggagatggcggtctccgagggtggggcgccggccggtcttgcggtctggaggcggggaaagaggcgtggaaacagggacgcagcgaaggggaaaggaaagctgccagagggcaggagtggaaaggatcctggcgagcaccgggaggagtggcggctgcgggatcagctgccgagcaggcacagggacaggtgcctggagaagtactgggagagcgcccaggagcgctaccggctgagggtggggaagcgcagggccaagcgcgcgaagcaggttgtgggggaccgggtcgagtggaagtacccgccggagaggaaggccggctggctgtggcgcccagagacggtggagtccgaggaggaggagaaggaggcctgcagaaggaagagcaggcccttagaagtccagcagcagcaactccggcggcccacagtcagattcagcacctgcctcagatctccacgtctgtctcagctgcccctctcctgctgcctctcaggcaccagtgccattaacgagctggcgaagatgggcgacccggatctcctggaagtgttggcggaggaaggggaaaaagtcaataagcatatagactactctttccaaatgagtgagagcctgagcagcagagagaccagctttctcatcaatgaagaaacaatgcctgcaaagcgattcaatttgttcctgaggcggcggcttatgtttcaaaaaaatcagcaaagcaaagattctatcttcttccgagatgggattaggcaaattgattttgtgctttcctacgttgatgatgtaaagaaagacgcagagttaaaggcggaaagaagaaaagagtttgaaactaatctcagaaaaacaggtcttgagttggaaatagaagacaaaagggactcggaagatggaagaacttattttgtcaagatccatgccccttgggaggtattagttacctatgctgaagtcttgggaatcaaaatgcctattaaggagagtgatattccccgccctaagcacactcctataagctatgtgcttggacctgtaagactcccactgagtgtgaagtatccccatcctgaatattttactgcacaattcagcagacatcggcaggagctcttcctcatcgaagatcaggcaaccttctttccatcctcatcaagaaacagaattgtgtactatattctctcaagatgtccttttggcatagaagatgggaagaaaaggtttgggattgaaagactgctaaactctaacacttactcatctgcctatccactccatgatggccaatattggaagccatcagaacctcccaatcctaccaatgaaagatacacacttcaccagaattgggctcgattttcctatttctacaaggagcagcctttagacttgattaagaattattatggagaaaaaattggtatctattttgtctttcttggattttacacagaaatgctattctttgcagctgtagttggcttagcttgttttatttatggcttattatcaatggaacataacacaagcagcactgaaatctgtgaccctgagattggtggtcagatgatcatgtgcccactctgtgatcaagtgtgtgattattggagactaaatagtacgtgtttggcttcaaagttctcccatttgtttgataatgagtcaacagtgttctttgcaatattcatgggaatttgggtcaccttatttttggagttttggaaacaacgacaagccagactggaatatgaatgggacctggtggactttgaagaggaacagcagcagcttcagctgagaccagaatttgaagctatgtgtaaacacaggaaattgaatgcagtgactaaggagatggaaccttacatgcctctatacacgcgtattccatggtactttctttcaggagccacagtgacattatggatgtctcttgtcgtcaccagtatggtagctgtaattgtgtaccgcctgtcagtctttgctacatttgctagtttcatggaaagtgatgcatccttaaagcaggtcaaaagcttccttactcctcagataaccacatcactcacaggatcatgcttgaactttattgtcatcttgatcttgaatttcttttatgaaaagatatctgcctggatcacaaaaatggaaattcctcgaacataccaggagtatgagagcagtcttaccttgaaaatgttcctgtttcagtttgtaaatttttactcatcctgcttctacgtagctttctttaaagggaagttcgtaggctatcctggaaaatacacatatttatttaatgagtggagaagtgaagagtgtgatcctggaggctgtcttatagaattgacaacccaattgaccattataatgaccgggaaacagatttttggaaacattaaagaagccatttatcccttggctttgaattggtggagacgccgaaaagctcggacaaactctgagaagctgtatagtcgatgggagcaggatcatgaccttgaaagttttggaccccttgggcttttctatgagtacttagaaacagttactcaatttggatttgttacactatttgtggcctcttttcctttggctcctcttcttgctctcataaataatattgtagagattcgagtggatgcctggaaacttaccactcaatacaggagaactgtagcttctaaagctcatagcataggtgtttggcaagacattctttatggaatggctgtcctttctgttgcaactaatgcctttattgttgcatttacgtcagacatcattccccgtctagtttactactatgcttactcaacaaatgccacacagcctatgacaggatatgtgaataatagcctgtcagtattcctgatagctgattttccaaaccacactgcaccttcggaaaaacgagacttcatcacttgcaggtacagagattacagatatcctcctgatgacgagaataaatattttcataatatgcaattctggcatgtccttgctgccaagatgaccttcatcattgttatggaacatgttgtgtttttagttaaatttttgctggcctggatgatacctgatgttccaaaagatgttgtggagagaatcaagagagaaaagttaatgactatcaagattctccatgattttgagctcaacaaattaaaagagaacttgggaattaattctaatgaatttgccaagcatgtcatgattgaggaaaacaaagcacagctggctaaatcaacactctaatcagtatagtgaggaagcagcaggtgatctgccttacttcactttatcctctggttttagggccagacgccagaagccatgtgtcaattttaccctttcttttttttttttttctttttttttttaaactcaaagtttttatacacttttatagaggccaactttgtgatgttggaaatgtactacttctctgcttcattgactgggccctctccagatgttgttttctgaggtgctgtaaatgactgttgaaagtgcaggtagaatcagaatactgggaaattatggagtcttgcagtttagtaagaaacactggccttgggctgtcccatcactttccagtgcatctatttatttttgtggtcttctcttgggttatttgatacctccttccccattaagaaaaatgttggggcaaaaagaaatggatcaaagagactgactgagccctatatatcctatcattttaaaatatgcaaatgaattgccaagatcagatgacataagaaaactcacacattaaggtgttaatgtatcatagcagaggtttattcctaacacattcaactaccatcagaatcccagatagttcttcctggtaaaggcagaattccttttctcgagactgaaattttgggtttcaacataaaacaacttggttcttagagataataatttggttataatagtttcaagactgatcttatctggaaagcaacattatgaagctgttagattgcttcaggttctcaagcaaagacacaatacagaagtaaatgtgttttcttagtagttaatggatgcaggacaatgtatattgattaatttgttgattttaatttagaaaattgttaaattatttcttaaaaatcacttttcttctggaatgccaatttcacatcatgaagcctttttgtataagttagatacgagttgtttatgataaacatttctttgctttaaaataattgcaaatattttaataagtttacaaccttttctattgatgtatcatcttatacaatgctcagtgccttgttccaatacctctgacacacaagaagtcatgttgttagctagtgatttgatgtgatgtaacatcttaaatgtaagcttgtcttaatgaaattgtcagtgtaataacaactacagtcttgaaaaccaaaagtgaatcaaccaactaagaatgagttcatggacttaataatctaagggggaaaaaatgtttgttgaattattcctctcaaatttaggcttgtgttacatgcacaaaaatccttgttctgttttcacttaaaaaaactaaatatgtataactttgtgtatacacacacacacatctatatatataattattagcactagagggatatagtccagttatgtagtatttaaatctccagtttcaaattataattcacctccaaaagaatagttttttaatcacacacataagaaattttatcacaatatttaaaactaatatttcattatctaatgctaataaattattgtggtactgccagtattaaatatatggcagatggtattaactactgatcaatagtaagcatacagaactggggattatggattttataaactatgagacagtcaccccagtttggactgggactaatccccagtactgatttgtcatccactgagtagactttatgaatattttgggtaatttgaaatgatctcattattgaaagatgatttcatatgtagagaagataatatttctttcttgaaaaaacaagtcaggcttaccatgatgtgtgcaaccaatgtaggatctttggcttgtcaaatcagattctccattgctatagtgtacagtgcacacagctcatattgcttccttcctgggtgctgataaaaataagaaagagcatggaaattggtttcttgaatataagctttaatttttaaggcttaaaagtattcatagaggtagactgtatgataaataaaaacaaatttaattcacaaagttatctgtacactgcagttttaaaatataccaactaaattattgggtttctggaagtgaatggagaaaacagcaagggaagaaatcgtttttaagataagtaaataattcccatggattgataaatattttccttttaaaatgttatggactgatattttttattcacctttaaatttcttatcaagaagtttatctttgtttttcagatttaaaaatgaaatacaggtattcgtcactttcctgaaaccatgctaaccaaaatcagtagccaaaccaattcagatagatgtgtctcatctaattaaacccattggtttttatgggagggctgcattaagagcacccaaccaccacatgtaagttgataattaccagcatggcaggtgattttatctgctgaccaagcgcatagttttgttttgttttcagaatgttctagggaacatttgagattttatgtgaaataaaattttaagtgccaaagccaaaaaaatacttaactcttttcaaaggccctctttcatccttgccttcgtcaactttcctttgcacacaggaagcaaaatctacttcaagacatttattttagaggaatccattaagaaaggattgttttacttaaatgaaatgctgtcttatttttgctgtgtcttttgacacctcttagctttaacattcttcttttaaccaagccattatgcaaagttatcaaagaagaggagaaggaaaggaggacagatgaaagtgacgggaaatgagaaagaagaggagtgaggaaacagttatttccttatgaatcctgtgtgtttctttggaagaaagagctgttccgaggaagtttggtccagctgtggttgataagaggtatatctcttaaaaaagacacctaatgaaagtgagagaaaagctaaagaaaatttcaatgtgaccactattatgtgtcaaaataaaacttagattccaaagtggttttgtagtgttgggtgctatgagtaggtatggatctctgttgattgactccagttgaaggtgagaaatctgtaccaatcattcaaaaagggaatctattgttttgaaagaaactctctcatatttcctttaaattgttaatagttgttatgcaactaaagaatgttatgaagaaaaatagcattgcaaaaagtaccattggccagccttacaagtcagccacaatgagtcggtataactactgtgttattctttttctagacaaattttgactcttctacttttatgtgtaataattccagtattctatttatttcagcattatgtgaaaaatgataagaatgttaaaaagaaaataatagtgtggtttaattggtatgagatacctgcttcctcctcctcaaaggtttgactgggtgtatctctcctatgtgtgacattatgtctcctggtgttaacacaggaaatgagtgctcctttttaaaatttctttcttccaagtttttttttccaggaagagaaatatgcagttatgcaggaaaagctctcttaaataatgtgtacataaatctcaagagaatcaaattcacagagtgaataaagtaataatattaaactacattttgacatgaactcaatttattcttccagtaaaatgttgactttttggagtgtaagtactccttttttagtcatatttgttgtttagaaacatgaaagtgtatatatatataacgtgtttagctcatgaaattacatatttttgcacatttagatgtttgcatattaacgatgtaaattccttgaagtaagaagctggataatccagaaaaatttga

SEQ ID NO: 20869 - protein, 1223 aa, Homo sapiens [sequence omitted]

SEQ ID NO: 20870 - DNA, 784 bp, Homo sapiens
gaaagttttggaccccttgggcttttctatgagtacttagaaacagttactcaatttggatttgttacactatttgtggcctcttttcctttggctcctcttcttgctctcataaataatattgtagagattcgagtggatgcctggaaacttaccactcaatacaggagaactgtagcttctaaagctcatagcataggtgtttggcaagacattctttatggaatggctgtcctttctgttgcaactaatgcctttattgttgcatttacgtcagacatcattccccgtctagtttactactatgcttactcaacaaatgccacacagcctatgacaggatatgtgaataatagcctgtcagtattcctgatagctgattttccaaaccacactgcaccttcggaaaaacgagacttcatcacttgcaggtacagagattacagatatcctcctgatgacgagaataaatattttcataatatgcaattctggcatgtccttgctgccaagatgaccttcatcattgttatggaagctccaaccaagcatcatcctgggacttctcttcatcttgtcttctattgaagactaaattttctgcaatctatgtttctcccatttttggtttactagcttattttggtgaagcacatcttctagtaattttctgaggaaaaattatgggcagtccatttttgagaaattgaagattgaaaatttcttttctttccttacatgtgattatttggaatagaatgtataattaaaagttgtttttctt

SEQ ID NO: 20871 - protein, 120 aa, Homo sapiens
MAVLSVATNAFIVAFTSDIIPRLVYYYAYSTNATQPMTGYVNNSLSVFLIADFPNHTAPSEKRDFITCRYRDYRYPPDDENKYFHNMQFWHVLAAKMTFIIVMEAPTKHHPGTSLHLVFY

SEQ ID NO: 20872 - DNA, 485 bp, Homo sapiens
agctgaaaaacaatgtaaattcccggttttgaagacttattgctctcaaatctgatggcttttaaacggaggggccggaatatcacagaagccttgggaacagcaaagtcaaaagaatggtacttttaaaaatggtgtctttgctgtaaggagcagagcatattcaaaactcatgggagcatctcaggtctcagatttcttcagaagatgaaatagatcatctgccttaaggttctggaccagtgtatgcaacacaataaacgttcaggaaatggttgctatgatgatgacgacgatgattatgacaacaatgatgatgatgaaatgagttggcttcagcccagagcagaatatgttccctaataaagtatgaggatgtcagcacatgccatttgtgtcccacccaaagctgcaaacttacttaaagtttatctgtagcttcaggggacaatttccataatgactgatggcattttaccctgggt

SEQ ID NO: 20873 - protein, 38 aa, Homo sapiens
MQHNKRSGNGCYDDDDDDYDNNDDDEMSWLQPRAEYVP

SEQ ID NO: 20874 - DNA, 3920 bp, Homo sapiens
cgtttaaaagccatcagatttgagagcaataagtcttcaaaaccgggaatttacattgtttttcagctgaccgacttccaggaaaaggactcaaccgcatctacccaaataccgtggcactgcttgcgctctttgccaccggatcctccccttccaatgagactttctgattgtgtctaccaactctcctattaggaaacccgtgggttgcatgcagctattctgttgtattctcattctcactctccctcccttctctcactctcactcttgctggaggcgagccactaccattctgctgagaaggaaaagcccgcaactactttaagagattaagacaatatgcgcaatcctcgcctttcctagcaatcactatttaaatctggcaagaactgacaacagtctttgcaagaatggaatccgtaaaacaaaggattttggccccaggaaaagaggggctaaagaattttgctggaaaatcactcggccagatctacagggtgctggagaagaagcaagacaccggggagacaatcgagctgacggaggatgggaagcccctagaggtgcccgagaggaaggcgccgctgtgcgactgcacgtgcttcggcctgccccgccgctacattatcgccatcatgagcggcctgggcttctgcatctccttcggtatccgctgcaacctgggcgtggccattgtggacatggtcaacaacagcaccatccaccgcgggggcaaggtcatcaaggagaaagccaaattcaactgggacccggaaaccgtggggatgatccacggttccttcttttggggctacatcatcactcagattccgggaggctacatcgcgtctcggctggcagccaacagggttttcggagctgccatacttcttacctctaccctaaatatgctaattccatcagcagccagagtgcattatggatgtgtcatctttgtcagaatactgcagggacttgttgagggtgtgacctacccagcatgtcatgggatatggagcaaatgggccccacctctagagaggagtagactggcaaccacctccttttgtggttcctatgccggagctgtgattgcaatgcctttagctggcattcttgtgcagtacactggctggtcttcagtgttttatgtctacggaagctttggaatggtctggtacatgttttggcttttggtgtcttatgaaagtcctgcaaagcatcctactattacagatgaagaacgtaggtacatagaagaaagcattggagagagtgcaaatcttttaggtgcaatggaaaaattcaagactccatggaggaagttttttacatccatgccagtctatgcaataattgttgcaaacttctgcagaagctggactttttatttattgcttattagtcagccagcatattttgaggaagtctttggatttgaaattagcaaggttggtatgctatctgctgtgccacacttagtaatgacaattattgtgcctattgggggacaaattgcagattttctaagaagcaagcagattctttcaactacgacagtgagaaagatcatgaattgtggtggttttggcatggaagccacactgctcctggtcgttggctattctcatactagaggggtagcaatctcattcttggtacttgcagtgggattcagtggatttgctatatctggtttcaatgttaaccacttggatatcgctccaagatatgccagtatcttaatgggcatttcgaatggtgttggcacattgtcaggaatggtttgtcctatcattgttggtgcaatgacaaagaataagtcacgtgaagagtggcagtatgtcttcctgatcgctgccctagtccactatggtggagttatattttatgcaatatttgcctcaggagagaaacaaccctgggcagacccggaggaaacaagtgaagaaaaatgtggatttattcatgaagatgaactcgatgaagaaacaggggacattactcaaaattatataaattatggtaccaccaagtcttatggtgccacaacacaggccaatggaggttggcctagtggttgggaaaagaaagaggaatttgtacaaggagaagtacaagactcacatagctataaggaccgagttgattattcataacaaaactaattactggatttatttttagtgtttgtgattaaattcattgtgattgcacaaaaattttaaaaacacgtgatgtaaacttgcaagcatatcaaccaggcaagtcttgctgtaaaaatgaaaacaaaacaaacccatgaggttaccatcaagtgcaatctgtaaaattgtgaagttccatcatttccattcaagtcatccattcttgcatttgtgacttaaaggttgactggtcaaaattgtagaaacaagtagttacccattggattcatatgagctaaaactcatcactatttactaaagcacaacatctcatcctacaaaagttaagaagccaaagctacttgatcatgcaaaatgcacttatatatttgttacactgtattgcaagatagcacacagaagttggctgcgtcaagtagaggcgacatttattaagtgaaaatcatggagttgggatatctctcaattaaagaaatacattgtgaactatcagctacaaagttgtactgaataactattagaattgcataatgtgagatattttgttagtcctcaaaaggaatatcttgcagtgttttctatgaaatgcttgggcacaaacacttatttctgtgaaagagaacatgtaagttgaggggtatgcttcatgttcttccatccatttacctaatagtatgaaacagttcacatttcaataaaatcaaacttttcatgtagcgtatcacataacttttttgcaaaaaatataaaaagaaataaacttcaatgtattttttattacaactttgtactggttgtaacttgcattagaaaaaaaagagatatatacaccacaaagaatctaataagaaatttattatggagatatagcccttaaaatgcaatattaagaacaaagaaatagaaaatggtttagatatctttcttccttcataattaaatactatatgaaacttgtgccacagagctatatataatatgaaaagattaacttcatagagatattgtaagtaggtaattttattatttaaagtcctattaagaaatatttgtcttaaatatataggacaatacattatattaaaatggtctctctctatatatatctgtatatcttatacatgtccatacacagaaacataataaacaatcttcacacgaaaccaaaaatagcatacacctaatgttgggttagggaattgcaatttctactttcatagagtcatagaattttaggtggggaagaggcattttgcttgtcatttcttaatataactcaacaagaattgcaacatttgtgtaccaagcaataagtgcaatgcataaaatttcctgtctgtatattaccttcattttgcttgtagtagctgtttgggtggttggaataattttatttttcttttaaaaaagctaacatcagacccctttataatgtcctaaaattatgataatacatttcccaattcaactcaaaatattattggtgtattttgtctattctggatatttgatctgttcaatgtactgtgctagtgactggaggccctgctactgcaaatataaaacataaagtttgtttaaaaaaatgcaaatcattctttaccttaagaaaaaaaaaataccctttgctttgtgcctcaaagtgatgtaatgtgatcacagcttttgttgtgttgaatgaaaatatgtggactgtcattttgttgcagcaaaaaagtgttaataaaatgctctatttatccttttttt

SEQ ID NO: 20875 - protein, 582 aa, Homo sapiens; identical to SEQ ID NO: 2649

SEQ ID NO: 20876 - DNA, 6652 bp, Homo sapiens
ctttcaaataaggtgttgatttatgtggtcttgagaaatctttgttgctctgatcttaagtttctttttataatattagaatcatagtttacctacattacagggcttttatgaagattaaatcgagcatcgtgggtagtgttttttcagcccctgtgactaagtaggttataaatggtcctcagtcatcatcatcataaatgattcaaggcctgaatggcagaagaagaagaggaaaactcaagtgaaaagtgctagacatagaacacagcttacctaataaaacatgctactggctaactaagctggggtggctttctgccccctctacttaaatttaagaaagaaaaacagaaacgtctctgcatctgccactgcataccctctcagagcacagaccaactttgcccttccttaaaagtcccagggtttacctaccaacttttaggaaataaataaccagcctcaaagcttggcaaagagggcatcagtatcagctctagaggtttgctccgatttatatctcctcctccagtaaagtcttctgctcccactcccagccaaccccgctcaacgcccacccctcactgtggcactggacgcgcgggggatgcggggttgttcccagagtagccgctaaggggagccggacgctagaccgccctcccgcgttcccatgacaacgacaccggcgggcgcgtagcctggagagcgaagtgccggctacagcaggtgtcggattgcagtgcgctcgctgaggctccggaccttggagcgtctagagtctggctactgttcctccgcctccctctcgggcagctccctaagccggctgggacgcgcagagtgaaaatggtccaccattcaggctccattcagtcctttaaacagcaaaaaggtatgaatataagcaagagtgagataacaaaagaaacttcgttaaaaccgtctcggagatccctgccttgcctcgcccagagctacgcttactcaaagagcttgagccagtctacttccctcttccagtcaaccgagagtgaatctcaggctcccacatctataaccttaatctccactgacaaagcagagcaagttaatactgaggagaataaaaacgactctgtgctgagatgttcatttgctgacctcagcgatttttgtttggccctaggaaaagataaggattacacggatgaatcagaacacgctacttatgaccgatctcgtctcattaatgactttgttatcaaagataaatctgaattcaagacaaaattatctaagaatgacatgaattacatagcatccagtggacctctgttcaaagatggcaaaaagagaattgattacatcttggtttatagaaagacaaatatacaatatgataaaagaaacacatttgaaaagaacctcagagcagaaggcttgatgttggagaaggagccagctattgcaagccccgatatcatgtttattaaaattcacattccatgggacacgctgtgcaagtatgcagagaggctgaatatcaggatgcccttcaggaaaaaatgctattacactgacgggaggagcaaatcaatgggcaggatgcaaacttattttagaagaatcaaaaactggatggcccaaaacccaatggttcttgacaagtcagcttttccagacctagaggagtcagactgctatactggccccttcagccgtgcacggattcaccacttcataataaataataaagacaccttcttcagcaatgctactcgaagcagaatagtctatcacatgctggaacgcaccaaatatgaaaatggaatatcaaaagtgggtatccgtaaacttataaacaatggctcatacatagcagcgtttccaccacatgagggagcctacaaaagtagccagcccattaaaacccatggacctcagaataacagacatctattatatgagcgctgggcacgctggggaatgtggtataagcatcagcctctggatttaatcaggctatactttggtgagaagattggactatactttgcttggctgggatggtatactggaatgttgattcctgcagcaattgttggtttgtgcgttttcttctatggattatttacaatgaataatagtcaagtaagccaagaaatttgtaaagccactgaagtctttatgtgccctctctgtgacaagaactgctccctgcagagactcaacgacagctgtatctatgccaaggtgacatatttgttcgataatggagggacagtcttctttgctatttttatggcaatatgggccacagtcttcctggagttttggaaaaggagaaggagtatactgacctatacttgggaccttatcgaatgggaagaagaggaggaaacacttcgtccccagtttgaagccaagtattacaagatggagattgtaaatcccatcacgggaaaacctgaaccacatcagccttcctcagacaaagtcactcgtcttcttgtttctgtctcaggaatattcttcatgatatccttggtgatcactgcagtgtttggagttgtggtgtaccgcctggttgtcatggaacagtttgcatcattcaagtggaatttcatcaaacaatactggcagtttgcaacatctgctgctgctgtctgtatcaatttcataatcattatgttgctgaatcttgcttatgaaaaaattgcttacctcctcaccaatttagaatatcctcgaacagaatcagagtgggaaaacagcttcgccctgaagatgttcctcttccagtttgtcaatttaaacagttccatcttctatatcgctttctttttgggaagattcgtaggccacccaggaaaatacaataaactttttgaccggtggagactggaggaatgtcatcctagtggctgtttgatagacctctgcctccagatgggtgtcatcatgtttttgaagcaaatatggaacaacttcatggaactaggatacccgttgatccagaactggtggtcacgacataaaatcaagcggggaatacatgatgcttccatacctcagtgggaaaatgattggaatctgcagcccatgaaccttcatggactgatggatgagtacttagaaatggttttgcaatttggttttaccaccatctttgttgcggcttttcctctagcccctcttttggctttgttaaacaatatcattgaaatcaggctggatgcatacaaatttgtcactcaatggcggaggcctttgccagcccgagcaactgacataggtatctggcttggaattctcgaaggaatcggtatattggctgtgatcaccaatgcatttgtaattgctattacttctgattacatcccacgttttgtttatgaatacaaatatggcccctgtgcaaatcatgtagaaccaagtgaaaattgcttgaagggatatgtcaacaatagcctatccttctttgacctgagtgagcttggtatgggaaaatctggttattgcaggtacagagactacagaggcccgccctggagttccaaaccctatgagtttactttacaatactggcatatccttgctgctagattggccttcattattgtgtttgagcaccttgtttttgggattaagtcattcatcgcatacctgattccagacgtaccaaagggtctacatgaccgaatacgacgagagaagtacttagttcaagaaatgatgtatgaggctgaactggaacatttgcaacaacaacggagaaaaagtggtcagcctgttcaccatgaatggccttagttgacacctgttacccattaggggtgataacattaatgggaagaaatgatggcaactttgaatgctaggtgaaatctaggaggaaggcatacttggcaaaccacatgtataatatgctacttggaaatgtatcacagccatctctgggatttgaaatatccagacttgtagggaagaaaacaatgacttgacgaccttaaaaagggttagattgacattgcaggaagccaggatgtaattctcagaaccagtctcagggagatatatgcttggagaactctgccttccatcaactgcagtgtaatgggaaagagggtggtgaggttttgaaagacagatttccatgtaaatgtgcacaagccaggcatggcttaaaatatcatgcagtcttcactcacatactaatttgactttggaaagtatggttgagttcagatacttataagaaatgacttaaacaaatccttgccttggctgccagaactctacatcccttcagtttacaggttggtaggaattgcccatgtctcttgctgagattatggatctgtgccacaggggatttatgctgctttacattgactatgcagttgaagagttgcacatcacctttagtagtcaaaccaaaaatctaagattccaaaaagaacagcattcattgaaataatattccattgcattggctacttcaagtctcttttacccctggcagagccagttgcagtgcaattttttgtactaaatgccaataaagccacatacttataaactatgaatggctattcttatatagtttagaacacaactaatccatactttattgtggaaggctgttttatagtttatttaattttttctctatgatttattacaactctcacggaatattaacttgaaatgctgtaaatacgttggttttccttgtccctttgcaccttgacagtacgtagtatacattgtggtttatgcagctctgacaccagtttttgctattgtaatatgtttattcgggaaaactgaggccagatgctctgcaacacttacgctttttcaacaatgtgcactcttactcatgaactaatgaaaataatgcatgaatataaatctatattatttgctaaaaaaagaaaaaacatttgtgttttagtttcttttttcatgactgaagggagttttatgttattatttcttccatagttttgttttggtttatttttaacaacgctctagaaacaaagtcaaattaatcacaaaagacataattttgctttgttgtggaatttctatttcaacgtcaactctgtatctatgagtatgtctgttccacagacagatgaggcaggagtgatggggcactcaagaaagttcagaggaggcataagctatggaggttggaaaggaagaaagagaagagctgaagtaaatgtatggtagaaattaagacgtttctttgcaaaacaaggaaatcacacatatgcacacatacatatttatggttactatgattgttattatttgtccaatcaagcaaagcaccattatttctaacatataaaagaccagatcaaacacaatggaaataaagctactacatatatatgccagtatttctctagtaagattatgtttctcttactagaaaactattttctaaatattaacactgaaaatgttttgttagcttttccttctttctctccagaagaaacatggatagatgatagctgtttcattgtttgtttttgtcaagcatattcactttcctccttgtcctctgattctgagcaaagggcctcagactctgaacttccctcaagtgccgttgttatgtgaaactcttccattcagattccagagaggttctcatgctcccccccctccttatttgtagcaatcgtagcaactaattccactaagtacaagggagttttttacactcctccatttttatagcatctgcatttctttttctttgttaggtacatgtatacacctgcctgagtataaatactctctctacctaataataacatcaaccaacatcttttccaaattagggccacagaacagcaacatttgtctgacagtagtataaagaataatgatagctctatccttaagaagtatttcctttcctttttatatagtcccgttagggtttaaaaccatattgatcaactagaaagaaaaatatgaaaagagaaaaatattttaatttaaaaattgtaatacattgatttataaaatgccttctctgatacttttgaaacagatgtgaaaaacagaaaaagaaaaaattgtctgaaatgtttattttgcaaaacagtgcaatagaatctagttatgccttcatcactgttgacagtaaatactgacagccccttgcagtgtgttagttttagatcactctgttttagttgagagaaatgttttatatcatggtttttatatgaatacaaattatttctcaaagatttatagcacacactattctcaggaattctgtattacatgaatgctgcttatatattttcatattctaacttgtcttttcaagcaaataactaatatatatgtgcatgcagtctgccttgacaagttgttccaagctgaagagctttcactgtacaatgtgtggaaaatcaccatagatcatggctgaaatagtttgtaattgtctgagtctgtgcacgtacttttagataaaatgctgctgagtgactgcatgatgagatacaacttctgaatgctgcacattcttccaaaatgatccttagcacaatctattgtatgatggaatgaatagaaaactttttcactcaataaattattatttgatatggtattttcccta

SEQ ID NO: 20877 - protein, 981 aa, Homo sapiens
MVHHSGSIQSFKQQKGMNISKSEITKETSLKPSRRSLPCLAQSYAYSKSLSQSTSLFQSTESESQAPTSITLISTDKAEQVNTEENKNDSVLRCSFADLSDFCLALGKDKDYTDESEHATYDRSRLINDFVIKDKSEFKTKLSKNDMNYIASSGPLFKDGKKRIDYILVYRKTNIQYDKRNTFEKNLRAEGLMLEKEPAIASPDIMFIKIHIPWDTLCKYAERLNIRMPFRKKCYYTDGRSKSMGRMQTYFRRIKNWMAQNPMVLDKSAFPDLEESDCYTGPFSRARIHHFIINNKDTFFSNATRSRIVYHMLERTKYENGISKVGIRKLINNGSYIAAFPPHEGAYKSSQPIKTHGPQNNRHLLYERWARWGMWYKHQPLDLIRLYFGEKIGLYFAWLGWYTGMLIPAAIVGLCVFFYGLFTMNNSQVSQEICKATEVFMCPLCDKNCSLQRLNDSCIYAKVTYLFDNGGTVFFAIFMAIWATVFLEFWKRRRSILTYTWDLIEWEEEEETLRPQFEAKYYKMEIVNPITGKPEPHQPSSDKVTRLLVSVSGIFFMISLVITAVFGVVVYRLVVMEQFASFKWNFIKQYWQFATSAAAVCINFIIIMLLNLAYEKIAYLLTNLEYPRTESEWENSFALKMFLFQFVNLNSSIFYIAFFLGRFVGHPGKYNKLFDRWRLEECHPSGCLIDLCLQMGVIMFLKQIWNNFMELGYPLIQNWWSRHKIKRGIHDASIPQWENDWNLQPMNLHGLMDEYLEMVLQFGFTTIFVAAFPLAPLLALLNNIIEIRLDAYKFVTQWRRPLPARATDIGIWLGILEGIGILAVITNAFVIAITSDYIPRFVYEYKYGPCANHVEPSENCLKGYVNNSLSFFDLSELGMGKSGYCRYRDYRGPPWSSKPYEFTLQYWHILAARLAFIIVFEHLVFGIKSFIAYLIPDVPKGLHDRIRREKYLVQEMMYEAELEHLQQQRRKSGQPVHHEWP

SEQ ID NO: 20878 - DNA, 3158 bp, Homo sapiens
tctaatgcacgacagattcctttcagacaggacaactgtgatatttcagttcctgattgtaaatacctcctaagcctgaagattcctttaaaaaaaaaccaataccaaagaagcctacaatgttggccttagccaaaattctgttgatttcaacgttgttttattcacttctatcggggagccatggaaaagaaaatcaagacataaacacaacacagaacattgcagaagtttttaaaacaatggaaaataaacctatttctttggaaagtgaagcaaacttaaactcagataaagaaaatataaccacctcaaatctcaaggcgagtcattcccctcctttgaatctacccaacaacagccacggaataacagatttctccagtaactcatcagcagagcattctttgggcagtctaaaacccacatctaccatttccacaagccctcccttgatccatagctttgtttctaaagtgccttggaatgcacctatagcagatgaagatcttttgcccatctcagcacatcccaatgctacacctgctctgtcttcagaaaacttcacttggtctttggtcaatgacaccgtgaaaactcctgataacagttccattacagttagcatcctctcttcagaaccaacttctccatctgtgacccccttgatagtggaaccaagtggatggcttaccacaaacagtgatagcttcactgggtttaccccttatcaagaaaaaacaactctacagcctaccttaaaattcaccaataattcaaaactctttccaaatacgtcagatccccaaaaagaaaatagaaatacaggaatagtattcggggccattttaggtgctattctgggtgtctcattgcttactcttgtgggctacttgttgtgtggaaaaaggaaaacggattcattttcccatcggcgactttatgacgacagaaatgaaccagttctgcgattagacaatgcaccggaaccttatgatgtgagttttgggaattctagctactacaatccaactttgaatgattcagccatgccagaaagtgaagaaaatgcacgtgatggcattcctatggatgacatacctccacttcgtacttctgtatagaactaacagcaaaaaggcgttaaacagcaagtgtcatctacatcctagccttttgacaaattcatctttcaaaaggttacacaaaattactgtcacgtggattttgtcaaggagaatcataaaagcaggagaccagtagcagaaatgtagacaggatgtatcatccaaaggttttctttcttacaatttttggccatcctgaggcatttactaagtagccttaatttgtattttagtagtattttcttagtagaaaatatttgtggaatcagataaaactaaaagatttcaccattacagccctgcctcataactaaataataaaaattattccaccaaaaaattctaaaacaatgaagatgactctttactgctctgcctgaagccctagtaccataattcaagattgcattttcttaaatgaaaattgaaagggtgctttttaaagaaaatttgacttaaagctaaaaagaggacatagcccagagtttctgttattgggaaattgaggcaatagaaatgacagacctgtattctagtacgttataattttctagatcagcacacacatgatcagcccactgagttatgaagctgacaatgactgcattcaacggggccatggcaggaaagctgaccctacccaggaaagtaatagcttctttaaaagtcttcaaaggttttgggaattttaacttgtcttaatatatcttaggcttcaattatttgggtgccttaaaaactcaatgagaatcatggtaaaaaaaaaaagttaaccaaagaatatacctgtacataatttgtacagttttaagttgttagataggaactggatttcttatgtattagacattattgctcaatcataatggaatagattctgcatccctaaatgtatgaaccataaggttaaaaaagatgaatggaaatatcaaacaactttttactgagcatcagtttcataatcaataatataagaagattaatttggattctagtatgtttcagtttgtttttaattaccaccttcctttggtagaaaaaatatgttccttgatgtaggaaagtctaggttttagagattagaggatgagatcaagagttaaattcctaaagaagcactgaatatatgaagagagcaaacaaatcaagtaccaacctagaggctttatttttgaattgattcatggtgtgtgtgtgtgtgtgtgtgtgtgtgtgtgtgtgtgtgtaacacagaaacagcttcagaaaataagggatagaaagtaatgaagaaagtacttaccccatattgccataaaaatagcaaagaagactgtccctccattatcgaacaaatatgtcacctgagtagaaaacaaacagaaatattagtcatgcaaattgattataataagccagtgaatactgtttgcactcaggtactatgattttttctcaaatagaatcatattattttatagtacagaaatattatatatgaattcctttcatgggtcttgcaacaatttcacatgatttttctcatggggagaggtgaagaaacaacattagccctcttctctcctctcttgattccctttataccccaccatcatttctgattataaataattctaccattctatggaagtatttgtgggtcacagattgtcaaactacttaatgaaagttgtatgaaattagtttttcaggtgaggcattcctagttgcaattcctgttagcaaaacttctaggagtggggaagttggaaaatgcaggattcttccagtgagccagcatttcccatagctaaccctattctcttagtctttcaaaatgtagaatgggtccaataatggctataagatgtaataaatcccatcttaatttgttttaaaagtttcataaatcactgaacacttatgaaacaaagtgttttttaatcagatatcaactgaaacttcataaaggatgcatagttttataatgttattgaatcaaattttaaggcttgtattgtttgattttaataaagtataaattcaatttac

SEQ ID NO: 20879 - protein, 334 aa, Homo sapiens; identical to SEQ ID NO: 2653

SEQ ID NO: 20880 - DNA, 3251 bp, Homo sapiens
gaggtgatatcttaatgcttacagctgagaagcaggtcagtcaggttcctgggcgctctgttacacaagcaagatacagccagccccacctaattttgtttccctggcaccctcctgctcagtgcgacattgtcacacttaacccatctgttttctctaatgcacgacagattcctttcagacaggacaactgtgatatttcagttcctgattgtaaatacctcctaagcctgaagcttctgttactagccattgtgagcttcagtttcttcatctgcaaaatgggcataatacaatctattcttgccacatcaagggattgttattcctttaaaaaaaaaccaataccaaagaagcctacaatgttggccttagccaaaattctgttgatttcaacgttgttttattcacttctatcggggagccatggaaaagaaaatcaagacataaacacaacacagaacattgcagaagtttttaaaacaatggaaaataaacctatttctttggaaagtgaagcaaacttaaactcagataaagaaaatataaccacctcaaatctcaaggcgagtcattcccctcctttgaatctacccaacaacagccacggaataacagatttctccagtaactcatcagcagagcattctttgggcagtctaaaacccacatctaccatttccacaagccctcccttgatccatagctttgtttctaaagtgccttggaatgcacctatagcagatgaagatcttttgcccatctcagcacatcccaatgctacacctgctctgtcttcagaaaacttcacttggtctttggtcaatgacaccgtgaaaactcctgataacagttccattacagttagcatcctctcttcagaaccaacttctccatctgtgacccccttgatagtggaaccaagtggatggcttaccacaaacagtgatagcttcactgggtttaccccttatcaagaaaaaacaactctacagcctaccttaaaattcaccaataattcaaaactctttccaaatacgtcagatccccaaaaagttctgcgattagacaatgcaccggaaccttatgatgtgagttttgggaattctagctactacaatccaactttgaatgattcagccatgccagaaagtgaagaaaatgcacgtgatggcattcctatggatgacatacctccacttcgtacttctgtatagaactaacagcaaaaaggcgttaaacagcaagtgtcatctacatcctagccttttgacaaattcatctttcaaaaggttacacaaaattactgtcacgtggattttgtcaaggagaatcataaaagcaggagaccagtagcagaaatgtagacaggatgtatcatccaaaggttttctttcttacaatttttggccatcctgaggcatttactaagtagccttaatttgtattttagtagtattttcttagtagaaaatatttgtggaatcagataaaactaaaagatttcaccattacagccctgcctcataactaaataataaaaattattccaccaaaaaattctaaaacaatgaagatgactctttactgctctgcctgaagccctagtaccataattcaagattgcattttcttaaatgaaaattgaaagggtgctttttaaagaaaatttgacttaaagctaaaaagaggacatagcccagagtttctgttattgggaaattgaggcaatagaaatgacagacctgtattctagtacgttataattttctagatcagcacacacatgatcagcccactgagttatgaagctgacaatgactgcattcaacggggccatggcaggaaagctgaccctacccaggaaagtaatagcttctttaaaagtcttcaaaggttttgggaattttaacttgtcttaatatatcttaggcttcaattatttgggtgccttaaaaactcaatgagaatcatggtaaaaaaaaaaagttaaccaaagaatatacctgtacataatttgtacagttttaagttgttagataggaactggatttcttatgtattagacattattgctcaatcataatggaatagattctgcatccctaaatgtatgaaccataaggttaaaaaagatgaatggaaatatcaaacaactttttactgagcatcagtttcataatcaataatataagaagattaatttggattctagtatgtttcagtttgtttttaattaccaccttcctttggtagaaaaaatatgttccttgatgtaggaaagtctaggttttagagattagaggatgagatcaagagttaaattcctaaagaagcactgaatatatgaagagagcaaacaaatcaagtaccaacctagaggctttatttttgaattgattcatggtgtgtgtgtgtgtgtgtgtgtgtgtgtgtgtgtgtgtgtaacacagaaacagcttcagaaaataagggatagaaagtaatgaagaaagtacttaccccatattgccataaaaatagcaaagaagactgtccctccattatcgaacaaatatgtcacctgagtagaaaacaaacagaaatattagtcatgcaaattgattataataagccagtgaatactgtttgcactcaggtactatgattttttctcaaatagaatcatattattttatagtacagaaatattatatatgaattcctttcatgggtcttgcaacaatttcacatgatttttctcatggggagaggtgaagaaacaacattagccctcttctctcctctcttgattccctttataccccaccatcatttctgattataaataattctaccattctatggaagtatttgtgggtcacagattgtcaaactacttaatgaaagttgtatgaaattagtttttcaggtgaggcattcctagttgcaattcctgttagcaaaacttctaggagtggggaagttggaaaatgcaggattcttccagtgagccagcatttcccatagctaaccctattctcttagtctttcaaaatgtagaatgggtccaataatggctataagatgtaataaatcccatcttaatttgttttaaaagtttcataaatcactgaacacttatgaaacaaagtgttttttaatcagatatcaactgaaacttcataaaggatgcatagttttataatgttattgaatcaaattttaaggcttgtattgtttgattttaataaagtataaattcaatttac

SEQ ID NO: 20881 - protein, 400 aa, Homo sapiens
MLTAEKQVSQVPGRSVTQARYSQPHLILFPWHPPAQCDIVTLNPSVFSNARQIPFRQDNCDISVPDCKYLLSLKLLLLAIVSFSFFICKMGIIQSILATSRDCYSFKKKPIPKKPTMLALAKILLISTLFYSLLSGSHGKENQDINTTQNIAEVFKTMENKPISLESEANLNSDKENITTSNLKASHSPPLNLPNNSHGITDFSSNSSAEHSLGSLKPTSTISTSPPLIHSFVSKVPWNAPIADEDLLPISAHPNATPALSSENFTWSLVNDTVKTPDNSSITVSILSSEPTSPSVTPLIVEPSGWLTTNSDSFTGFTPYQEKTTLQPTLKFTNNSKLFPNTSDPQKVLRLDNAPEPYDVSFGNSSYYNPTLNDSAMPESEENARDGIPMDDIPPLRTSV

SEQ ID NO: 20882 - DNA, 3401 bp, Homo sapiens
gaggtgatatcttaatgcttacagctgagaagcaggtcagtcaggttcctgggcgctctgttacacaagcaagatacagccagccccacctaattttgtttccctggcaccctcctgctcagtgcgacattgtcacacttaacccatctgttttctctaatgcacgacagattcctttcagacaggacaactgtgatatttcagttcctgattgtaaatacctcctaagcctgaagcttctgttactagccattgtgagcttcagtttcttcatctgcaaaatgggcataatacaatctattcttgccacatcaagggattgttattcctttaaaaaaaaaccaataccaaagaagcctacaatgttggccttagccaaaattctgttgatttcaacgttgttttattcacttctatcggggagccatggaaaagaaaatcaagacataaacacaacacagaacattgcagaagtttttaaaacaatggaaaataaacctatttctttggaaagtgaagcaaacttaaactcagataaagaaaatataaccacctcaaatctcaaggcgagtcattcccctcctttgaatctacccaacaacagccacggaataacagatttctccagtaactcatcagcagagcattctttgggcagtctaaaacccacatctaccatttccacaagccctcccttgatccatagctttgtttctaaagtgccttggaatgcacctatagcagatgaagatcttttgcccatctcagcacatcccaatgctacacctgctctgtcttcagaaaacttcacttggtctttggtcaatgacaccgtgaaaactcctgataacagttccattacagttagcatcctctcttcagaaccaacttctccatctgtgacccccttgatagtggaaccaagtggatggcttaccacaaacagtgatagcttcactgggtttaccccttatcaagaaaaaacaactctacagcctaccttaaaattcaccaataattcaaaactctttccaaatacgtcagatccccaaaaagaaaatagaaatacaggaatagtattcggggccattttaggtgctattctgggtgtctcattgcttactcttgtgggctacttgttgtgtggaaaaaggaaaacggattcattttcccatcggcgactttatgacgacagaaatgaaccagttctgcgattagacaatgcaccggaaccttatgatgtgagttttgggaattctagctactacaatccaactttgaatgattcagccatgccagaaagtgaagaaaatgcacgtgatggcattcctatggatgacatacctccacttcgtacttctgtatagaactaacagcaaaaaggcgttaaacagcaagtgtcatctacatcctagccttttgacaaattcatctttcaaaaggttacacaaaattactgtcacgtggattttgtcaaggagaatcataaaagcaggagaccagtagcagaaatgtagacaggatgtatcatccaaaggttttctttcttacaatttttggccatcctgaggcatttactaagtagccttaatttgtattttagtagtattttcttagtagaaaatatttgtggaatcagataaaactaaaagatttcaccattacagccctgcctcataactaaataataaaaattattccaccaaaaaattctaaaacaatgaagatgactctttactgctctgcctgaagccctagtaccataattcaagattgcattttcttaaatgaaaattgaaagggtgctttttaaagaaaatttgacttaaagctaaaaagaggacatagcccagagtttctgttattgggaaattgaggcaatagaaatgacagacctgtattctagtacgttataattttctagatcagcacacacatgatcagcccactgagttatgaagctgacaatgactgcattcaacggggccatggcaggaaagctgaccctacccaggaaagtaatagcttctttaaaagtcttcaaaggttttgggaattttaacttgtcttaatatatcttaggcttcaattatttgggtgccttaaaaactcaatgagaatcatggtaaaaaaaaaaagttaaccaaagaatatacctgtacataatttgtacagttttaagttgttagataggaactggatttcttatgtattagacattattgctcaatcataatggaatagattctgcatccctaaatgtatgaaccataaggttaaaaaagatgaatggaaatatcaaacaactttttactgagcatcagtttcataatcaataatataagaagattaatttggattctagtatgtttcagtttgtttttaattaccaccttcctttggtagaaaaaatatgttccttgatgtaggaaagtctaggttttagagattagaggatgagatcaagagttaaattcctaaagaagcactgaatatatgaagagagcaaacaaatcaagtaccaacctagaggctttatttttgaattgattcatggtgtgtgtgtgtgtgtgtgtgtgtgtgtgtgtgtgtgtgtaacacagaaacagcttcagaaaataagggatagaaagtaatgaagaaagtacttaccccatattgccataaaaatagcaaagaagactgtccctccattatcgaacaaatatgtcacctgagtagaaaacaaacagaaatattagtcatgcaaattgattataataagccagtgaatactgtttgcactcaggtactatgattttttctcaaatagaatcatattattttatagtacagaaatattatatatgaattcctttcatgggtcttgcaacaatttcacatgatttttctcatggggagaggtgaagaaacaacattagccctcttctctcctctcttgattccctttataccccaccatcatttctgattataaataattctaccattctatggaagtatttgtgggtcacagattgtcaaactacttaatgaaagttgtatgaaattagtttttcaggtgaggcattcctagttgcaattcctgttagcaaaacttctaggagtggggaagttggaaaatgcaggattcttccagtgagccagcatttcccatagctaaccctattctcttagtctttcaaaatgtagaatgggtccaataatggctataagatgtaataaatcccatcttaatttgttttaaaagtttcataaatcactgaacacttatgaaacaaagtgttttttaatcagatatcaactgaaacttcataaaggatgcatagttttataatgttattgaatcaaattttaaggcttgtattgtttgattttaataaagtataaattcaatttac

SEQ ID NO: 20883 - protein, 450 aa, Homo sapiens [sequence omitted]

SEQ ID NO: 20884 - DNA, 1564 bp, Homo sapiens
gaggtgatatcttaatgcttacagctgagaagcaggtcagtcaggttcctgggcgctctgttacacaagcaagatacagccagccccacctaattttgtttccctggcaccctcctgctcagtgcgacattgtcacacttaacccatctgttttctctaatgcacgacagattcctttcagacaggacaactgtgatatttcagttcctgattgtaaatacctcctaagcctgaagcttctgttactagccattgtgagcttcagtttcttcatctgcaaaatgggcataatacaatctattcttgccacatcaagggattgttattcctttaaaaaaaaaccaataccaaagaagcctacaatgttggccttagccaaaattctgttgatttcaacgttgttttattcacttctatcggggagccatggaaaagaaaatcaagacataaacacaacacagaacattgcagaagtttttaaaacaatggaaaataaacctatttctttggaaagtgaagcaaacttaaactcagataaagaaaatataaccacctcaaatctcaaggcgagtcattcccctcctttgaatctacccaacaacagccacggaataacagatttctccagtaactcatcagcagagcattctttgggcagtctaaaacccacatctaccatttccacaagccctcccttgatccatagctttgtttctaaagtgccttggaatgcacctatagcagatgaagatcttttgcccatctcagcacatcccaatgctacacctgctctgtcttcagaaaacttcacttggtctttggtcaatgacaccgtgaaaactcctgataacagttccattacagttagcatcctctcttcagaaccaacttctccatctgtgacccccttgatagtggaaccaagtggatggcttaccacaaacagtgatagcttcactgggtttaccccttatcaagaaaaaacaactctacagcctaccttaaaattcaccaataattcaaaactctttccaaatacgtcagatccccaaaaagttctgcgattagacaatgcaccggaaccttatgatgtgagttttgggaattctagctactacaatccaactttgaatgattcagccatgccagaaagtgaagaaaatgcacgtgatggcattcctatggatgacatacctccacttcgtacttctgtatagaactaacagcaaaaaggcgttaaacagcaagtgtcatctacatcctagccttttgacaaattcatctttcaaaaggttacacaaaattactgtcacgtggattttgtcaaggagaatcataaaagcaggagaccagtagcagaaatgtagacaggatgtatcatccaaaggttttctttcttacaatttttggccatcctgaggcatttactaagtagccttaatttgtattttagtagtattttcttagtagaaaatatttgtggaatcagataaaactaaaagatttcaccattacagccctgcctcataactaaataataaaaattattccaccaaaaaattct

SEQ ID NO: 20885 - protein, 400 aa, Homo sapiens; identical to SEQ ID NO: 20881

SEQ ID NO: 20886 - DNA, 1714 bp, Homo sapiens
gaggtgatatcttaatgcttacagctgagaagcaggtcagtcaggttcctgggcgctctgttacacaagcaagatacagccagccccacctaattttgtttccctggcaccctcctgctcagtgcgacattgtcacacttaacccatctgttttctctaatgcacgacagattcctttcagacaggacaactgtgatatttcagttcctgattgtaaatacctcctaagcctgaagcttctgttactagccattgtgagcttcagtttcttcatctgcaaaatgggcataatacaatctattcttgccacatcaagggattgttattcctttaaaaaaaaaccaataccaaagaagcctacaatgttggccttagccaaaattctgttgatttcaacgttgttttattcacttctatcggggagccatggaaaagaaaatcaagacataaacacaacacagaacattgcagaagtttttaaaacaatggaaaataaacctatttctttggaaagtgaagcaaacttaaactcagataaagaaaatataaccacctcaaatctcaaggcgagtcattcccctcctttgaatctacccaacaacagccacggaataacagatttctccagtaactcatcagcagagcattctttgggcagtctaaaacccacatctaccatttccacaagccctcccttgatccatagctttgtttctaaagtgccttggaatgcacctatagcagatgaagatcttttgcccatctcagcacatcccaatgctacacctgctctgtcttcagaaaacttcacttggtctttggtcaatgacaccgtgaaaactcctgataacagttccattacagttagcatcctctcttcagaaccaacttctccatctgtgacccccttgatagtggaaccaagtggatggcttaccacaaacagtgatagcttcactgggtttaccccttatcaagaaaaaacaactctacagcctaccttaaaattcaccaataattcaaaactctttccaaatacgtcagatccccaaaaagaaaatagaaatacaggaatagtattcggggccattttaggtgctattctgggtgtctcattgcttactcttgtgggctacttgttgtgtggaaaaaggaaaacggattcattttcccatcggcgactttatgacgacagaaatgaaccagttctgcgattagacaatgcaccggaaccttatgatgtgagttttgggaattctagctactacaatccaactttgaatgattcagccatgccagaaagtgaagaaaatgcacgtgatggcattcctatggatgacatacctccacttcgtacttctgtatagaactaacagcaaaaaggcgttaaacagcaagtgtcatctacatcctagccttttgacaaattcatctttcaaaaggttacacaaaattactgtcacgtggattttgtcaaggagaatcataaaagcaggagaccagtagcagaaatgtagacaggatgtatcatccaaaggttttctttcttacaatttttggccatcctgaggcatttactaagtagccttaatttgtattttagtagtattttcttagtagaaaatatttgtggaatcagataaaactaaaagatttcaccattacagccctgcctcataactaaataataaaaattattccaccaaaaaattct

SEQ ID NO: 20887 - protein, 450 aa, Homo sapiens [sequence omitted]

SEQ ID NO: 20888 - DNA, 4632 bp, Homo sapiens
ggtgcactaggaggtcttcttactggaatcaccttgtcattttgggtggccattggggccttcatttaccctgcaccagcctctaagacatggcctttgcctctgtcaacagaccaatgtatcaaatcaaatgtgacagcaacagggcctccagtactatccagcagacctggaatagctgatacctggtactcgatctcctacctttactacagtgcagtgggctgcttaggatgcattgttgctggagtaatcatcagcctcataacaggtcgccaaagaggtgaggatattcaaccactgttaattagaccagtttgtaatttattttgcttttggtctaagaagtacaaaacactatgctggtgtggagttcagcatgacagtgggacagagcaggaaaaccttgagaatggcagtgcccggaaacagggggctgaatctgtcttacagaacggactcagaagagaaagcctggtacatgttccaggctatgatcctaaggacaaaagctacaacaatatggcatttgagactacccatttctaaggcaatacctgtatgaatgcacacacacacgtgcaatacacacacacacacacaaactccacatacttcttgcctacttgttagtagatatgtatagttgccattgctagaagacagggatgtctggtgcctatttctacttatttataactacatgcaaaatgactgtctctcgggatattctttgaaagactccaactttcacagagaaaaaccaacctgctccaaatgcccttgactacttccttcttgaataaattagggctggatttcattaccattcaagaaagcgaagtctttttgcttggtgtcatattaaacttcaggtttttcgttttagtagttttttaaccatcaaaatatcttggagtttagaggcagaacgggaaacagaaatatgcatatttaacactttcctgccacgagggataaaatagaggaatgacatccacccctgacctcatacctgacatacatgtagatatattttatgccacccatctcccatcctgtagctacaattggcatacaactactattaacctcccttcaccaccactgtcaggtcctcttccagtcattccagtcattagctgtcctgaccaaacattaaaaaaaaaattcagctaaatacagaagaagatggtatgtctggctagtgggagtgattataactaaaaactttgctccttttgtgctgtccatgcagtatgtcttcttcctttctatcactttacaatgaaaaattgcctcagagctcaataagaagtctagagcctttttccagggctaaggaaagagaaaaggaatgtcctatagaaggttgttaggatagaatttggtaaaagaacgttgcaaatattgtaacagaccataggagatttcatcagcaataggattcttctttggagaaaatacattgtccataagacttgtactctgctcattcaactcatgtgagcaagctcaactcactccacctgggttaggtaacagaagtggagaacttcatagttcgtgtctagaaaataatgtttaaagttctggagaatgagggtattgcagattaaaaggcgagttgacaaatgaaggagcagtgaaagatttttggaagaagtgaagaagtgaaattctgaaaaggtaaaagaaagaaccagtatgtcacaggggccaagtcagaggacagataataagaaacaaagttgtatctgagagtcatatattaggacaggtgtcagatatttattttggtggccagataaaagcaaaaggcctagaaacagtgtgttagcaaagtaagaagaaatggtccaaataggcaaggataaggaaatccaaaggttgtctttaaatatttctcaaaagagaaagccttgaaagaagcatacaatagagaaaaaataaattaccagtatttattattagaaaagatagaaagacagacaaatcagtggaggaattaaaacagagaaactggagtttataaaacagagcccaatccttgccttctctccctccactcaaatagaaaaggagaatggagaaagagaaagaaggtattaggctacagtttataagagagatgagaaaaaaatacatttgggaatagagggaaagggtcaaaaggggtcacatttggagaaatatctgaaaatgagaaggagcagaatttttggaaacattttttaaagtctggcaacgctaattaagctgttgatctaaggatttgcaaattgagaggtgcaattattttccaaatgatttgtgacactcttattaattagaatatatattttgtgaatattgaaatctgagccaaaactagttagctttattaatatcttagggaaagaagagagaaagaaagagggagggagagagagaaagaaagaaagaaagaaagaaagaaagaaaagaagaaagaaagaaagaaaaagacaggaagaggaagagagagacagaaagaataaaaaaacagcaattctgaggatgagaataaattaatggtaggtattacatatgcatatacatatatatatctgtacacatatatatgtaaatatgatttggaatacatcaggattgtgaacttccacttgggatagcataaaagcaaaatataccatacaatttttcattttactcacaaattttactcacaaattctcctaaagacatttcactaggtcagtacatttccgagaaagttttaaaaacgtttcttcttttatagtccctaattatcttacctggagtgttatcaaaatgtcatacaactggaaaatgcaattattattataaaaatatctctgccttctcttgtgtaatgaaatttatggcattaggagatgacatttcaagagattttagaggtcaatgtagagactccccccattcttcttaattgaacaaacatgcataaatctagggtttcaggtagagagcagatgggaatctacaggaaactgtcttccatagtgtatgaaaaccgtgtttgttgtgtggtgaagcaaaaggaaactatgaagcgcacagtcaatagattcagctagtgagtcccagcactcctttcaggccctcactaggattagcagcccagagtcatgccaaggccactggtgcagtacaaagacagttcagtgacaagttccatccataccatggaagagggttaaacttgtggctgtttttgccacagcatgaccagagacattctcaataaatggcactaggaatgatgagttttagaggggcctaaaatgttccaaacttgatactcaccactgtacctttaaagcacaaccacagatattggtaaaaatggaacagaattacctcaatacctctttaactcattctgtatgaattcattttgatgacagacattttttgtcaccatttggaataagaactacaacagcttatgattgaggtgaggaactgcagtcaaatggcttaggttcaaacacgagttctgacacaaatctaggtaattttgggcaatattttaaaatcttagtttattcaccaattaataggagtaaaaattacccctacttaatagaattattatgaagatttatataagtaaatcatataaagtgcttagcacagtgtgactggcccacatggaacatttaatacttggtctgcagtatatgaagaaaatggtgtacatgttaacttaaatggtttcattatttctcttcaggatttttaagatgtgggatcagaatatatgttactattttgagaattagaaataataagaaaaacagaatgtatacattaaaagtcatgcctaaatttccaaagagtagtttttttaatgccagagtttaaataaaatattattttccagagagtaacttttctaaaggtcctaaattctgaaaagagagaaaactactgttataaacaagtttattactaaaagatgcaattcattactatgatttattattattttgtacatgtaaaccttgataaataaacagcatctcaacccaagtttattactcattgcacagttcaaagcaactatgactctcaaaatagcaacagaaggtggggagggtcttttccctttgtttatatagtatttgctaaaaatgaactttactattttgtggctttatagggttacaccatttcattctaaagagaaacaaaaagtaaaccattggccatgtggctttcaaacagtatttcaaagagaatattactgaaatatttttgtgctgttacagtcttaatcaaacattattacaaagatcagatacggaaaaaatagaggagtctccccttaattgttccctttgaaataaattgttttaaattattacagaagttatagctgtatgtacatgcacatttgtatatttacaagtctcatgtacttaatctcaatattgcaaattagctaggtttactatagagttaactgcttttatctagcatttataatcttgtagtataacctattttcaaataactaaaatttaattgatgtcatcaatggtacacatgaaaatgatacaaatttataaactaataaaatgtaactcgtcattgatagtaaat

SEQ ID NO: 20889 - protein, 61 aa, Homo sapiens
MTVGQSRKTLRMAVPGNRGLNLSYRTDSEEKAWYMFQAMILRTKATTIWHLRLPISKAIPV

SEQ ID NO: 20890 - DNA, 1005 bp, Homo sapiens
attaaaaaaaaaattcagctaaatacagaagaagatggtatgtctggctagtgggagtgattataactaaaaactttgctccttttgtgctgtccatgcagtatgtcttcttcctttctatcactttacaatgaaaaattgcctcagagctcaataagaagtctagagcctttttccagggctaaggaaagagaaaaggaatgtcctatagaaggttgttaggatagaatttggtaaaagaacgttgcaaatattgtaacagaccataggagatttcatcagcaataggattcttctttggagaaaatacattgtccataagacttgtactctgctcattcaactcatgtgagcaagctcaactcactccacctgggttaggtaacagaagtggagaacttcatagttcgtgtctagaaaataatgtttaaagttctggagaatgagggtattgcagattaaaaggcgagttgacaaatgaaggagcagtgaaagatttttggaagaagtgaagaagtgaaattctgaaaaggtaaaagaaagaaccagtatgtcacaggggccaagtcagaggacagataataagaaacaaagttgtatctgagagtcatatattaggacaggtgtcagatatttattttggtggccagataaaagcaaaaggcctagaaacagtgtgttagcaaagtaagaagaaatggtccaaataggcaaggataaggaaatccaaaggttgtctttaaatatttctcaaaagagaaagccttgaaagaagcatacaatagagaaaaaataaattaccagtatttattattagaaaagatagaaagacagacaaatcagtggaggaattaaaacagagaaactggagtttataaaacagagcccaatccttgccttctctccctccactcaaatagaaaaggagaatggagaaagagaaagaaggtattaggctacagtttaaagaaagaaagaaaaagacaggaagaggaagagagagac

SEQ ID NO: 20891 - protein, 39 aa, Homo sapiens
MSSSFLSLYNEKLPQSSIRSLEPFSRAKEREKECPIEGC

SEQ ID NO: 20892 - DNA, 1925 bp, Homo sapiens
ggtaaatatattaaagaccaagatttgcagtaacatttatcatatcaaatctccaaatctagtggaggaatttaaacagaggacacagacagctcttgggagagtcttcatatttttattgtacttacaactacgattcaacaaaccagttcgctatgctgccacggtcatctacattgtacagacgattctctacacaggagtggtggtgtatgctcctgccctggcactcaatcaagtgactgggtttgatctctggggctctgtgtttgcaacaggaattgtttgcacattctactgtaccctgggaggattaaaagcagtggtgtggacagatgcatttcagatggttgtcatgattgtgggcttcttaacggttctcattcaaggatcaactcatgctgggggattccacaatgtattagagcaatcaacaaatggatctcgactacatatatttgactttgatgtagatcctctcaggcgacacactttttggactatcacagtgggaggaacttttacttggctcggaatctatggggtcaatcaatcaactattcagcgatgcatctcttgcaaaacagaaaagcatgctaagcttgccttgtattttaacttgctgggtctctggatcattctggtgtgtgctgtcttctctggcttaatcatgtactctcactttaaagactgtgacccttggacttctggcatcatctcagcaccagaccagctgatgccgtactttgtcatggagatatttgccacaatgccaggactgccaggactttttgtggcttgtgccttcagtggaactctgagcaccgtggcttccagcatcaatgccttggcaacagtgacctttgaggattttgtcaagagctgttttcctcatctctccgacaagctgagcacctggatcagtaaaggcttatgtaggtctcttatttggcgtgatgtgtacctctatggctgtggctgcatctgtcatgggaggtgttgtgcaggcttccctcagcattcacggcatgtgtggaggaccaatgctgggcttattctccctgggaatcgtgttcccttttgtgaattggaagggtgcactaggaggtcttcttactggaatcaccttgtcattttgggtggccattggggccttcatttaccctgcaccagcctctaagacatggcctttgcctctgtcaacagaccaatgtatcaaatcaaatgtgacagcaacagggcctccagtactatccagcagacctggaatagctgatacctggtactcgatctcctacctttactacagtgcagtgggctgcttaggatgcattgttgctggagtaatcatcagcctcataacaggtcgccaaagaggtgaggatattcaaccactgttaattagaccagtttgtaatttattttgcttttggtctaagaagtacaaaacactatgctggtgtggagttcagcatgacagtgggacagagcaggaaaaccttgagaatggcagtgcccggaaacagggggctgaatctgtcttacagaacggactcagaagagaaagcctggtacatgttccaggctatgatcctaaggacaaaagctacaacaatatggcatttgagactacccatttctaaggcaatacctgtatgaatgcacacacacacgtgcaatacacacacacacacacaaactccacatacttcttgcctacttgttagtagatatgtatagttgccattgctagaagacagggatgtctggtgcctatttctacttatttataactacatgcaaaatgactgtctctcgggatattctttgaaagactccaactttcacagagaaaaaccaacctgctccaaatgcccttgactacttccttcttgaataaattagggctggatttcattaccatt

SEQ ID NO: 20893 - protein, 277 aa, Homo sapiens
MVVMIVGFLTVLIQGSTHAGGFHNVLEQSTNGSRLHIFDFDVDPLRRHTFWTITVGGTFTWLGIYGVNQSTIQRCISCKTEKHAKLALYFNLLGLWIILVCAVFSGLIMYSHFKDCDPWTSGIISAPDQLMPYFVMEIFATMPGLPGLFVACAFSGTLSTVASSINALATVTFEDFVKSCFPHLSDKLSTWISKGLCRSLIWRDVYLYGCGCICHGRCCAGFPQHSRHVWRTNAGLILPGNRVPFCELEGCTRRSSYWNHLVILGGHWGLHLPCTSL

SEQ ID NO: 20894 - DNA, 2310 bp, Homo sapiens
ttaatttcagaacacatctgaattccttctctgtggcatatgctttaggagaggagcagacagctcttagctagggtcagatttcaaattctcatctcttggtgccaataccaccaccagattcttctttgaagtcaacttttgagatcttcactaagtacacgttggtgtctgaagattcacacgagtgcctctggtaatcattttcttcagggaatcacagtctctcctctcagcaaagcatccactgtactgaactttgcttttggaaacatcttcttcctgagacctcgttgaaagaaactctctggtgtcatactttccaatatggaggtgaagaactttgcagtttgggattatgttgtatttgcagccctctttttcatttcctctggaattggggtgttctttgccattaaggagagaaaaaaggcaacttcccgagagttcctggttgggggaaggcaaatgagctttggccctgtcggcttgtctctgacagccagcttcatgtcagctgtcacggtcctggggaccccttctgaagtctaccgctttggggcatccttcctagtcttcttcattgcttacctatttgtcatcctcttaacatcagagctctttctccctgtgttctacagatctggtatcaccagcacttatgagtacttacaactacgattcaacaaaccagttcgctatgctgccacggtcatctacattgtacagacgattctctacacaggagtggtggtgtatgctcctgccctggcactcaatcaagtgactgggtttgatctctggggctctgtgtttgcaacaggaattgtttgcacattctactgtaccctgggaggattaaaagcagtggtgtggacagatgcatttcagatggttgtcatgattgtgggcttcttaacggttctcattcaaggatcaactcatgctgggggattccacaatgtattagagcaatcaacaaatggatctcgactacatatatttgactttgatgtagatcctctcaggcgacacactttttggactatcacagtgggaggaacttttacttggctcggaatctatggggtcaatcaatcaactattcagcgatgcatctcttgcaaaacagaaaagcatgctaagcttgccttgtattttaacttgctgggtctctggatcattctggtgtgtgctgtcttctctggcttaatcatgtactctcactttaaagactgtgacccttggacttctggcatcatctcagcaccagaccagctgatgccgtactttgtcatggagatatttgccacaatgccaggactgccaggactttttgtggcttgtgccttcagtggaactctgagcaccgtggcttccagcatcaatgccttggcaacagtgacctttgaggattttgtcaagagctgttttcctcatctctccgacaagctgagcacctggatcagtaaaggcttatgtaggtacagctggtggactttctattccatatcatgaaatgtacatgtggtagatgtcaaaatcctgcatgtgctattcaggacacacttataaacacaaatgcactgtgagatatgtgaagaatcccacacatagattcttacacttccaaagatccagcagggtatcaggaaagaatgactagctagtttaccttaactgcctttattttcagatactcttctatacttaccctacactctagacgaggcttatccaacccacggcctgtgggccgcatacggcccaggatggctttgaatgcagcccaacacaaattcgtaaactttcttaaaacattctggaatttttttgtaattttttaaatcttagcagctatcattagtgtttgtgtattttatgtgtactccaaggcaactccttctttcaacgtggcccagggaggccaaaagattggacacccctgcaaactaatcacatcaatctctcttgattacactgtgtgatggtcatattagtctctctacatgggaagatgttgtgcttactatggccagtcactttgacaaagaaaagccaaattcttttctaaagaattgttccttattaccaaactcccagtaaccccctcaaagaataattgccccttgcttaatcatgcaattgcatattatgtttatactcacttcagcacttatcagagataattgcagtttcacaaggtttactttttaaagtataaacaaattatgtatttacttactaatagaaaatataggtaatttggggaaatttatgtacattgttaaataaaattatatctatcta

SEQ ID NO: 20895 - protein, 396 aa, Homo sapiens; identical to SEQ ID NO: 2657

SEQ ID NO: 20896 - DNA, 803 bp, Homo sapiens
ggaatttaaacagaggacacagacagctcttgggagagtcttcatatttttattgatgagaatcctgaagcacagatcacagagtgagatgccagcaaatctcaaactggaattcaaggaggctgatttctgatcagtacttacaactacgattcaacaaaccagttcgctatgctgccacggtcatctacattgtacagacgattctctacacaggagtggtggtgtatgctcctgccctggcactcaatcaagtgactgggtttgatctctggggctctgtgtttgcaacaggaattgtttgcacattctactgtaccctgggaggattaaaagcagtggtgtggacagatgcatttcagatggttgtcatgattgtgggcttcttaacggttctcattcaaggatcaactcatgctgggggattccacaatgtattagagcaatcaacaaatggatctcgactacatatatttgactttgatgtagatcctctcaggcgacacactttttggactatcacagtgggaggaacttttacttggctcggaatctatggggtcaatcaatcaactattcagcgatgcatctcttgcaaaacagaaaagcatgctaagcttgccttgtattttaacttgctgggtctctggatcattctggtgtgtgctgtcttctctggcttaatcatgtactctcactttaaagactgtgacccttggacttctggcatcatctcagcaccagaccagctgatgccgtactttgtcatggagatatttgccacaatgccaggactgccagga

SEQ ID NO: 20897 - protein, 146 aa, Homo sapiens
MVVMIVGFLTVLIQGSTHAGGFHNVLEQSTNGSRLHIFDFDVDPLRRHTFWTITVGGTFTWLGIYGVNQSTIQRCISCKTEKHAKLALYFNLLGLWIILVCAVFSGLIMYSHFKDCDPWTSGIISAPDQLMPYFVMEIFATMPGLP

SEQ ID NO: 20898 - DNA, 1055 bp, Homo sapiens
ttaatttcagaacacatctgaattccttctctgtggcatatgctttaggagaggagcagacagctcttagctagggtcagatttcaaattctcatctcttggtgccaataccaccaccagattcttctttgaagtcaacttttgagatcttcactaagtacacgttggtgtctgaagattcacacgagtgcctctggtaatcattttcttcagggaatcacagtctctcctctcagcaaagcatccactgtactgaactttgcttttggaaacatcttcttcctgagacctcgttgaaagaaactctctggtgtcatactttccaatatggaggtgaagaactttgcagtttgggattatgttgtatttgcagccctctttttcatttcctctggaattggggtgttctttgccattaaggagagaaaaaaggcaacttcccgagagttcctggttgggggaaggcaaatgagctttggccctgtcggcttgtctctgacagccagcttcatgtcagctgtcacggtcctggggaccccttctgaagtctaccgctttggggcatccttcctagtcttcttcattgcttacctatttgtcatcctcttaacatcagagctctttctccctgtgttctacagatctggtatcaccagcacttatgagtacttacaactacgattcaacaaaccagttcgctatgctgccacggtcatctacattgtacagacgattctctacacaggagtggtggtgtatgctcctgccctggcactcaatcaagtgactgggtttgatctctggggctctgtgtttgcaacaggaattgtttgcacattctactgtaccctggtatgtatctagctgtgaagaagtatttaacactacctcctaatatgggataagggcaaatctccagcaataggcatctaattatagcagaattcgttattccaaaattaagcagaagtatgtcggcttatctgtcacagtttcctgaggaaggtgctgttgtttaacattcttttcattaccaacctttaggagaatttaat

SEQ ID NO: 20899 - protein, 178 aa, Homo sapiens
MEVKNFAVWDYVVFAALFFISSGIGVFFAIKERKKATSREFLVGGRQMSFGPVGLSLTASFMSAVTVLGTPSEVYRFGASFLVFFIAYLFVILLTSELFLPVFYRSGITSTYEYLQLRFNKPVRYAATVIYIVQTILYTGVVVYAPALALNQVTGFDLWGSVFATGIVCTFYCTLVCI

SEQ ID NO: 20900 - DNA, 2536 bp, Homo sapiens
aattaattttgattacatttaaaattctatatggcaaaaataccataattaaagataaaaggcaaagaacaaattgggaaaaatatttttcaacatatataaccaagggctaatttctctaacacctaaaaagttcttataaatcaataaaaagaaaaccaacatctcaatggaaaaagaacaaagctcataaagagttcacagaaaaaggatatacaaatggctttaaacatgtgaaagaatgttcaacttcactcacaataagaaaaaatacaaattatgagttgcttcagcatcctggtgttgctgtgccgtgggtcctgtgcggtcacttagccaagatgcctgaggaaacccagacccaagaccaaccgatggaggaggaggaggttgagacattcgcctttcaggcagaaattgcccagttgatgtcattgatcatcaatactttctactcgaacaaagagatctttctgagagagctcatttcaaattcatcagatgcattggacaaaatctggtatgaaagcttgacagatcccagtaaattagactctgggaaagagctgcatattaaccttataccaaacaaacaagatcaaactctcactattgtggatactggaattggaatgaccaaggctgacttgatcaataaccttggtactatcgccaagtctgggaccaaagcgttcatggaagctttgcaggctggtgcagatatctctatgattggccagttcggtgttagtttttattctgcttatttggttgctgagaaagtaactgtgatcaccaaacataatgatgatgagcagtacgcctgggagtcctcagcagggggatcattcacagtgaggacagacacaggtgaacgtatgggtcgtggaacaaaggttatcctacacctgaaagaagaccaaactgagtacttggaggaacaaagaataaaggagattgtgaagaaacattctcagcttattggatatcccattactctttttgtggagaaggaatgtgataaagaagtcagcgacgatgagactgaagaaaaggaagacaaagaagaagaaaaagaaaaagaagagaaagagtccaaagacaaacctgaaattgaagatgttggttctgatgaggaagaagaaaagaaggatggtgacaagaagaagaagaagactaaggaaaagtacatcgaccaagaagaactcaacaaaacaaagcccatctggaccagaaatcccgacgatattactaatgaggagtacggagaattctgcaagaacttgaccaatgactgggaagatcacttggcagtgaagcatttttcagttgaaggacagttggaattcagagcccttctatttgtcccatgacgtgctccttttgacctgtttgaaaacagaaagaaaaagaacaacatcaaattgtatgtacgcagagatttcatcatggataactgtgaggagctaatccctgaatatctgaacttcattagaggggtggtagactcggaggatctccctctaaacatttcccgtgagatgttgcaacaaagtaaaattttgaaagttatcaggaaaaatttggtcaaaaaatgcttagaactctttacagaactggcggaagataaagagaactgcaagaaattctatgagcagttctctaaaaacataaagcttggaatacaagaagactctcaaaatcggaagaagctttcagagctgttaaggtactacacgtctgcctctggtgatgagatggtttctctcaaggactactgcaccagaatgaaggaaaaacagaaacatatctattatatcacaggtgagaccaaggaccaggtagctaactcagcctttgtggaacgtcttgggaaacatggcttagaagtgatctatatgattgagcccattgatgagtactgtgtccaacagctgaaggaatttgaggggaagactttagtgccagtcaccaaagaaggcctggaacttccagaggatgaagaaaagaaaaagaaataggaagagaaaaaacaatgtttgagaacctctgcaaaaccatgaaagacatattggagaaaaaagttgaaaaggtggttgtgtcaaaccgattggtgacgtctccatgctgtattgtcacaagcacatatggctggacagaaaacatggagagaatcatgaaagctcaagccctaagagacaactcaacaatgggttatatggcagccaagaaacacctggagataaatcctgatgattccattattgagaccttaaggcaaaaggcagaggctgataagaatgacaagtctgtgaaggatctgctcatcttgctttacgaaactgcactcctgtcttctggcttcagtctggaagatccccagacacatgctaacaggacctacaggatgatcaaacttggtctgggtattgatgaagatgatcctgctgctgatgataccagtgctgctgtaactgaagaaatgccgcccctcgaaggagatgacgacacatcatgcatggaagaagtagactaa

SEQ ID NO: 20901 - protein, 343 aa, Homo sapiens; identical to SEQ ID NO: 2659

SEQ ID NO: 20902 - DNA, 818 bp, Homo sapiens
attcctttcaattttaggtaaaagaaacctttttaccagatagtgacgagtggctaccatgattaataagtgactagacctcatggtcctcctcatactaaaaggtgaacagtgcaagctgtcggtggatctaccattctggggtcttggggacagtggccctcttctcacagctcccggtgaatgctgcaatgatcattggtaggactgttaggctttgtttctcaagaggataatctgattgggaaaagaataagagtgcagctgcagcccatccttgtgaagaaggtaccagtgcgctctcaaagccaagtcttgaaaataatagcgaatgctgtattggataacagccatgccagatacagagaagccacagatggcattgtcaccagaaaatggaagcacaaagcgctttgggtaacagcaattcaagaatgactgcagagaaaatctattaagaaattcaaatgcagatttcaatatttactccttttcattctcttcctctctctctcgctcacttgctctttttctctctcccaccttgtttttctcgctctccttttttttgcatacagtttctcagtaaaatacatttgattaaattttataacaaacaagcttatgaaatgcagatatacaaaaaggaaaacataagaagcatgcataattctaccactgaaaaatactactaaaatttggtatttaaacttttgaatgtttgtcactgcacttgcatgtgtgtgtaaatataatctccaactctgcagagaaatacaagaattgttatgaaccttaataaactcccaaaagatttc

SEQ ID NO: 20903 - protein, 40 aa, Homo sapiens; identical to SEQ ID NO: 5062

SEQ ID NO: 20904 - DNA, 3473 bp, Homo sapiens
agcggcagccaatgaaacgaagcgctgaggaaagtggcttgggtttgaatattgtggttgagtctgaagcgctgggaggcggacattaaagtgaagtggttgcggtaacctggcctgggcctgaagtgagtgagaggcacatgaagagaagtattcaagtatttatacagataggaatcaagataatcaacaatgtctgtcactgaggaagacctgtgccaccatatgaaagtagtagttcgtgtacgtccggaaaacactaaagaaaaagcagctggatttcataaagtggttcatgttgtggataaacatatcctagtttttgatcccaaacaagaagaagtcagttttttccatggaaagaaaactacaaatcaaaatgttataaagaaacaaaataaggatcttaaatttgtatttgatgctgtttttgatgaaacgtcaactcagtcagaagtttttgaacacactactaagccaattcttcgtagttttttgaatggatataattgcacagtacttgcctatggtgccactggtgctgggaagacccacactatgctaggatcagctgatgaacctggagtgatgtatctaacaatgttacacctttacaaatgcatggatgagattaaagaagagaaaatatgtagtactgcagtttcatatctggaggtatataatgaacagattcgtgatctcttagtaaattcagggccacttgctgtccgggaagatacccaaaaaggggtggtcgttcatggacttactttacaccagcccaaatcctcagaagaaattttacatttattggataatggaaacaaaaacaggacacaacatcccactgatatgaatgccacatcttctcgttctcatgctgttttccaaatttacttgcgacaacaagacaaaacagcaagtatcaatcaaaatgtccgtattgccaagatgtcactcattgacctggcaggatctgagcgagcaagtacttccggtgctaaggggacccgatttgtagaaggcacaaatattaatagatcacttttagctcttgggaatgtcatcaatgccttagcagattcaaagagaaagaatcagcatatcccttacagaaatagtaagcttactcgcttgttaaaggattctcttggaggaaactgtcaaactataatgatagctgctgttagtccttcctctgtattctacgatgacacatataacactcttaagtatgctaaccgggcaaaggacattaaatcttctttgaagagcaatgttcttaatgtcaataatcatataactcaatatgtaaagatctgtaatgagcagaaggcagagattttattgttaaaagaaaaactaaaagcctatgaagaacagaaagccttcactaatgaaaatgaccaagcaaagttaatgatttcaaaccctcaggaaaaagaaatcgaaaggtttcaagaaatcctgaactgcttgttccagaatcgagaagaaattagacaagaatatctgaagttggaaatgttacttaaagaaaatgaacttaaatcattctaccaacaacagtgccataaacaaatagaaatgatgtgttctgaagacaaagtagaaaaggccactggaaaacgagatcatagacttgcaatgttgaaaactcgtcgctcctacctggagaaaaggagggaggaggaattgaagcaatttgatgagaatactaattggctccatcgtgtcgaaaaagaaatgggactcttaagtcaaaacggtcatattccaaaggaactcaagaaagatcttcattgtcaccatttgcacctccagaacaaagatttgaaagcacaaattagacatatgatggatctagcttgtcttcaggaacagcaacacaggcagactgaagcagtattgaatgctttacttccaaccctaagaaaacaatattgcacattaaaagaagccggcctgtcaaatgctgcttttgaatctgacttcaaagagatcgaacatttggtagagaggaaaaaagtggtagtttgggctgaccaaactgccgaacaaccaaagcaaaacgatctaccagggatttctgttcttatgacctttccacaacttggaccagttcagcctattccttgttgctcatcttcaggtggaactaatctggttaagattcctacagaaaaaagaactcggagaaaactaatgccatctcccttgaaaggacagcatactctaaagtctccaccatctcaaagtgtgcagctcaatgattctcttagcaaagaacttcagcctattgtatatacaccagaagactgtagaaaagcttttcaaaatccgtctacagtaaccttaatgaaaccatcatcatttactacaagttttcaggctatcagctcaaacataaacagtgataattgtctgaaaatgttgtgtgaagtagctatccctcataatagaagaaaagaatgtggacaggaggacttggactctacatttactatatgtgaagacatcaagagctcgaagtgtaaattacccgaacaagaatcactaccaaatgataacaaagacattttacaacggcttgatccttcttcattctcaactaagcattctatgcctgtaccaagcatggtgccatcctacatggcaatgactactgctgccaaaaggaaacggaaattaacaagttctacatcaaacagttcgttaactgcagacgtaaattctggatttgccaaacgtgttcgacaagataattcaagtgagaagcacttacaagaaaacaaaccaacaatggaacataaaagaaacatctgtaaaataaatccaagcatggttagaaaatttggaagaaatatttcaaaaggaaatctaagataaatcacttcaaaaccaagcaaaatgaagttgatcaaatctgcttttcaaagtttatcaataccctttcaaaaatatatttaaaatctttgaaagaagacccatcttaaagctaagtttacccaagtactttcagcaagcagaaaaatgaaactctttgttttcttcttttgtgttctaaaaaaataaaatttcaaaagaaaaggttgtcttttaagttttttaaatatttgttgccttttaaaatccctgagtgtaagttaccatggtggcagcttagttttactatgccacaacaagttgactaggacattttagtaaatggtagtgagttaaattatctttattattttttaaaaataagaatttagaagtggtaaaattatggcccaagatgtatttggttctctattatgttttgatacattattttaatcatatatatgactttccttttcaaaaatactttaatgtacaagtgtaaatatatgtgcccataaaatcattgtaaatattatttagtcatcacaaataaaatattgtcccttgctacttgatatattaaagatgtagattttaaagtgttt

SEQ ID NO: 20905 - protein, 898 aa, Homo sapiens
MSVTEEDLCHHMKVVVRVRPENTKEKAAGFHKVVHVVDKHILVFDPKQEEVSFFHGKKTTNQNVIKKQNKDLKFVFDAVFDETSTQSEVFEHTTKPILRSFLNGYNCTVLAYGATGAGKTHTMLGSADEPGVMYLTMLHLYKCMDEIKEEKICSTAVSYLEVYNEQIRDLLVNSGPLAVREDTQKGVVVHGLTLHQPKSSEEILHLLDNGNKNRTQHPTDMNATSSRSHAVFQIYLRQQDKTASINQNVRIAKMSLIDLAGSERASTSGAKGTRFVEGTNINRSLLALGNVINALADSKRKNQHIPYRNSKLTRLLKDSLGGNCQTIMIAAVSPSSVFYDDTYNTLKYANRAKDIKSSLKSNVLNVNNHITQYVKICNEQKAEILLLKEKLKAYEEQKAFTNENDQAKLMISNPQEKEIERFQEILNCLFQNREEIRQEYLKLEMLLKENELKSFYQQQCHKQIEMMCSEDKVEKATGKRDHRLAMLKTRRSYLEKRREEELKQFDENTNWLHRVEKEMGLLSQNGHIPKELKKDLHCHHLHLQNKDLKAQIRHMMDLACLQEQQHRQTEAVLNALLPTLRKQYCTLKEAGLSNAAFESDFKEIEHLVERKKVVVWADQTAEQPKQNDLPGISVLMTFPQLGPVQPIPCCSSSGGTNLVKIPTEKRTRRKLMPSPLKGQHTLKSPPSQSVQLNDSLSKELQPIVYTPEDCRKAFQNPSTVTLMKPSSFTTSFQAISSNINSDNCLKMLCEVAIPHNRRKECGQEDLDSTFTICEDIKSSKCKLPEQESLPNDNKDILQRLDPSSFSTKHSMPVPSMVPSYMAMTTAAKRKRKLTSSTSNSSLTADVNSGFAKRVRQDNSSEKHLQENKPTMEHKRNICKINPSMVRKFGRNISKGNLR

SEQ ID NO: 20906 - DNA, 3086 bp, Homo sapiens
agcggcagccaatgaaacgaagcgctgaggaaagtggcttgggtttgaatattgtggttgagtctgaagcgctgggaggcggacattaaagtgaagtggttgcggtaacctggcctgggcctgaagtgagtgagaggcacatgaagagaagtattcaagtatttatacagataggaatcaagataatcaacaatgtctgtcactgaggaagacctgtgccaccatatgaaagtagtagttcgtgtacgtccggaaaacactaaagaaaaagcagctggatttcataaagtggttcatgttgtggataaacatatcctagtttttgatcccaaacaagaagaagtcagttttttccatggaaagaaaactacaaatcaaaatgttataaagaaacaaaataaggatcttaaatttgtatttgatgctgtttttgatgaaacgtcaactcagtcagaagtttttgaacacactactaagccaattcttcgtagttttttgaatggatataattgcacagtacttgcctatggtgccactggtgctgggaagacccacactatgctaggatcagctgatgaacctggagtgatgtatctaacaatgttacacctttacaaatgcatggatgagattaaagaagagaaaatatgtagtactgcagtttcatatctggaggtatataatgaacagattcgtgatctcttagtaaattcagggccacttgctgtccgggaagatacccaaaaaggggtggtcgttcatggacttactttacaccagcccaaatcctcagaagaaattttacatttattggataatggaaacaaaaacaggacacaacatcccactgatatgaatgccacatcttctcgttctcatgctgttttccaaatttacttgcgacaacaagacaaaacagcaagtatcaatcaaaatgtccgtattgccaagatgtcactcattgacctggcaggatctgagcgagcaagtacttccggtgctaaggggacccgatttgtagaaggcacaaatattaatagatcacttttagctcttgggaatgtcatcaatgccttagcagattcaaagagaaagaatcagcatatcccttacagaaatagtaagcttactcgcttgttaaaggattctcttggaggaaactgtcaaactataatgatagctgctgttagtccttcctctgtattctacgatgacacatataacactcttaagtatgctaaccgggcaaaggacattaaatcttctttgaagagcaatgttcttaatgtcaataatcatataactcaatatgtaaagatctgtaatgagcagaaggcagagattttattgttaaaagaaaaactaaaagcctatgaagaacagaaagccttcactaatgaaaatgaccaagcaaagttaatgatttcaaaccctcaggaaaaagaaatcgaaaggtttcaagaaatcctgaactgcttgttccagaatcgagaagaaattagacaagaatatctgaagttggaaatgttacttaaagaaaatgaacttaaatcattctaccaacaacagtgccataaacaaatagaaatgatgtgttctgaagacaaagtagaaaaggccactggaaaacgagatcatagacttgcaatgttgaaaactcgtcgctcctacctggagaaaaggagggaggaggaattgaagcaatttgatgagaatactaattggctccatcgtgtcgaaaaagaaatgggactcttaagtcaaaacggtcatattccaaaggaactcaagaaagatcttcattgtcaccatttgcacctccagaacaaagatttgaaagcacaaattagacatatgatggatctagcttgtcttcaggaacagcaacacaggcagactgaagcagtattgaatgctttacttccaaccctaagaaaacaatattgcacattaaaagaagccggcctgtcaaatgctgcttttgaatctgacttcaaagagatcgaacatttggtagagaggaaaaaagtggtagtttgggctgaccaaactgccgaacaaccaaagcaaaacgatctaccagggatttctgttcttatgacctttccacaacttggaccagttcagcctattccttgttgctcatcttcaggtggaactaatctggttaagattcctacagaaaaaagaactcggagaaaactaatgccatctcccttgaaaggacagcatactctaaagtctccaccatctcaaagtgtgcagctcaatgattctcttagcaaagaacttcagcctattgtatatacaccagaagactgtagaaaagcttttcaaaatccgtctacagtaaccttaatgaaaccatcatcatttactacaagttttcaggctatcagctcaaacataaacagtgataattgtctgaaaatgttgtgtgaagtagctatccctcataatagaagaaaagaatgtggacaggaggacttggactctacatttactatatgtgaagacatcaagagctcgaagtgtaaattacccgaacaagaatcactaccaaatgataacaaagacattttacaacggcttgatccttcttcattctcaactaagcattctatgcctgtaccaagcatggtgccatcctacatggcaatgactactgctgccaaaaggaaacggaaattaacaagttctacatcaaacagttcgttaactgcagacgtaaattctggatttgccaaacgtgttcgacaagataattcaagtgagaagcacttacaagaaaacaaaccaacaatggaacataaaagaaacatctgtaaaataaatccaagcatggttagaaaatttggaagaaatatttcaaaaggaaatctaagataaatcacttcaaaaccaagcaaaatgaagttgatcaaatctgcttttcaaagtttatcaataccctttcaaaaatatatttaaaatctttgaaagaagacccatcttaaagctaagtttacccaagtactttcagcaagcagaaaaatgaaactctttgttttcttcttttgtgttctaaaaaaataaaatttcaaaag

SEQ ID NO: 20907 - protein, 898 aa, Homo sapiens; identical to SEQ ID NO: 20905

SEQ ID NO: 20908 - DNA, 2182 bp, Homo sapiens
agcggcagccaatgaaacgaagcgctgaggaaagtggcttgggtttgaatattgtggttgagtctgaagcgctgggaggcggacattaaagtgaagtggttgcggtaacctggcctgggcctgaagtgagtgagaggcacatgaagagaagtattcaagtatttatacagataggaatcaagataatcaacaatgtctgtcactgaggaagacctgtgccaccatatgaaagtagtagttcgtgtacgtccggaaaacactaaagaaaaagcagctggatttcataaagtggttcatgttgtggataaacatatcctagtttttgatcccaaacaagaagaagtcagttttttccatggaaagaaaactacaaatcaaaatgttataaagaaacaaaataaggatcttaaatttgtatttgatgctgtttttgatgaaacgtcaactcagtcagaagtttttgaacacactactaagccaattcttcgtagttttttgaatggatataattgcacagtacttgcctatggtgccactggtgctgggaagacccacactatgctaggatcagctgatgaacctggagtgatgtatctaacaatgttacacctttacaaatgcatggatgagattaaagaagagaaaatatgtagtactgcagtttcatatctggaggtatataatgaacagattcgtgatctcttagtaaattcagggccacttgctgtccgggaagatacccaaaaaggggtggtcgttcatggacttactttacaccagcccaaatcctcagaagaaattttacatttattggataatggaaacaaaaacaggacacaacatcccactgatatgaatgccacatcttctcgttctcatgctgttttccaaatttacttgcgacaacaagacaaaacagcaagtatcaatcaaaatgtccgtattgccaagatgtcactcattgacctggcaggatctgagcgagcaagtacttccggtgctaaggggacccgatttgtagaaggcacaaatattaatagatcacttttagctcttgggaatgtcatcaatgccttagcagattcaaagagaaagaatcagcatatcccttacagaaatagtaagcttactcgcttgttaaaggattctcttggaggaaactgtcaaactataatgatagctgctgttagtccttcctctgtattctacgatgacacatataacactcttaagtatgctaaccgggcaaaggacattaaatcttctttgaagagcaatgttcttaatgtcaataatcatataactcaatatgtaaagatctgtaatgagcagaaggcagagattttattgttaaaagaaaaactaaaagcctatgaagaacagaaagccttcactaatgaaaatgaccaagcaaagttaatgatttcaaaccctcaggaaaaagaaatcgaaaggtttcaagaaatcctgaactgcttgttccagaatcgagaagaaattagacaagaatatctgaagttggaaatgttacttaaagaaaatgaacttaaatcattctaccaacaacagtgccataaacaaatagaaatgatgtgttctgaagacaaagtagaaaaggccactggaaaacgagatcatagacttgcaatgttgaaaactcgtcgctcctacctggagaaaaggagggaggaggaattgaagcaatttgatgagaatactaattggctccatcgtgtcgaaaaagaaatgggactcttaagtcaaaacggtcatattccaaaggaactcaagaaagatcttcattgtcaccatttgcacctccagaacaaagatttgaaagcacaaattagacatatgatggatctagcttgtcttcaggaacagcaacacaggcagactgaagcagtattgaatgctttacttccaaccctaagaaaacaatattgcacattaaaagaagccggcctgtcaaatgctgcttttgaatctgacttcaaagagatcgaacatttggtagagaggaaaaaagtggtagtttgggctgaccaaactgccgaacaaccaaagcaaaacgatctaccagggatttctgttcttatgacctttccacaacttggaccagttcagcctattccttgttgctcatcttcaggtggaactaatctggttaagattcctacag

SEQ ID NO: 20909 - protein, 662 aa, Homo sapiens
MSVTEEDLCHHMKVVVRVRPENTKEKAAGFHKVVHVVDKHILVFDPKQEEVSFFHGKKTTNQNVIKKQNKDLKFVFDAVFDETSTQSEVFEHTTKPILRSFLNGYNCTVLAYGATGAGKTHTMLGSADEPGVMYLTMLHLYKCMDEIKEEKICSTAVSYLEVYNEQIRDLLVNSGPLAVREDTQKGVVVHGLTLHQPKSSEEILHLLDNGNKNRTQHPTDMNATSSRSHAVFQIYLRQQDKTASINQNVRIAKMSLIDLAGSERASTSGAKGTRFVEGTNINRSLLALGNVINALADSKRKNQHIPYRNSKLTRLLKDSLGGNCQTIMIAAVSPSSVFYDDTYNTLKYANRAKDIKSSLKSNVLNVNNHITQYVKICNEQKAEILLLKEKLKAYEEQKAFTNENDQAKLMISNPQEKEIERFQEILNCLFQNREEIRQEYLKLEMLLKENELKSFYQQQCHKQIEMMCSEDKVEKATGKRDHRLAMLKTRRSYLEKRREEELKQFDENTNWLHRVEKEMGLLSQNGHIPKELKKDLHCHHLHLQNKDLKAQIRHMMDLACLQEQQHRQTEAVLNALLPTLRKQYCTLKEAGLSNAAFESDFKEIEHLVERKKVVVWADQTAEQPKQNDLPGISVLMTFPQLGPVQPIPCCSSSGGTNLVKIP

SEQ ID NO: 20910 - DNA, 500 bp, Homo sapiens
gaatattgtggttgagtctgaagcgctgggaggcggacattaaagtgaagtggttgcggtaacctggcctgggcctgaagtgagtgagaggcacatgaagagaagtattcaagtatttatacagataggaatcaagataatcaacaatgtctgtcactgaggaagacctgtgccaccatatgaaagtagtagttcgtgtacgtccggaaaacactaaagaaaaagcagctggatttcataaagtggttcatgttgtggataaacatatcctagtttttgatcccaaacaagaagaagtcagttttttccatggaaagaaaactacaaatcaaaatgttataaagaaacaaaataaggatcttaaatttgtatttgatgctgtttttgatgaaacgtcaactcagtcagaagtttttgaacacactactaagccaattcttcgtagttttttgaatggatataattgcacaggtatataatgaacagattcgtgatctctt

SEQ ID NO: 20911 - protein, 110 aa, Homo sapiens
MSVTEEDLCHHMKVVVRVRPENTKEKAAGFHKVVHVVDKHILVFDPKQEEVSFFHGKKTTNQNVIKKQNKDLKFVFDAVFDETSTQSEVFEHTTKPILRSFLNGYNCTGI

SEQ ID NO: 20912 - DNA, 742 bp, Homo sapiens
tgaagcgctgggaggcggacattaaagtgaagtggttgcggtaacctggcctgggcctgaagtgagtgagaggcacatgaagagaagtattcaagtatttatacagataggaatcaagataatcaacaatgtctgtcactgaggaagacctgtgccaccatatgaaagtagtagttcgtgtacgtccggaaaacactaaagaaaaagcagctggatttcataaagtggttcatgttgtggataaacatatcctagtttttgatcccaaacaagaagaagtcagttttttccatggaaagaaaactacaaatcaaaatgttataaagaaacaaaataaggatcttaaatttgtatttgatgctgtttttgatgaaacgtcaactcagtcagaagtttttgaacacactactaagccaattcttcgtagttttttgaatggatataattgcacaggtatttgtttcaatttgggatttaatttctctatccgatttcacttttgcattaggacggacatctacttgacccttctaaatataatcaaatttaaggagcttgtatgctaaaaattcttaagaaattcaatagacttgaactgtaaatatagactttgaaattttagttatcatatataacttatacatcatttgtaaacctttctcttccagggccttactgtggcccctatagacatctgtcctttcagttgcctatgttattaaaccacatgcttattgcaatt

SEQ ID NO: 20913 - protein, 145 aa, Homo sapiens [sequence omitted]

SEQ ID NO: 20914 - DNA, 2312 bp, Homo sapiens
ggagctgctggtgggaggcagccacttgagatcaccaggcctcctgtagaccggcgggtgcagggcccggtcccagagttaagggaaagtcgtttggaaaccccaggccaacaggaccctttggcagctgaggctggaaacagcggaaccaaaggcagacggtcctcagttgcttgggcggacgtggacccaatctgtccgtccttacaagtttcccccaggggcaggacctagacgcgcggcgcattcaggttctcctggaccgtagtggtagtcgctggcccgagttagaggccagctgagaagtcttcgtgcttcagatttgtttacctacaaaatgcttcggtatccatatttttgtagaatgtataaagaatgcctttcatgttggttggaatctggcatacctaatttaggtgtctggccaaacagaatacatactacagcagaaaaatatagagaatatgaagcccgggagcaaacagatcaaactcaagcccaggagttacacagatctcaagatagagattttgaaactatggctaaattacatattccagtaatggtggatgaagttgttcattgtttgtcaccacaaaaaggacagatttttctagatatgacatttggttcgggagggcacacaaaagccattctgcagaaggagtcagatattgttctctatgccttggacagagacccaacagcttatgcattagctgaacatctttcagagttgtatcctaaacaaatccgagctatgctgggccagttcagccaggcagaagccttattaatgaaagctggagtgcagccaggaacttttgatggagttcttatggatcttgggtgttcctccatgcaacttgatactcctgaaagaggtttttcccttcggaaagatggccctttggacatgagaatggatggtggcagatcaacaggcacttgcatctatcctaagaacatacggggaggagaagcatgccaagaaaatcgcttcagcaattgttcaggcacgcagcatctaccccatcaccagaacccagcagcttgccagcatcgttgcaggagcatttcctccctctgctatttatacacggaaagacttactacagcgatctacccatattgccaccaagactttccaggctcttcgcatatttgtgaacaatgagctcaatgaactctacacgggactgaagacagctcagaagtttctgagacctggtggtcgtcttgttgccctctccttccattcactagaggatcgcatcgtcaaaagatttttgcttggaataagcatgacagaaagatttaacctaagtgttagacaacaagtgatgaaaacatctcaattgggttcagatcacgaaaacacggaagaagtctctatgagaagagctcctttaatgtgggaattgatacacaagaaggtacttagtccacaagatcaggatgtacaagataaccccagagggcgctcagccaagcttagagcagctatcaaattataagttatcatcatcttattcttcaaatttttttctcacaatttctctaatctttactcatgttatgtccctgaatgtcttggtataggtttaagtgtgggacagtctgaaaattgatagcatttagcatttcttttttctcaaaaagaaactgtaggaaatacatgacagagaaagttacactcagggagcagcagcacctccagactggaaaaatatgttaatctttgcatcatattggactcttgaaggcaatccttcctctggccaggaaattttttaaaaaataatactgtgttgtgtttatctaaatacgtaaactcaagctaccaaagagaaagatgttgtaatcatatctgcatgtcctaaattttgaatttagatattccaatttgcatcagtctttctgtggctcaaataatgatgattatggaatgaattttaatgtccctacttgtgaataattagctttctcaaatgtaggctttttacaaattttaaattttaaaatattagtttaaatgtgtgttatactgataaaatttcatctttcaaattatagtctattattttaaagggatttttcagtatgatatgggccattttgttcatctatcgcaaagtaaaaatgtaaaatccttacagagaattgtttcacaaaacttatatttcatgtcaattgtatttattttaataatagctcacaatgcctttagtaagtaataaagtctcttattagaatcttgtattttttaattgagctaatcaaaataattcagccaagtctatttgaaatag

SEQ ID NO: 20915 - protein, 279 aa, Homo sapiens
MLRYPYFCRMYKECLSCWLESGIPNLGVWPNRIHTTAEKYREYEAREQTDQTQAQELHRSQDRDFETMAKLHIPVMVDEVVHCLSPQKGQIFLDMTFGSGGHTKAILQKESDIVLYALDRDPTAYALAEHLSELYPKQIRAMLGQFSQAEALLMKAGVQPGTFDGVLMDLGCSSMQLDTPERGFSLRKDGPLDMRMDGGRSTGTCIYPKNIRGGEACQENRFSNCSGTQHLPHHQNPAACQHRCRSISSLCYLYTERLTTAIYPYCHQDFPGSSHICEQ

SEQ ID NO: 20916 - DNA, 2388 bp, Homo sapiens
agtttcccccaggggcaggacctagacgcgcggcgcattcaggttctcctggaccgtagtggtagtcgctggcccgagttagaggccagctgagaagtcttcgtgcttcagatttgtttacctacaaaatgcttcggtatccatatttttgtagaatgtataaagaatgcctttcatgttggttggaatctggcatacctaatttaggtgtctggccaaacagaatacatactacagcagaaaaatatagagaatatgaagcccgggagcaaacagatcaaactcaagcccaggagttacacagatctcaagatagagattttgaaactatggctaaattacatattccagtaatggtggatgaagttgttcattgtttgtcaccacaaaaaggacagatttttctagatatgacatttggttcgggagggcacacaaaagccattctgcagaaggagtcagatattgttctctatgccttggacagagacccaacagcttatgcattagctgaacatctttcagagttgtatcctaaacaaatccgagctatgctgggccagttcagccaggcagaagccttattaatgaaagctggagtgcagccaggaacttttgatggagttcttatggatcttgggtgttcctccatgcaacttgatactcctgaaagaggtttttcccttcggaaagatggccctttggacatgagaatggatggtggcagatcaacaggcacttgcatctatcctaagaacatacggggaggagaagcatgccaagaaaatcgcttcagcaattgttcaggcacgcagcatctaccccatcaccagaacccagcagcttgccagcatcgttgcaggagcatttcctccctctgctatttatacacggaaagacttactacagcgatctacccatattgccaccaagactttccaggctcttcgcatatttgtgaacaatgagctcaatgaactctacacgggactgaagacagctcagaagtttctgagacctggtggtcgtcttgttgccctctccttccattcactagaggatcgcatcgtcaaaagatttttgcttggaataagcatgacagaaagatttaacctaagtgttagacaacaagtgatgaaaacatctcaattgggttcagatcacgaaaacacggaagaagtctctatgagaagagctcctttaatgtgggaattgatacacaagaaggtacttagtccacaagatcaggatgtacaagataaccccagagggcgctcagccaagcttagagcagctatcaaattataagttatcatcatcttattcttcaaatttttttctcacaatttctctaatctttactcatgttatgtccctgaatgtcttggtataggtttaagtgtgggacagtctgaaaattgatagcatttagcatttcttttttctcaaaaagaaactgtaggaaatacatgacagagaaagttacactcagggagcagcagcacctccagactggaaaaatatgttaatctttgcatcatattggactcttgaaggcaatccttcctctggccaggaaattttttaaaaaataatactgtgttgtgtttatctaaatacgtaaactcaagctaccaaagagaaagatgttgtaatcatatctgcatgtcctaaattttgaatttagatattccaatttgcatcagtctttctgtggctcaaataatgatgattatggaatgaattttaatgtccctacttgtgaataattagctttctcaaatgtaggctttttacaaattttaaattttaaaatattagtttaaatgtgtgttatactgataaaatttcatctttcaaattatagtctattattttaaagggatttttcagtatgatatgggccattttgttcatctatcgcaaagtaaaaatgtaaaatccttacagagaattgtttcacaaaacttatatttcatgtcaattgtatttattttaataatagctcacaatgcctttagtaagtaataaagtctcttattagaatcttgtattttttaattgagctaatcaaaataattcagccaagtctatttgaaatagaaaactgtctatttaatatagtaaaatcaatgctcccttaatgttgttacaaagatatggtaactgtaatatgggtaaaagtttattcaagaaaagagtacttggtagaagattctttaacaaattgaggagattgattcataattcacatgtcaattttttatagtaatatgtacttctaatttattatttatacttaaattgtgacctgaaagatgagttggagataattagtcaaagggcacatggagtatggaagggggcatgttgattaaccatacatag

SEQ ID NO: 20917 - protein, 279 aa, Homo sapiens; identical to SEQ ID NO: 20915

SEQ ID NO: 20918 - DNA, 4177 bp, Homo sapiens
ctagacgcgcggcgcattcaggttctcctggaccgtagtggtagtcgctggcccgagttagaggccagctgagaagtcttcgtgcttcagatttgtttacctacaaaatgcttcggtatccatatttttgtagaatgtataaagaatgcctttcatgttggttggaatctggcatacctaatttaggtgtctggccaaacagaatacatactacagcagaaaaatatagagaatatgaagcccgggagcaaacagatcaaactcaagcccaggagttacacagatctcaagatagagattttgaaactatggctaaattacatattccagtaatggtggatgaagttgttcattgtttgtcaccacaaaaaggacagatttttctagatatgacatttggttcgggagggcacacaaaagccattctgcagaaggagtcagatattgttctctatgccttggacagagacccaacagcttatgcattagctgaacatctttcagagttgtatcctaaacaaatccgagctatgctgggccagttcagccaggcagaagccttattaatgaaagctggagtgcagccaggaacttttgatggagttcttatggatcttgggtgttcctccatgcaacttgatactcctgaaagaggtttttcccttcggaaagatggccctttggacatgagaatggatggtggcaggtaccctgacatgcccactgctgctgatgttgtgaatgctttagatcaacaggcacttgcatctatcctaagaacatacggggaggagaagcatgccaagaaaatcgcttcagcaattgttcaggcacgcagcatctaccccatcaccagaacccagcagcttgccagcatcgttgcagaatactctgaaacatatttcccagtggcccaaactctttattaggaaaatggacgaattgaatagcaaatggagcatttcctccctctgctatttatacacggaaagacttactacagcgatctacccatattgccaccaagactttccaggctcttcgcatatttgtgaacaatgagctcaatgaactctacacgggactgaagacagctcagaagtttctgagacctggtggtcgtcttgttgccctctccttccattcactagaggatcgcatcgtcaaaagatttttgcttggaataagcatgacagaaagatttaacctaagtgttagacaacaagtgatgaaaacatctcaattgggttcagatcacgaaaacacggaagaagtctctatgagaagagctcctttaatgtgggaattgatacacaagaaggtacttagtccacaagatcaggatgtacaagataaccccagagggcgctcagccaagcttagagcagctatcaaattataagttatcatcatcttattcttcaaatttttttctcacaatttctctaatctttactcatgttatgtccctgaatgtcttggtataggtttaagtgtgggacagtctgaaaattgatagcatttagcatttcttttttctcaaaaagaaactgtaggaaatacatgacagagaaagttacactcagggagcagcagcacctccagactggaaaaatatgttaatctttgcatcatattggactcttgaaggcaatccttcctctggccaggaaattttttaaaaaataatactgtgttgtgtttatctaaatacgtaaactcaagctaccaaagagaaagatgttgtaatcatatctgcatgtcctaaattttgaatttagatattccaatttgcatcagtctttctgtggctcaaataatgatgattatggaatgaattttaatgtccctacttgtgaataattagctttctcaaatgtaggctttttacaaattttaaattttaaaatattagtttaaatgtgtgttatactgataaaatttcatctttcaaattatagtctattattttaaagggatttttcagtatgatatgggccattttgttcatctatcgcaaagtaaaaatgtaaaatccttacagagaattgtttcacaaaacttatatttcatgtcaattgtatttattttaataatagctcacaatgcctttagtaagtaataaagtctcttattagaatcttgtattttttaattgagctaatcaaaataattcagccaagtctatttgaaatagaaaactgtctatttaatatagtaaaatcaatgctcccttaatgttgttacaaagatatggtaactgtaatatgggtaaaagtttattcaagaaaagagtacttggtagaagattctttaacaaattgaggagattgattcataattcacatgtcaattttttatagtaatatgtacttctaatttattatttatacttaaattgtgacctgaaagatgagttggagataattagtcaaagggcacatggagtatggaagggggcatgttgattaaccatacatagaaataaatattctcttagttatccttgaaatcatatttatactattaatttgctcagtgcacttttttcaaatacagaaaaaagattctccattatagttacaaattttaggttggtgaatccaagtgaatgaaatatcagcataactatgtgggcaaaatagatagaattaaatgcatgaattttcctcagacttattttatctgcctctgtaatatttaactttagtacccaggcttgttcactacttctgctttacaggctttatttaaatctgaacaatcctacagggaaatcagaattaggaaaaaaatctggagaacaatatggttgaaatagaaacaagagaatgcacctaggttaattccctgaatcctacttgaacattgtataaatttctctttgcatataatacatatttgtgaatgagacatattcccaaaaaattcttatctctgtatgtgattggaaaagaaaagatcacatttgtatattcaacaatctttcacctatttcataagtcattttttcaccctgtatagtatgggaattattttttatgttaaatagaaactgaatgtactgggttgaatggtgtcctctccaaaattcatgtacttcctggagcctcagtatgtgaccttatttggaaatactgtggttgtggttgtaagtagctaagatgaggtcatactggagcagggcaggcccttaatccaatatgactggtgttccttataagagaagatagggcgggcatggtggctcacgcctgtaatcccagcactgtgggaggccaagccaggcaaatcgcttgaggctgaggagttcaagaccagcctggccaacatggcgaaaacccatctctactaaaaataaaattagccatgcgtggtgcttgtaatgtcagctacccaggagtctgaggcacaagaatcactcgaacctgggaggtggaggttgcgagatcacaccactgcactccagtgtgagcaacagaacgagactctgtctcaaaaaaaaaaaaaaaaaggaagaaagagaagatagagacacaggggagaatgccacatgaagctggaggcagagattggagtgatacattgtgggaaccctcagaagataggaaaaaagcatggaatagattctccctcagagttccagtagttgccaaccctgctaacatggttttgcacatctagcatccagaacagtgagaatgtatttctgctgttttaaggtacccagttcatggtaatttgttacagcaatcctaggaagctaatactctgacagaaaaaaatcttggataatatgcatgagaaaaatccttcaataaacacaaaattggtttcaaaatgttttcatgtaaaaataaattaacttttctgtaattagattgtgttttatagtaattcttgcctgcttcttagtctttgttgtaggatgcataataaaatacatgaatgagttttaaatggttagctttggagaatggttttgggaagttcctacagtacacagaaataaaagctaatgttactatgaatgcgcattacttttctaataaaatgtttctgaatctctgtcttgactgccttctatgaatcattttaacatagtatcaatgtcattgtgtagtacatcagttcttaacagtttttagttcattacttaaataaaatttaataacta

SEQ ID NO: 20919 - protein, 273 aa, Homo sapiens
MLRYPYFCRMYKECLSCWLESGIPNLGVWPNRIHTTAEKYREYEAREQTDQTQAQELHRSQDRDFETMAKLHIPVMVDEVVHCLSPQKGQIFLDMTFGSGGHTKAILQKESDIVLYALDRDPTAYALAEHLSELYPKQIRAMLGQFSQAEALLMKAGVQPGTFDGVLMDLGCSSMQLDTPERGFSLRKDGPLDMRMDGGRYPDMPTAADVVNALDQQALASILRTYGEEKHAKKIASAIVQARSIYPITRTQQLASIVAEYSETYFPVAQTLY

SEQ ID NO: 20920 - DNA, 4104 bp, Homo sapiens
agacgcgcggcgcattcaggttctcctggaccgtagtggtagtcgctggcccgagttagaggccagctgagaagtcttcgtgcttcagatttgtttacctacaaaatgcttcggtatccatatttttgtagaatgtataaagaatgcctttcatgttggttggaatctggcatacctaatttaggtgtctggccaaacagaatacatactacagcagaaaaatatagagaatatgaagcccgggagcaaacagatcaaactcaagcccaggagttacacagatctcaagatagagattttgaaactatggctaaattacatattccagtaatggtggatgaagttgttcattgtttgtcaccacaaaaaggacagatttttctagatatgacatttggttcgggagggcacacaaaagccattctgcagaaggagtcagatattgttctctatgccttggacagagacccaacagcttatgcattagctgaacatctttcagagttgtatcctaaacaaatccgagctatgctgggccagttcagccaggcagaagccttattaatgaaagctggagtgcagccaggaacttttgatggagttcttatggatcttgggtgttcctccatgcaacttgatactcctgaaagaggtttttcccttcggaaagatggccctttggacatgagaatggatggtggcaggtaccctgacatgcccactgctgctgatgttgtgaatgctttagatcaacaggcacttgcatctatcctaagaacatacggggaggagaagcatgccaagaaaatcgcttcagcaattgttcaggcacgcagcatctaccccatcaccagaacccagcagcttgccagcatcgttgcaggagcatttcctccctctgctatttatacacggaaagacttactacagcgatctacccatattgccaccaagactttccaggctcttcgcatatttgtgaacaatgagctcaatgaactctacacgggactgaagacagctcagaagtttctgagacctggtggtcgtcttgttgccctctccttccattcactagaggatcgcatcgtcaaaagatttttgcttggaataagcatgacagaaagatttaacctaagtgttagacaacaagtgatgaaaacatctcaattgggttcagatcacgaaaacacggaagaagtctctatgagaagagctcctttaatgtgggaattgatacacaagaaggtacttagtccacaagatcaggatgtacaagataaccccagagggcgctcagccaagcttagagcagctatcaaattataagttatcatcatcttattcttcaaatttttttctcacaatttctctaatctttactcatgttatgtccctgaatgtcttggtataggtttaagtgtgggacagtctgaaaattgatagcatttagcatttcttttttctcaaaaagaaactgtaggaaatacatgacagagaaagttacactcagggagcagcagcacctccagactggaaaaatatgttaatctttgcatcatattggactcttgaaggcaatccttcctctggccaggaaattttttaaaaaataatactgtgttgtgtttatctaaatacgtaaactcaagctaccaaagagaaagatgttgtaatcatatctgcatgtcctaaattttgaatttagatattccaatttgcatcagtctttctgtggctcaaataatgatgattatggaatgaattttaatgtccctacttgtgaataattagctttctcaaatgtaggctttttacaaattttaaattttaaaatattagtttaaatgtgtgttatactgataaaatttcatctttcaaattatagtctattattttaaagggatttttcagtatgatatgggccattttgttcatctatcgcaaagtaaaaatgtaaaatccttacagagaattgtttcacaaaacttatatttcatgtcaattgtatttattttaataatagctcacaatgcctttagtaagtaataaagtctcttattagaatcttgtattttttaattgagctaatcaaaataattcagccaagtctatttgaaatagaaaactgtctatttaatatagtaaaatcaatgctcccttaatgttgttacaaagatatggtaactgtaatatgggtaaaagtttattcaagaaaagagtacttggtagaagattctttaacaaattgaggagattgattcataattcacatgtcaattttttatagtaatatgtacttctaatttattatttatacttaaattgtgacctgaaagatgagttggagataattagtcaaagggcacatggagtatggaagggggcatgttgattaaccatacatagaaataaatattctcttagttatccttgaaatcatatttatactattaatttgctcagtgcacttttttcaaatacagaaaaaagattctccattatagttacaaattttaggttggtgaatccaagtgaatgaaatatcagcataactatgtgggcaaaatagatagaattaaatgcatgaattttcctcagacttattttatctgcctctgtaatatttaactttagtacccaggcttgttcactacttctgctttacaggctttatttaaatctgaacaatcctacagggaaatcagaattaggaaaaaaatctggagaacaatatggttgaaatagaaacaagagaatgcacctaggttaattccctgaatcctacttgaacattgtataaatttctctttgcatataatacatatttgtgaatgagacatattcccaaaaaattcttatctctgtatgtgattggaaaagaaaagatcacatttgtatattcaacaatctttcacctatttcataagtcattttttcaccctgtatagtatgggaattattttttatgttaaatagaaactgaatgtactgggttgaatggtgtcctctccaaaattcatgtacttcctggagcctcagtatgtgaccttatttggaaatactgtggttgtggttgtaagtagctaagatgaggtcatactggagcagggcaggcccttaatccaatatgactggtgttccttataagagaagatagggcgggcatggtggctcacgcctgtaatcccagcactgtgggaggccaagccaggcaaatcgcttgaggctgaggagttcaagaccagcctggccaacatggcgaaaacccatctctactaaaaataaaattagccatgcgtggtgcttgtaatgtcagctacccaggagtctgaggcacaagaatcactcgaacctgggaggtggaggttgcgagatcacaccactgcactccagtgtgagcaacagaacgagactctgtctcaaaaaaaaaaaaaaaaaggaagaaagagaagatagagacacaggggagaatgccacatgaagctggaggcagagattggagtgatacattgtgggaaccctcagaagataggaaaaaagcatggaatagattctccctcagagttccagtagttgccaaccctgctaacatggttttgcacatctagcatccagaacagtgagaatgtatttctgctgttttaaggtacccagttcatggtaatttgttacagcaatcctaggaagctaatactctgacagaaaaaaatcttggataatatgcatgagaaaaatccttcaataaacacaaaattggtttcaaaatgttttcatgtaaaaataaattaacttttctgtaattagattgtgttttatagtaattcttgcctgcttcttagtctttgttgtaggatgcataataaaatacatgaatgagttttaaatggttagctttggagaatggttttgggaagttcctacagtacacagaaataaaagctaatgttactatgaatgcgcattacttttctaataaaatgtttctgaatctctgtcttgactgccttctatgaatcattttaacatagtatcaatgtcattgtgtagtacatcagttcttaacagtttttagttcattacttaaataaaatttaataacta

SEQ ID NO: 20921 - protein, 407 aa, Homo sapiens
MLRYPYFCRMYKECLSCWLESGIPNLGVWPNRIHTTAEKYREYEAREQTDQTQAQELHRSQDRDFETMAKLHIPVMVDEVVHCLSPQKGQIFLDMTFGSGGHTKAILQKESDIVLYALDRDPTAYALAEHLSELYPKQIRAMLGQFSQAEALLMKAGVQPGTFDGVLMDLGCSSMQLDTPERGFSLRKDGPLDMRMDGGRYPDMPTAADVVNALDQQALASILRTYGEEKHAKKIASAIVQARSIYPITRTQQLASIVAGAFPPSAIYTRKDLLQRSTHIATKTFQALRIFVNNELNELYTGLKTAQKFLRPGGRLVALSFHSLEDRIVKRFLLGISMTERFNLSVRQQVMKTSQLGSDHENTEEVSMRRAPLMWELIHKKVLSPQDQDVQDNPRGRSAKLRAAIKL

SEQ ID NO: 20922 - DNA, 361 bp, Homo sapiens
tgaaactatggctaaattacatattccagtaatggtggatgaagttgttcattgtttgtcaccacaaaaaggacagagtcttggtgtgaggagtgtgggaatatgaatcctacagcaaaagaagtaaactgtggatatttaatatattcataaagatggagaatttcccacttgagtgtattctattctgaattttggaaccaagctagctgattttacacgtttgattttatgattacatatggaaaaaaatcaaaaccgcaatgttacaggtctctcacacctttcactgtacttctgtaataaagggaattagaataatttattggttaaataaggtaactataaaccaatttttaac

SEQ ID NO: 20923 - protein, 32 aa, Homo sapiens
MAKLHIPVMVDEVVHCLSPQKGQSLGVRSVGI

SEQ ID NO: 20924 - DNA, 434 bp, Homo sapiens
acatttcgttttaacacatttttatcattagcaaactagcatcatttgagcaatgctaaatatagtgatgttattgggttcctaacagaaaacctcatattcttgaatgtttacttctttgatactttcataatttgagtatttatatatttttaaaaattttcaaatctttgtttcccctgcccgccgcctctctctctctctctcttttttttttctttttttagggacagggtattcctctatcacccagactggagtacagtgacaaaactgtagctcaccacaacctcaatctcctgggctcaggtgatcctccagctactcaggaggctgaggcgggagaatggtatgaagccggggggcggagcttgcagtgagaagagattgcgccactgcactccagcctgggtgacagagcgagattctgtctc

SEQ ID NO: 20925 - protein, 50 aa, Homo sapiens
GQGIPLSPRLEYSDKTVAHHNLNLLGSGDPPATQEAEAGEWYEAGGRSLQ

SEQ ID NO: 20926 - DNA, 469 bp, Homo sapiens
ttaagaaaagacaggctccagtgtgactcagcacagtgttcacagcccatgctctcaagaatctcagcttaggaggaggcaaagagccgctctacagtaaggtaaataagtcatttagtcaggaactctgcacatttacctctgcatttatcaaatatttgttgaaggaaataataaaagaagtgaggaggaagaagaggtttcctgggagaaagcactcgaggagcaataggtgtcctctttcatttccactaaatatgctgctcaatgccttgtggcataacagaatcaaaacttttcagatgccctgccgctttaacaagacccaggatatgtcaaaatggctcccacagaactttcatttgatcttatctttcgctgtcacacacatcgacctgcattttcttttttctttttgattctttatgtctgcaaatgaactgatgtaattaaaaaggtgaagaaataa

SEQ ID NO: 20927 - protein, 53 aa, Homo sapiens
MLLNALWHNRIKTFQMPCRFNKTQDMSKWLPQNFHLILSFAVTHIDLHFLFSF

SEQ ID NO: 20928 - DNA, 506 bp, Homo sapiens
atgcagtgttggactacatagaaagtacatatccttcattagtgctggcaagacagatgaattaatgcctttcagggaacttccctatttgtttaatatctaactagccctaaggttaatattcaaaattattgataaaatgcattaggagatctgatgatagatgtcttaagaagaagatcagagtttcggaaggacattctcacacagatctcagtttacctcttattccagagggcataaatatgcaatggcactattcataaactcaaccaatggcacaatcattttaatactgacatgcttcagtacaaataaatataattcagagaaaatcttccatgaatattccttacggagctggaaaaaacgttatctgaagcaagatgttactatgggaggattatattacgtgcactgtgttttggcaatgctttgggatacagtcattaaataggttggctgaaaattcattttactggttaattaaatccaagagtttgcaa

SEQ ID NO: 20929 - protein, 68 aa, Homo sapiens
MALFINSTNGTIILILTCFSTNKYNSEKIFHEYSLRSWKKRYLKQDVTMGGLYYVHCVLAMLWDTVIK

SEQ ID NO: 20930 - DNA, 934 bp, Homo sapiens
gcccccctgattttggatgttcatttgatccttcacagatctgggaaggtaacagcgagccgtaccatctgcagcacacagcagctcttggaggttactactgacagttttcattacactggtttgtgtgagtgcgtgtgtttgtgtgtgtttgtgagtgtgggtgcctgctttgcatgaaagagaatgtgtgagtgtccgtgtgtgtgtatgtgttagtgtgacaaccaaagcaggtatttcgtacagtaggagatttcaacaacgtgacaatattctctaggcacttgggctcactgtctgtagcccccaccccccgcctttcgccacctccttgcttccctactcccccttctgcttttgcctttgatgagtttttggcttactttttggcggagtctcttggacacgtttttgctggtgctggaagatcagatacatggaacctttgaaaactgattatttttctccgatatgacttaaaaaaaaataaaaagaagaaaagaaaatagagtagtgcacggcaagctagaggattgtaaattttccttggtgaactttgaggatccataaagaagaaaccaaatgaagtgtttactgtcattatccgtatttgatgaagaggatactgaggctcaaagagaattaataatttgttcaagaccgtctaatgtggagtaatcaagagtgaatgccctgaaagtacacaccccagcctggaccagcattcttttttttttttttttttttttttttgagaggaaaaactacagagacagagtagcagcagaaatggttctctttactgcgaggctgcaaggtcacccaatgagagaggggccaaataagctggaacatcatctaatacactgaatgtaggagttactggaaaagcaagaataacttatgcggattaacaatatggaaacatcct

SEQ ID NO: 20931 - protein, 31 aa, Homo sapiens
MKCLLSLSVFDEEDTEAQRELIICSRPSNVE

SEQ ID NO: 20932 - DNA, 491 bp, Homo sapiens
cttatcaagaatcatgcctttcctgttgcagagtagaagtaaacaaaatcaagaaatctccaatgctcacacaattttaacaggtttggccaatacaacagagacgtgaaaaccaacagatgtcccccaccaatccaggaatgagtgaattcttgctctatcaggacctgtgagacttccctcaagagctggttgttaaaaagagcctaggacctcttccctctcttgcttcctctcttgccttgtgatcttcacatcctgactctccttcaccttccactctgagtggaagtttcctgaggctctcgcaagaagcagatatcggcaccatgcttcttttacagtcttcatagtcctgagaacaaaatctaaatcctaggattccttgacattctgttactgagagtctgcagtctcaagactttaaggataatagttccaaaggaatgttatctgtacgttttttctgagtaaacacttccatttcaagc

SEQ ID NO: 20933 - protein, 31 aa, Homo sapiens
MPFLLQSRSKQNQEISNAHTILTGLANTTET

SEQ ID NO: 20934 - DNA, 431 bp, Homo sapiens
tctatcaggacctgtgagacttccctcaagagctggttgttaaaaagagcctaggacctcttccctctcttgcttcctctcttgccttgtgatcttcacatcctgactctccttcaccttccactctgagtggaagtttcctgaggctctcgcaagaagcagatatcggcaccatgcttcttttacagtcttcatagtcctgagaacaaaacagttcagatcaactcaacaatattccaagtgggctttgcagagcatcttctggactaagtagaaggagaaggagaaggagccagaccttccctgtggccatgctttctctaaaacagccctgatgacttactttttcaggttgaggtctgagtaagcctccatattatgtaataataattatattattatgtaataatataaaataatgatatcaatta

SEQ ID NO: 20935 - protein, 55 aa, Homo sapiens
LSFTFHSEWKFPEALARSRYRHHASFTVFIVLRTKQFRSTQQYSKWALQSIFWTK

SEQ ID NO: 20936 - DNA, 270 bp, Homo sapiens
aaagaagcagggaggggtgaaaggtgttgaggagatgaaatgccaggggtttacagtcagggctctcacaccaggtttcaattcacagctgcaggtaagacactgttctggggctcccagaatccctcagatcttccaagagagatgaaaacctccatccccaaaaagagaaaactctctattttcaagtggactgttcctatcaagagaattctatgaaatgttaatttttttaaacttataatattgattcttttctgtataaagaaa

SEQ ID NO: 20937 - protein, 59 aa, Homo sapiens
MPGVYSQGSHTRFQFTAAGKTLFWGSQNPSDLPREMKTSIPKKRKLSIFKWTVPIKRIL

SEQ ID NO: 20938 - DNA, 584 bp, Homo sapiens
taatttacatttctagagaacaagctctttatggtacatagaaataatcctgtcatacagtgaccattcagagagggataaaaaccttatatatgaaactttcactaataacctgaaacatcaccacagagacagttgggttatcctgtttgtttggacatccacttattcacttgaaatgcaggaaatctatttgaaaaaaacaaaacaaaacatgatcagttacttgatacaatcatgagatgtgatcgagaaaaacttattaaggaattattttgtcagagtcagtctctctcaacaagatttacaggccagttgttgacattgtagtatcctctctttgaacactggaattgagcaacttcaaagagtcattggaccaaggtcttcatgcttcaaataaacctgcatcaaagaaacctggctagaagacaaagatcatgctttattcccccacaaaaggattatgtttagatttaatgttgatgcctcagttaagtgctcactttgaaaatcaatacaacattgtgtgcttggttggctcaatacctctcagtcaatattaataaaaaaacagcaacaaa

SEQ ID NO: 20939 - protein, 30 aa, Homo sapiens
MRCDREKLIKELFCQSQSLSTRFTGQLLTL

SEQ ID NO: 20940 - DNA, 627 bp, Homo sapiens
agggtatgagagtcatttgtggcataacttcaacagacatgacagggctgactttgagttgaattataaaatttccaaatgaggatgtccaggaaccagatagacacgtgagttagaagctcagaaagcaggtcaccatcacctcttatctgatcattgcaacacttgcttacttgtcctcctatcaccagatctggctcctgacaattcaccttgcgtaatgagagggataaaaaccttatatatgaaactttcactaataacctgaaacatcaccacagagacagttgggttatcctgtttgtttggacatccacttattcacttgaaatgcaggaaatctatttgaaaaaaacaaaacaaaacatgatcagttacttgatacaatcatgagatgtgatcgagaaaaacttattaaggaattattttgtcagagtcagtctctctcaacaaggtaagctactttttcaatgtttctgattagagtagatccttgatgtttattatcagtgtcatcatcattaatgaaaatagtacgagaatatacaaagatgcataagtgagtaatggtgtaacattctaacatttctaagatgtgaatttggatcttgccatgcaagatcgaaa

SEQ ID NO: 20941 - protein, 34 aa, Homo sapiens
KLRKQVTITSYLIIATLAYLSSYHQIWLLTIHLA

SEQ ID NO: 20942 - DNA, 442 bp, Homo sapiens
gacttcagcagaaaaaaaaatcacctcattaaaggaaaattgtgccttatccccactactcgaagatgcaaccatctgcctggtcacagccacttttttcctttttttctcactccatcgtatgtgtgtgtggtggggcaggggataaggggaataatctctctccagtataagaagtgtgtggccctttacagggggtcccagagagccttctttctgctatgcgaggatacaagaggaattcaacaatctgcaatctggaagataaccctcccagaacccaatcatgctggcaccctgattttgaactttcagcctccagaactgtgagacatcaatgtattttgtttttgcagttttttatgaagttgaacatacacatatcctaagagccagttatttcgatcttctttatcaaagggaaataaaaacatatttcttc

SEQ ID NO: 20943 - protein, 55 aa, Homo sapiens
MRGYKRNSTICNLEDNPPRTQSCWHPDFELSASRTVRHQCILFLQFFMKLNIHIS

SEQ ID NO: 20944 - DNA, 544 bp, Homo sapiens
tcctcagatgatcacacccactttgcttcactttcatgtccagagctgcttagactgatttctgcaaagtgcacaggcattttcatgctgaggataaaggaccatgatcgcttgtctggacccagaaaatatttcccatttgctacacagatgccgtctcatccttccagagttcaagacttcagcagaaaaaaaaatcacctcattaaaggaaaattgtgccttatccccactactcgaagatgcaaccatctgcctggtcacagccacttttttcctttttttctcactccatcgtatgtgtgtgtggtggggcaggggataaggggaataatctctctccagtataagaagggatcaagaagcaacaggactgcgggatgggatagaaaataattttcatcttagcaatattgagtattccagtacatgagtattgtatgtttctcaattcacttagatccttaatttcccttagtcatgttttgtgattttcagtatacaaatcttgtactctgtattaaaccattcttgcattgctgta

SEQ ID NO: 20945 - protein, 103 aa, Homo sapiens; identical to SEQ ID NO: 2665

SEQ ID NO: 20946 - DNA, 2999 bp, Homo sapiens
ataaaaagaaaagactccgcacggcgcgggtgagtcagaacccagcagccgtgtaccccgcagagccgccagccccgggcatgttccgagacttcggggaacccggcccgagctccgggaacggcggcgggtacggcggccccgcgcagcccccggccgcagcgcaggcagcccagcagaagttccacctggtgccaagcatcaacaccatgagtggcagtcaggagctgcagtggatggtacagcctcatttcctggggcccagcagttaccccaggcctctgacctaccctcagtacagccccccacaaccccggccaggagtcatccgggccctggggccgcctccaggggtacgtcgaaggccttgtgaacaggagactgacaaactggaagatgagaaatctgggctgcagcgagagattgaggagctgcagaagcagaaggagcgcctagagctggtgctggaagcccaccgacccatctgcaaaatcccggaaggagccaaggagggggacacaggcagtaccagtggcaccagcagcccaccagccccctgccgccctgtaccttgtatctccctttccccagggcctgtgcttgaacctgaggcactgcacacccccacactcatgaccacaccctccctaactcctttcacccccagcctggtcttcacctaccccagcactcctgagccttgtgcctcagctcatcgcaagagtagcagcagcagcggagacccatcctctgacccccttggctctccaaccctcctcgctttgtgaggcgcctgagccctactccctgcagatgccaccctagccaatgtctcctccccttcccccaccggtccagctggcctggacagtatcccacatccaactccagcaacttcttctccatccctctaatgagactgaccatattgtgcttcacagtagagccagcttggggccaccaaagctgcccactgtttctcttgagctggcctctctagcacaatttgcactaaatcagagacaaaatatttcccatttgtgccagaggaatcctggcagcccagagactttgtagatccttagaggtcctctggagccctaaccccttccagatcactgccacactctccatcaccctcttcctgtgatccacccaaccctatctcctgacagaaggtgccactttacccacctagaacactaactcaccagccccactgccagcagcagcaggtgattggaccaggccattctgccgccccctcctgaaccgcacagctcaggaggcgcccttggcttctgtgatgagctgatctgcggatctcagctttgagaagccttcagctccagggaatccaagcctccacagcgagggcagctgctatttattttcctaaagagagtatttttatacaaacctaccaaaatggaataaaaggcttgaagctgtggcctgagtgcctcactggacccagaggccaatgggagagtatttggagccctaggtcccagccttagctctacagactcactgcatgaccttggacaaattctttgatatttttggactttgtcttatctgacaagtggggctacatccgctcggcctcatctccgggactgaggggagacagtcctctggggtaaaagcgaagaggcttaccgcccctctccccgtgggggcccacagtgctgctgcgtgtgccacggaggggcgctgttatgcccccttccagcctcagaggaggcggccgagtggttctaggcccccagcacctgcttcctgccccattgtcttggacaggaaggagccgggaagggagctggagccacttcaggggctggattaaggccggtcccggcgcccgatgggggaagtctggtttaccactgccccgcatcccaccccaggctcgaagtaatgggggaatcattagttctgcagtccttctggatgggaattgtaccctgtatcagcaccccaccctcgccccaaccccggcgagtaccaaacagacgctgcccaggccgtgggctccgcttccgtccgggtttattacccccaatccaacccccagcaagtccctccgctccagccttcagtccccctgctgccctgccagcaagagcgaggggcccttcttggtgtcaggatttcttagtccatgccagcggcccctcctgcgcagccaggacggcgtccaggtcccgaggtccacagcggtcccggggctcggggagcaatccgggcgggcgtcggcgtggaggaagcagtgccttcaatcatcgggggaacaggccaggggcaactgatccggactgcccacgctgccagtgctggagcttccatcgcctaggtcgcggggcccgcacgggggcaaggcaagctcgggtgctggcccggctcctgatcccccggcgccgctggggccgccgcgggggccccattcttcgcccagcgccaggcagagctccttaagcgctaggttctcccgcagcagctcctcctggcggccctccagctcggccagcttctgccaacagccgcccaggtcctcgcgcacggcccgggatgcttgggtcccgaagagctgccactggcgtgcggcgcgccgcccgcgctggcgctccgagtccaggaagcagcagaggtcgcgcagctcacggttctctgcctgcagacgccggttgagctgcttgagctcgcggatctcgcccaggtggccctgcagctgccgattcacctcctgcatgaggcggccgcgctgcaccagtgccgccaggcgcgccgcctcctcccgccgcaggcgccgcactagctcttccttgcctagcgccgccatctcctcgtccgtcagctcctccaggccgcctgcctcggcctccatggctggtcaggcctctggagcatcgcccgcccgccgccgcggcccaggagccccacgtcgggcccggcgccactcaggctcgggctccggctccgcacgcggcaggcag

SEQ ID NO: 20947 - protein, 235 aa, Homo sapiens
MFRDFGEPGPSSGNGGGYGGPAQPPAAAQAAQQKFHLVPSINTMSGSQELQWMVQPHFLGPSSYPRPLTYPQYSPPQPRPGVIRALGPPPGVRRRPCEQETDKLEDEKSGLQREIEELQKQKERLELVLEAHRPICKIPEGAKEGDTGSTSGTSSPPAPCRPVPCISLSPGPVLEPEALHTPTLMTTPSLTPFTPSLVFTYPSTPEPCASAHRKSSSSSGDPSSDPLGSPTLLAL

SEQ ID NO: 20948 - DNA, 2801 bp, Homo sapiens
ataaaaagaaaagactccgcacggcgcgggtgagtcagaacccagcagccgtgtaccccgcagagccgccagccccgggcatgttccgagacttcggggaacccggcccgagctccgggaacggcggcgggtacggcggccccgcgcagcccccggccgcagcgcaggcagcccagcaggagactgacaaactggaagatgagaaatctgggctgcagcgagagattgaggagctgcagaagcagaaggagcgcctagagctggtgctggaagcccaccgacccatctgcaaaatcccggaaggagccaaggagggggacacaggcagtaccagtggcaccagcagcccaccagccccctgccgccctgtaccttgtatctccctttccccagggcctgtgcttgaacctgaggcactgcacacccccacactcatgaccacaccctccctaactcctttcacccccagcctggtcttcacctaccccagcactcctgagccttgtgcctcagctcatcgcaagagtagcagcagcagcggagacccatcctctgacccccttggctctccaaccctcctcgctttgtgaggcgcctgagccctactccctgcagatgccaccctagccaatgtctcctccccttcccccaccggtccagctggcctggacagtatcccacatccaactccagcaacttcttctccatccctctaatgagactgaccatattgtgcttcacagtagagccagcttggggccaccaaagctgcccactgtttctcttgagctggcctctctagcacaatttgcactaaatcagagacaaaatatttcccatttgtgccagaggaatcctggcagcccagagactttgtagatccttagaggtcctctggagccctaaccccttccagatcactgccacactctccatcaccctcttcctgtgatccacccaaccctatctcctgacagaaggtgccactttacccacctagaacactaactcaccagccccactgccagcagcagcaggtgattggaccaggccattctgccgccccctcctgaaccgcacagctcaggaggcgcccttggcttctgtgatgagctgatctgcggatctcagctttgagaagccttcagctccagggaatccaagcctccacagcgagggcagctgctatttattttcctaaagagagtatttttatacaaacctaccaaaatggaataaaaggcttgaagctgtggcctgagtgcctcactggacccagaggccaatgggagagtatttggagccctaggtcccagccttagctctacagactcactgcatgaccttggacaaattctttgatatttttggactttgtcttatctgacaagtggggctacatccgctcggcctcatctccgggactgaggggagacagtcctctggggtaaaagcgaagaggcttaccgcccctctccccgtgggggcccacagtgctgctgcgtgtgccacggaggggcgctgttatgcccccttccagcctcagaggaggcggccgagtggttctaggcccccagcacctgcttcctgccccattgtcttggacaggaaggagccgggaagggagctggagccacttcaggggctggattaaggccggtcccggcgcccgatgggggaagtctggtttaccactgccccgcatcccaccccaggctcgaagtaatgggggaatcattagttctgcagtccttctggatgggaattgtaccctgtatcagcaccccaccctcgccccaaccccggcgagtaccaaacagacgctgcccaggccgtgggctccgcttccgtccgggtttattacccccaatccaacccccagcaagtccctccgctccagccttcagtccccctgctgccctgccagcaagagcgaggggcccttcttggtgtcaggatttcttagtccatgccagcggcccctcctgcgcagccaggacggcgtccaggtcccgaggtccacagcggtcccggggctcggggagcaatccgggcgggcgtcggcgtggaggaagcagtgccttcaatcatcgggggaacaggccaggggcaactgatccggactgcccacgctgccagtgctggagcttccatcgcctaggtcgcggggcccgcacgggggcaaggcaagctcgggtgctggcccggctcctgatcccccggcgccgctggggccgccgcgggggccccattcttcgcccagcgccaggcagagctccttaagcgctaggttctcccgcagcagctcctcctggcggccctccagctcggccagcttctgccaacagccgcccaggtcctcgcgcacggcccgggatgcttgggtcccgaagagctgccactggcgtgcggcgcgccgcccgcgctggcgctccgagtccaggaagcagcagaggtcgcgcagctcacggttctctgcctgcagacgccggttgagctgcttgagctcgcggatctcgcccaggtggccctgcagctgccgattcacctcctgcatgaggcggccgcgctgcaccagtgccgccaggcgcgccgcctcctcccgccgcaggcgccgcactagctcttccttgcctagcgccgccatctcctcgtccgtcagctcctccaggccgcctgcctcggcctccatggctggtcaggcctctggagcatcgcccgcccgccgccgcggcccaggagccccacgtcgggcccggcgccactcaggctcgggctccggctccgcacgcggcaggcag

SEQ ID NO: 20949 - protein, 169 aa, Homo sapiens
MFRDFGEPGPSSGNGGGYGGPAQPPAAAQAAQQETDKLEDEKSGLQREIEELQKQKERLELVLEAHRPICKIPEGAKEGDTGSTSGTSSPPAPCRPVPCISLSPGPVLEPEALHTPTLMTTPSLTPFTPSLVFTYPSTPEPCASAHRKSSSSSGDPSSDPLGSPTLLAL

SEQ ID NO: 20950 - DNA, 2909 bp, Homo sapiens
ataaaaagaaaagactccgcacggcgcgggtgagtcagaacccagcagccgtgtaccccgcagagccgccagccccgggcatgttccgagacttcggggaacccggcccgagctccgggaacggcggcgggtacggcggccccgcgcagcccccggccgcagcgcaggcagcccagcagatcagcccggaggaagaggagcgccgccgagtaaggcgcgagcggaacaagctggctgcggccaagtgcaggaaccggaggaaggaactgaccgacttcctgcaggcggagactgacaaactggaagatgagaaatctgggctgcagcgagagattgaggagctgcagaagcagaaggagcgcctagagctggtgctggaagcccaccgacccatctgcaaaatcccggaaggagccaaggagggggacacaggcagtaccagtggcaccagcagcccaccagccccctgccgccctgtaccttgtatctccctttccccagggcctgtgcttgaacctgaggcactgcacacccccacactcatgaccacaccctccctaactcctttcacccccagcctggtcttcacctaccccagcactcctgagccttgtgcctcagctcatcgcaagagtagcagcagcagcggagacccatcctctgacccccttggctctccaaccctcctcgctttgtgaggcgcctgagccctactccctgcagatgccaccctagccaatgtctcctccccttcccccaccggtccagctggcctggacagtatcccacatccaactccagcaacttcttctccatccctctaatgagactgaccatattgtgcttcacagtagagccagcttggggccaccaaagctgcccactgtttctcttgagctggcctctctagcacaatttgcactaaatcagagacaaaatatttcccatttgtgccagaggaatcctggcagcccagagactttgtagatccttagaggtcctctggagccctaaccccttccagatcactgccacactctccatcaccctcttcctgtgatccacccaaccctatctcctgacagaaggtgccactttacccacctagaacactaactcaccagccccactgccagcagcagcaggtgattggaccaggccattctgccgccccctcctgaaccgcacagctcaggaggcgcccttggcttctgtgatgagctgatctgcggatctcagctttgagaagccttcagctccagggaatccaagcctccacagcgagggcagctgctatttattttcctaaagagagtatttttatacaaacctaccaaaatggaataaaaggcttgaagctgtggcctgagtgcctcactggacccagaggccaatgggagagtatttggagccctaggtcccagccttagctctacagactcactgcatgaccttggacaaattctttgatatttttggactttgtcttatctgacaagtggggctacatccgctcggcctcatctccgggactgaggggagacagtcctctggggtaaaagcgaagaggcttaccgcccctctccccgtgggggcccacagtgctgctgcgtgtgccacggaggggcgctgttatgcccccttccagcctcagaggaggcggccgagtggttctaggcccccagcacctgcttcctgccccattgtcttggacaggaaggagccgggaagggagctggagccacttcaggggctggattaaggccggtcccggcgcccgatgggggaagtctggtttaccactgccccgcatcccaccccaggctcgaagtaatgggggaatcattagttctgcagtccttctggatgggaattgtaccctgtatcagcaccccaccctcgccccaaccccggcgagtaccaaacagacgctgcccaggccgtgggctccgcttccgtccgggtttattacccccaatccaacccccagcaagtccctccgctccagccttcagtccccctgctgccctgccagcaagagcgaggggcccttcttggtgtcaggatttcttagtccatgccagcggcccctcctgcgcagccaggacggcgtccaggtcccgaggtccacagcggtcccggggctcggggagcaatccgggcgggcgtcggcgtggaggaagcagtgccttcaatcatcgggggaacaggccaggggcaactgatccggactgcccacgctgccagtgctggagcttccatcgcctaggtcgcggggcccgcacgggggcaaggcaagctcgggtgctggcccggctcctgatcccccggcgccgctggggccgccgcgggggccccattcttcgcccagcgccaggcagagctccttaagcgctaggttctcccgcagcagctcctcctggcggccctccagctcggccagcttctgccaacagccgcccaggtcctcgcgcacggcccgggatgcttgggtcccgaagagctgccactggcgtgcggcgcgccgcccgcgctggcgctccgagtccaggaagcagcagaggtcgcgcagctcacggttctctgcctgcagacgccggttgagctgcttgagctcgcggatctcgcccaggtggccctgcagctgccgattcacctcctgcatgaggcggccgcgctgcaccagtgccgccaggcgcgccgcctcctcccgccgcaggcgccgcactagctcttccttgcctagcgccgccatctcctcgtccgtcagctcctccaggccgcctgcctcggcctccatggctggtcaggcctctggagcatcgcccgcccgccgccgcggcccaggagccccacgtcgggcccggcgccactcaggctcgggctccggctccgcacgcggcaggcag

SEQ ID NO: 20951 - protein, 205 aa, Homo sapiens
MFRDFGEPGPSSGNGGGYGGPAQPPAAAQAAQQISPEEEERRRVRRERNKLAAAKCRNRRKELTDFLQAETDKLEDEKSGLQREIEELQKQKERLELVLEAHRPICKIPEGAKEGDTGSTSGTSSPPAPCRPVPCISLSPGPVLEPEALHTPTLMTTPSLTPFTPSLVFTYPSTPEPCASAHRKSSSSSGDPSSDPLGSPTLLAL

SEQ ID NO: 20952 - DNA, 3214 bp, Homo sapiens
acgggccaaggcggcgcgtctcgggggtggagcctggaggtgaccgcgccgctgcaacgcccccaccccccgcggtcgcagtggttcagcccgagaacttttcattcataaaaagaaaagactccgcacggcgcgggtgagtcagaacccagcagccgtgtaccccgcagagccgccagccccgggcatgttccgagacttcggggaacccggcccgagctccgggaacggcggcgggtacggcggccccgcgcagcccccggccgcagcgcaggcagcccagcagaagttccacctggtgccaagcatcaacaccatgagtggcagtcaggagctgcagtggatggtacagcctcatttcctggggcccagcagttaccccaggcctctgacctaccctcagtacagccccccacaaccccggccaggagtcatccgggccctggggccgcctccaggggtacgtcgaaggccttgtgaacagatcagcccggaggaagaggagcgccgccgagtaaggcgcgagcggaacaagctggctgcggccaagtgcaggaaccggaggaaggaactgaccgacttcctgcaggcggagactgacaaactggaagatgagaaatctgggctgcagcgagagattgaggagctgcagaagcagaaggagcgcctagagctggtgctggaagcccaccgacccatctgcaaaatcccggaaggagccaaggagggggacacaggcagtaccagtggcaccagcagcccaccagccccctgccgccctgtaccttgtatctccctttccccagggcctgtgcttgaacctgaggcactgcacacccccacactcatgaccacaccctccctaactcctttcacccccagcctggtcttcacctaccccagcactcctgagccttgtgcctcagctcatcgcaagagtagcagcagcagcggagacccatcctctgacccccttggctctccaaccctcctcgctttgtgaggcgcctgagccctactccctgcagatgccaccctagccaatgtctcctccccttcccccaccggtccagctggcctggacagtatcccacatccaactccagcaacttcttctccatccctctaatgagactgaccatattgtgcttcacagtagagccagcttggggccaccaaagctgcccactgtttctcttgagctggcctctctagcacaatttgcactaaatcagagacaaaatatttcccatttgtgccagaggaatcctggcagcccagagactttgtagatccttagaggtcctctggagccctaaccccttccagatcactgccacactctccatcaccctcttcctgtgatccacccaaccctatctcctgacagaaggtgccactttacccacctagaacactaactcaccagccccactgccagcagcagcaggtgattggaccaggccattctgccgccccctcctgaaccgcacagctcaggaggcgcccttggcttctgtgatgagctgatctgcggatctcagctttgagaagccttcagctccagggaatccaagcctccacagcgagggcagctgctatttattttcctaaagagagtatttttatacaaacctaccaaaatggaataaaaggcttgaagctgtggcctgagtgcctcactggacccagaggccaatgggagagtatttggagccctaggtcccagccttagctctacagactcactgcatgaccttggacaaattctttgatatttttggactttgtcttatctgacaagtggggctacatccgctcggcctcatctccgggactgaggggagacagtcctctggggtaaaagcgaagaggcttaccgcccctctccccgtgggggcccacagtgctgctgcgtgtgccacggaggggcgctgttatgcccccttccagcctcagaggaggcggccgagtggttctaggcccccagcacctgcttcctgccccattgtcttggacaggaaggagccgggaagggagctggagccacttcaggggctggattaaggccggtcccggcgcccgatgggggaagtctggtttaccactgccccgcatcccaccccaggctcgaagtaatgggggaatcattagttctgcagtccttctggatgggaattgtaccctgtatcagcaccccaccctcgccccaaccccggcgagtaccaaacagacgctgcccaggccgtgggctccgcttccgtccgggtttattacccccaatccaacccccagcaagtccctccgctccagccttcagtccccctgctgccctgccagcaagagcgaggggcccttcttggtgtcaggatttcttagtccatgccagcggcccctcctgcgcagccaggacggcgtccaggtcccgaggtccacagcggtcccggggctcggggagcaatccgggcgggcgtcggcgtggaggaagcagtgccttcaatcatcgggggaacaggccaggggcaactgatccggactgcccacgctgccagtgctggagcttccatcgcctaggtcgcggggcccgcacgggggcaaggcaagctcgggtgctggcccggctcctgatcccccggcgccgctggggccgccgcgggggccccattcttcgcccagcgccaggcagagctccttaagcgctaggttctcccgcagcagctcctcctggcggccctccagctcggccagcttctgccaacagccgcccaggtcctcgcgcacggcccgggatgcttgggtcccgaagagctgccactggcgtgcggcgcgccgcccgcgctggcgctccgagtccaggaagcagcagaggtcgcgcagctcacggttctctgcctgcagacgccggttgagctgcttgagctcgcggatctcgcccaggtggccctgcagctgccgattcacctcctgcatgaggcggccgcgctgcaccagtgccgccaggcgcgccgcctcctcccgccgcaggcgccgcactagctcttccttgcctagcgccgccatctcctcgtccgtcagctcctccaggccgcctgcctcggcctccatggctggtcaggcctctggagcatcgcccgcccgccgccgcggcccaggagccccacgtcgggcccggcgccactcaggctcgggctccggctccgcacgcggcaggcag

SEQ ID NO: 20953 - protein, 271 aa, Homo sapiens; identical to SEQ ID NO: 2667

SEQ ID NO: 20954 - DNA, 1471 bp, Homo sapiens
ataaaaagaaaagactccgcacggcgcgggtgagtcagaacccagcagccgtgtaccccgcagagccgccagccccgggcatgttccgagacttcggggaacccggcccgagctccgggaacggcggcgggtacggcggccccgcgcagcccccggccgcagcgcaggcagcccagcagaagttccacctggtgccaagcatcaacaccatgagtggcagtcaggagctgcagtggatggtacagcctcatttcctggggcccagcagttaccccaggcctctgacctaccctcagtacagccccccacaaccccggccaggagtcatccgggccctggggccgcctccaggggtacgtcgaaggccttgtgaacaggagactgacaaactggaagatgagaaatctgggctgcagcgagagattgaggagctgcagaagcagaaggagcgcctagagctggtgctggaagcccaccgacccatctgcaaaatcccggaaggagccaaggagggggacacaggcagtaccagtggcaccagcagcccaccagccccctgccgccctgtaccttgtatctccctttccccagggcctgtgcttgaacctgaggcactgcacacccccacactcatgaccacaccctccctaactcctttcacccccagcctggtcttcacctaccccagcactcctgagccttgtgcctcagctcatcgcaagagtagcagcagcagcggagacccatcctctgacccccttggctctccaaccctcctcgctttgtgaggcgcctgagccctactccctgcagatgccaccctagccaatgtctcctccccttcccccaccggtccagctggcctggacagtatcccacatccaactccagcaacttcttctccatccctctaatgagactgaccatattgtgcttcacagtagagccagcttggggccaccaaagctgcccactgtttctcttgagctggcctctctagcacaatttgcactaaatcagagacaaaatatttcccatttgtgccagaggaatcctggcagcccagagactttgtagatccttagaggtcctctggagccctaaccccttccagatcactgccacactctccatcaccctcttcctgtgatccacccaaccctatctcctgacagaaggtgccactttacccacctagaacactaactcaccagccccactgccagcagcagcaggtgattggaccaggccattctgccgccccctcctgaaccgcacagctcaggaggcgcccttggcttctgtgatgagctgatctgcggatctcagctttgagaagccttcagctccagggaatccaagcctccacagcgagggcagctgctatttattttcctaaagagagtatttttatacaaacctaccaaaatggaataaaaggcttgaagctgtggcctgagtgcctcactgg

SEQ ID NO: 20955 - protein, 235 aa, Homo sapiens; identical to SEQ ID NO: 20947

SEQ ID NO: 20956 - DNA, 1273 bp, Homo sapiens
ataaaaagaaaagactccgcacggcgcgggtgagtcagaacccagcagccgtgtaccccgcagagccgccagccccgggcatgttccgagacttcggggaacccggcccgagctccgggaacggcggcgggtacggcggccccgcgcagcccccggccgcagcgcaggcagcccagcaggagactgacaaactggaagatgagaaatctgggctgcagcgagagattgaggagctgcagaagcagaaggagcgcctagagctggtgctggaagcccaccgacccatctgcaaaatcccggaaggagccaaggagggggacacaggcagtaccagtggcaccagcagcccaccagccccctgccgccctgtaccttgtatctccctttccccagggcctgtgcttgaacctgaggcactgcacacccccacactcatgaccacaccctccctaactcctttcacccccagcctggtcttcacctaccccagcactcctgagccttgtgcctcagctcatcgcaagagtagcagcagcagcggagacccatcctctgacccccttggctctccaaccctcctcgctttgtgaggcgcctgagccctactccctgcagatgccaccctagccaatgtctcctccccttcccccaccggtccagctggcctggacagtatcccacatccaactccagcaacttcttctccatccctctaatgagactgaccatattgtgcttcacagtagagccagcttggggccaccaaagctgcccactgtttctcttgagctggcctctctagcacaatttgcactaaatcagagacaaaatatttcccatttgtgccagaggaatcctggcagcccagagactttgtagatccttagaggtcctctggagccctaaccccttccagatcactgccacactctccatcaccctcttcctgtgatccacccaaccctatctcctgacagaaggtgccactttacccacctagaacactaactcaccagccccactgccagcagcagcaggtgattggaccaggccattctgccgccccctcctgaaccgcacagctcaggaggcgcccttggcttctgtgatgagctgatctgcggatctcagctttgagaagccttcagctccagggaatccaagcctccacagcgagggcagctgctatttattttcctaaagagagtatttttatacaaacctaccaaaatggaataaaaggcttgaagctgtggcctgagtgcctcactgg

SEQ ID NO: 20957 - protein, 169 aa, Homo sapiens; identical to SEQ ID NO: 20949

SEQ ID NO: 20958 - DNA, 1381 bp, Homo sapiens
ataaaaagaaaagactccgcacggcgcgggtgagtcagaacccagcagccgtgtaccccgcagagccgccagccccgggcatgttccgagacttcggggaacccggcccgagctccgggaacggcggcgggtacggcggccccgcgcagcccccggccgcagcgcaggcagcccagcagatcagcccggaggaagaggagcgccgccgagtaaggcgcgagcggaacaagctggctgcggccaagtgcaggaaccggaggaaggaactgaccgacttcctgcaggcggagactgacaaactggaagatgagaaatctgggctgcagcgagagattgaggagctgcagaagcagaaggagcgcctagagctggtgctggaagcccaccgacccatctgcaaaatcccggaaggagccaaggagggggacacaggcagtaccagtggcaccagcagcccaccagccccctgccgccctgtaccttgtatctccctttccccagggcctgtgcttgaacctgaggcactgcacacccccacactcatgaccacaccctccctaactcctttcacccccagcctggtcttcacctaccccagcactcctgagccttgtgcctcagctcatcgcaagagtagcagcagcagcggagacccatcctctgacccccttggctctccaaccctcctcgctttgtgaggcgcctgagccctactccctgcagatgccaccctagccaatgtctcctccccttcccccaccggtccagctggcctggacagtatcccacatccaactccagcaacttcttctccatccctctaatgagactgaccatattgtgcttcacagtagagccagcttggggccaccaaagctgcccactgtttctcttgagctggcctctctagcacaatttgcactaaatcagagacaaaatatttcccatttgtgccagaggaatcctggcagcccagagactttgtagatccttagaggtcctctggagccctaaccccttccagatcactgccacactctccatcaccctcttcctgtgatccacccaaccctatctcctgacagaaggtgccactttacccacctagaacactaactcaccagccccactgccagcagcagcaggtgattggaccaggccattctgccgccccctcctgaaccgcacagctcaggaggcgcccttggcttctgtgatgagctgatctgcggatctcagctttgagaagccttcagctccagggaatccaagcctccacagcgagggcagctgctatttattttcctaaagagagtatttttatacaaacctaccaaaatggaataaaaggcttgaagctgtggcctgagtgcctcactgg

SEQ ID NO: 20959 - protein, 205 aa, Homo sapiens; identical to SEQ ID NO: 20951

SEQ ID NO: 20960 - DNA, 1686 bp, Homo sapiens
acgggccaaggcggcgcgtctcgggggtggagcctggaggtgaccgcgccgctgcaacgcccccaccccccgcggtcgcagtggttcagcccgagaacttttcattcataaaaagaaaagactccgcacggcgcgggtgagtcagaacccagcagccgtgtaccccgcagagccgccagccccgggcatgttccgagacttcggggaacccggcccgagctccgggaacggcggcgggtacggcggccccgcgcagcccccggccgcagcgcaggcagcccagcagaagttccacctggtgccaagcatcaacaccatgagtggcagtcaggagctgcagtggatggtacagcctcatttcctggggcccagcagttaccccaggcctctgacctaccctcagtacagccccccacaaccccggccaggagtcatccgggccctggggccgcctccaggggtacgtcgaaggccttgtgaacagatcagcccggaggaagaggagcgccgccgagtaaggcgcgagcggaacaagctggctgcggccaagtgcaggaaccggaggaaggaactgaccgacttcctgcaggcggagactgacaaactggaagatgagaaatctgggctgcagcgagagattgaggagctgcagaagcagaaggagcgcctagagctggtgctggaagcccaccgacccatctgcaaaatcccggaaggagccaaggagggggacacaggcagtaccagtggcaccagcagcccaccagccccctgccgccctgtaccttgtatctccctttccccagggcctgtgcttgaacctgaggcactgcacacccccacactcatgaccacaccctccctaactcctttcacccccagcctggtcttcacctaccccagcactcctgagccttgtgcctcagctcatcgcaagagtagcagcagcagcggagacccatcctctgacccccttggctctccaaccctcctcgctttgtgaggcgcctgagccctactccctgcagatgccaccctagccaatgtctcctccccttcccccaccggtccagctggcctggacagtatcccacatccaactccagcaacttcttctccatccctctaatgagactgaccatattgtgcttcacagtagagccagcttggggccaccaaagctgcccactgtttctcttgagctggcctctctagcacaatttgcactaaatcagagacaaaatatttcccatttgtgccagaggaatcctggcagcccagagactttgtagatccttagaggtcctctggagccctaaccccttccagatcactgccacactctccatcaccctcttcctgtgatccacccaaccctatctcctgacagaaggtgccactttacccacctagaacactaactcaccagccccactgccagcagcagcaggtgattggaccaggccattctgccgccccctcctgaaccgcacagctcaggaggcgcccttggcttctgtgatgagctgatctgcggatctcagctttgagaagccttcagctccagggaatccaagcctccacagcgagggcagctgctatttattttcctaaagagagtatttttatacaaacctaccaaaatggaataaaaggcttgaagctgtggcctgagtgcctcactgg

SEQ ID NO: 20961 - protein, 271 aa, Homo sapiens; identical to SEQ ID NO: 2667

SEQ ID NO: 20962 - DNA, 1605 bp, Homo sapiens
cggccgctgaggcccgcggctccgccctgtggctgcgcctgtctataaagttgttgttgaggtggcgcggcgctaagatggcggcggcggcggcggcggccgtggcgggggtggggcgcggtggcggtggcgcggagccacggcaggagcggagccgggcccggggctgggccggcgtcgaacgcagcgaaggccggaggatggaaccaggtgaggagctggaagaggagggctctccaggtggccgtgaggatggcttcaccgccgagcacctggctgcagaggccatggcagctgacatggacccctggctagtgtttgatgcccgcacaacgcctgccactgagctggatgcctggctggccaagtacccaccatcccaagttacccgctatggggaccccggttcacccaactcagagcctgtgggctggattgcagtgtatgggcagggctacagccccaactccggggacgtgcagggcctgcaggcagcctgggaagctctgcagaccagtgggcggcccatcacaccgggtaccctgcgccagctcgccatcacccaccacgtgctctcgggcaagtggcttatgcatctggcaccgggcttcaagctggaccacgcctgggctggcattgcccgggccgtggttgaaggccagcttcaggtggccaaggtgagcccacgtgccaaggagggtgggcgccaggtcatctgtgtttacacggacgacttcacggaccgcttgggtgtactggaggcggattcagccatccgtgcagcgggcattaagtgcctgctcacctacaagcctgatgtctacacctacctgggcatctaccgggccaatcgctggcacctctgccccactctctatgagagccgtttccagcttgggggtagtgcccgtggctcccgagtgcttgaccgtgccaacaacgtggaactgacctaggggggccaaattggggagactgcccactcccccctccatgctggggttggatcctcctgtcttcctccttgtcctatgaaggccacaccccccagctctggggactcctaggtcacttgggaactacctgcatcttcagtccccttgaacttctgccctctgttcagggctgacacaagccccacaggctggggggctccggttccctgagggatgagccttcagcctccctttgtaatgctgctcctctccactgcccagcaccatgagttgggtgcagacacctagaaggagagacttcttggaacgctcatcccccgctatacctccccttcctcctgcatctccccttctttccttccccctcaggagagagaaaacttagtgcttccagcccttcttggagccttcatggtccaggggtaggggccccactggcctgagcatgccattttgaggggagggtagttgtgcctacttatcccctggcagaggggatgccaggaccatggacatgaggcttgcccatccctgccaacttacacagcctgtaccactgtccccccttccttggctactttgacatgtgcctgctcctggcatttcaataaaacccggcttgggtctgtgtcttgagtgttttttaaaa

SEQ ID NO: 20963 - protein, 292 aa, Homo sapiens
MAAAAAAAVAGVGRGGGGAEPRQERSRARGWAGVERSEGRRMEPGEELEEEGSPGGREDGFTAEHLAAEAMAADMDPWLVFDARTTPATELDAWLAKYPPSQVTRYGDPGSPNSEPVGWIAVYGQGYSPNSGDVQGLQAAWEALQTSGRPITPGTLRQLAITHHVLSGKWLMHLAPGFKLDHAWAGIARAVVEGQLQVAKVSPRAKEGGRQVICVYTDDFTDRLGVLEADSAIRAAGIKCLLTYKPDVYTYLGIYRANRWHLCPTLYESRFQLGGSARGSRVLDRANNVELT

SEQ ID NO: 20964 - DNA, 841 bp, Homo sapiens
ctcagcctcagtttccttttctgtaagtcaaggagaatagtaataactgcagcaacccttctggagcgctgactcctcaggcatctaattttcatagcagatctacgggacaggaacagttgttatcccattgtaaagatgaggcaactgaggcgcatcgacagtaactcttactcaaggccacagtttaatccagtgcctggcatctgtagttattgtctcagaccctgccctgactcggttccctcacagcaggatggaaccaggtgaggagctggaagaggagggctctccaggtggccgtgaggatggcttcaccgccgagcacctggctgcagaggccatggcagctgacatggacccctggctagtgtttgatgcccgcacaacgcctgccactgagctggatgcctggctggccaagtacccaccatcccaagttacccgctatggggaccccggttcacccaactcagagcctgtgggctggattgcagtgtatgggcagggctacagccccaactccggggacgtgcagggcctgcaggcagcctgggaagctctgcagaccagtgggcggcccatcacaccgggtaccctgcgccagctcgccatcacccaccacgtgctctcgggcaagtggcttatgcatctggcaccgggcttcaagctggaccacgcctgggctggcattgcccgggccgtggttgaaggccagcttcaggtggccaaggtgagcccaccctgtaccactgtccccccttccttggctactttgacatgtgcctgctcctggcatttcaataaaacccggcttgggtctgtgtcttgagtgtttttt

SEQ ID NO: 20965 - protein, 191 aa, Homo sapiens
MEPGEELEEEGSPGGREDGFTAEHLAAEAMAADMDPWLVFDARTTPATELDAWLAKYPPSQVTRYGDPGSPNSEPVGWIAVYGQGYSPNSGDVQGLQAAWEALQTSGRPITPGTLRQLAITHHVLSGKWLMHLAPGFKLDHAWAGIARAVVEGQLQVAKVSPPCTTVPPSLATLTCACSWHFNKTRLGSVS

SEQ ID NO: 20966 - DNA, 1004 bp, Homo sapiens
gggcgggagcggcggtccagactggggagggacgcgcaccggccaggaggcttcaagaggagggcactagggccctgcgagcggcgtcttaaccggcggcgctaggactccgcgggaaacggcgggggcggagcgggcggcaccaggacccaggggaaccgcgacgggcgggcggcgagcaggcccgggagccgggaggctgcgggcggcggcgctggacccgacgcggcgagagaggccccgagatgccgagcaagaagaagaagtacaacgcgcggttcccgccggcgcggatcaagaagatcatgcagacggacgaagagattgggaaggtggcggcggcggtgcctgtcatcatctcccgggcgctcgagctcttcctagagtcgctgttgaagaaggcctgccaggtgacccagtcgcggaacgcgaagaccatgaccacatcccacctgaagcagtgcatcgagctggagcagcagtttgacttcttgaaggacctggtggcatctgttcccgacatgcagggggacggggaagacaaccacatggatggggacaagggcgcccgcaggggccggaagccaggcagcggcggccggaagaacggtgggatgggaacgaaaagcaaggacaagaagctgtccgggacagactcggagcaggaggatgaatctgaggacacagatactgatggggaagaggagacatcacaacccccaccccaggccagccacccctctgcccactttcagagccccccgacacccttcctgcccttcgcctctactctgcctttgcccccagcgcccccgggcccctcagcacctgatgaagaggacgaagaagattacgactcctagcgccttctgccccccagaccatagccccttttagttggttttagttgctctggggggaggagagaaggtagagctgttcttaaatttattaaaaaaaaaaataaaagggaatctcagtgtctgttccaggctctgcgcagg

SEQ ID NO: 20967 - protein, 205 aa, Homo sapiens; identical to SEQ ID NO: 2671

SEQ ID NO: 20968 - DNA, 825 bp, Homo sapiens
gagcggcggtccagactggggagggacgcgcaccggccaggaggcttcaagaggagggcactagggccctgcgagcggcgtcttaaccggcggcgctaggactccgcgggaaacggcgggggcggagcgggcggcaccaggacccaggggaaccgcgacgggcgggcggcgagcaggcccgggagccgggaggctgcgggcggcggcgctggacccgacgcggcgagagaggccccgagatgccgagcaagaagaagaagtacaacgcgcggttcccgccggcgcggatcaagaagatcatgcagacggacgaagagattgggaaggtggcggcggcggtgcctgtcatcatctcccgggcgctcgagctcttcctagagtcgctgttgaagaaggcctgccaggtgacccagtcgcggaacgcgaagaccatgaccacatcccacctgaagcagtgcatcgagctggagcagcagtttgacttcttgaaggacctggtggcatctgttcccgacatgcagggggacggggaagacaaccacatggatggggacaagggcgcccgcaggtggggccagggcctggcatacagtggggaaggccaaggccacagggcttgggggtggccaaggagtagggagcactccgggcagatggactgtaccttcccaaaggggccggaagccaggcagcggcggccggaagaacggtgggatgggaacgaaaagcaaggacaagaagctgtccgggacagactcggagcaggaggtgagtgaggccccagcccttcgccctgcccttggtgatgggacaggcagcctcgcc

SEQ ID NO: 20969 - protein, 178 aa, Homo sapiens
MPSKKKKYNARFPPARIKKIMQTDEEIGKVAAAVPVIISRALELFLESLLKKACQVTQSRNAKTMTTSHLKQCIELEQQFDFLKDLVASVPDMQGDGEDNHMDGDKGARRWGQGLAYSGEGQGHRAWGWPRSREHSGQMDCTFPKGPEARQRRPEERWDGNEKQGQEAVRDRLGAGGE

SEQ ID NO: 20970 - DNA, 1102 bp, Homo sapiens
gagcggcggtccagactggggagggacgcgcaccggccaggaggcttcaagaggagggcactagggccctgcgagcggcgtcttaaccggcggcgctaggactccgcgggaaacggcgggggcggagcgggcggcaccaggacccaggggaaccgcgacgggcgggcggcgagcaggcccgggagccgggaggctgcgggcggcggcgctggacccgacgcggcgagagaggccccgagatgccgagcaagaagaagaagtacaacgcgcggttcccgccggcgcggatcaagaagatcatgcagacggacgaagagattgggaaggtggcggcggcggtgcctgtcatcatctcccgggcgctcgagctcttcctagagtcgctgttgaagaaggcctgccaggtgacccagtcgcggaacgcgaagaccatgaccacatcccacctgaagcagtgcatcgagctggagcagcagtttgacttcttgaaggacctggtggcatctgttcccgacatgcagggggacggggaagacaaccacatggatggggacaagggcgcccgcaggtggggccagggcctggcatacagtggggaaggccaaggccacagggcttgggggtggccaaggagtagggagcactccgggcagatggactgtaccttcccaaaggggccggaagccaggcagcggcggccggaagaacggtgggatgggaacgaaaagcaaggacaagaagctgtccgggacagactcggagcaggaggatgaatctgaggacacagatactgatggggaagaggagacatcacaacccccaccccaggccagccacccctctgcccactttcagagccccccgacacccttcctgcccttcgcctctactctgcctttgcccccagcgcccccgggcccctcagcacctgatgaagaggacgaagaagattacgactcctagcgccttctgccccccagaccatagccccttttagttggttttagttgctctggggggaggagagaaggtagagctgttcttaaatttattaaaaaaaaaaataaaagggaatctcagtgtctgttccaggctctgcgca

SEQ ID NO: 20971 - protein, 177 aa, Homo sapiens
MPSKKKKYNARFPPARIKKIMQTDEEIGKVAAAVPVIISRALELFLESLLKKACQVTQSRNAKTMTTSHLKQCIELEQQFDFLKDLVASVPDMQGDGEDNHMDGDKGARRWGQGLAYSGEGQGHRAWGWPRSREHSGQMDCTFPKGPEARQRRPEERWDGNEKQGQEAVRDRLGAGG

SEQ ID NO: 20972 - DNA, 705 bp, Homo sapiens
ggggaaccgcgacgggcgggcggcgagcaggcccgggagccgggaggctgcgggcggcggcgctggacccgacgcggcgagagaggccccgagatgccgagcaagaagaagaagtacaacgcgcggttcccgccgtcgcggaacgcgaagaccatgaccacatcccacctgaagcagtgcatcgagctggagcagcagtttgacttcttgaaggacctggtggcatctgttcccgacatgcagggggacggggaagacaaccacatggatggggacaagggcgcccgcaggggccggaagccaggcagcggcggccggaagaacggtgggatgggaacgaaaagcaaggacaagaagctgtccgggacagactcggagcaggaggatgaatctgaggacacagatactgatggggaagaggagacatcacaacccccaccccaggccagccacccctctgcccactttcagagccccccgacacccttcctgcccttcgcctctactctgcctttgcccccagcgcccccgggcccctcagcacctgatgaagaggacgaagaagattacgactcctagcgccttctgccccccagaccatagccccttttagttggttttagttgctctggggggaggagagaaggtagagctgttcttaaatttattaaaaaaaaaaataaaagggaatctcagtgtctgttc

SEQ ID NO: 20973 - protein, 161 aa, Homo sapiens
MPSKKKKYNARFPPSRNAKTMTTSHLKQCIELEQQFDFLKDLVASVPDMQGDGEDNHMDGDKGARRGRKPGSGGRKNGGMGTKSKDKKLSGTDSEQEDESEDTDTDGEEETSQPPPQASHPSAHFQSPPTPFLPFASTLPLPPAPPGPSAPDEEDEEDYDS

SEQ ID NO: 20974 - DNA, 754 bp, Homo sapiens
tggcgacggggtctgaactctgctcccccacccgcaggcgcggatcaagaagatcatgcagacggacgaagagattgggaaggtggcggcggcggtgcctgtcatcatctcccgggcgctcgagctcttcctagagtcgctgttgaagaaggcctgccaggtgacccagtcgcggaacgcgaagaccatgaccacatcccacctgaagcagtgcatcgagctggagcagcagtttgacttcttgaaggacctggtggcatctgttcccgacatgcagggggacggggaagacaaccacatggatggggacaagggcgcccgcaggggccggaagccaggcagcggcggccggaagaacggtgggatgggaacgaaaagcaaggacaagaagctgtccgggacagactcggagcaggaggatgaatctgaggacacagatactgatggggaagaggagacatcacaacccccaccccaggccagccacccctctgcccactttcagagccccccgacacccttcctgcccttcgcctctactctgcctttgcccccagcgcccccgggcccctcagcacctgatgaagaggacgaagaagattacgactcctagcgccttctgccccccagaccatagccccttttagttggttttagttgctctggggggaggagagaaggtagagctgttcttaaatttattaaaaaaaaaaataaaagggaatctcagtgtctgttccaggctctgcgcagg

SEQ ID NO: 20975 - protein, 185 aa, Homo sapiens
MQTDEEIGKVAAAVPVIISRALELFLESLLKKACQVTQSRNAKTMTTSHLKQCIELEQQFDFLKDLVASVPDMQGDGEDNHMDGDKGARRGRKPGSGGRKNGGMGTKSKDKKLSGTDSEQEDESEDTDTDGEEETSQPPPQASHPSAHFQSPPTPFLPFASTLPLPPAPPGPSAPDEEDEEDYDS

SEQ ID NO: 20976 - DNA, 764 bp, Homo sapiens
gggagaacagtctcctgccttcaagccctcctcagttattctccttccaccccacaaatctgccacaatcaacaagaccaaggggccagggagaacaagagggtatctgtgtcctcagattcatcctgtgagcaccgcagaggtcagagttgacaagaaaagacacgaacccatcactgggagtggcagggacagcagtagaccctcatagccccaatttacaaataaaccagtgagcaaacaggttgcagaaaaggatgagagctggcctcctgccagttcagcctggggcgaggctgcctgtcccatcaccaagggcagggcgaagggctggggcctcactcacctcctgctccgagtctgtcccggacagcttcttgtccttgcttttcgttcccatcccaccgttcttccggccgccgctgcctggcttccggcccctttgggaaggtacagtccatctgcccggagtgctccctactccttggccacccccaagccctgtggccttggccttccccactgtatgccaggccctggccccacctgcgggcgcccttgtccccatccatgtggttgtcttccccgtccccctgcatgtcgggaacagatgccaccaggtccttcaagaagtcaaactgctgctccagctcgatgcactgcttcctggaagagcgactctaggaagagctcgagcgcccgggctgaggagcgtcaaggagaactccggggcaggagagggcgacccgctgcctccctccccc

SEQ ID NO: 20977 - protein, 168 aa, Homo sapiens
MRAGLLPVQPGARLPVPSPRAGRRAGASLTSCSESVPDSFLSLLFVPIPPFFRPPLPGFRPLWEGTVHLPGVLPTPWPPPSPVALAFPTVCQALAPPAGALVPIHVVVFPVPLHVGNRCHQVLQEVKLLLQLDALLPGRATLGRARAPGLRSVKENSGAGEGDPLPPS

SEQ ID NO: 20978 - DNA, 215 bp, Homo sapiens
cccgggcgctcgagctcttcctagagtcgctgttgaagaaggcctgccaggtgacccagtcgcggaacgcgaagaccatgaccacatcccacctgaagcagtgcatcgagctggagcagcagtttgacttcttgaaggacctggtggcatctgttcccgacatgcagggggacggggaagacaaccacatggatggggacaagggcgcccgcagg

SEQ ID NO: 20979 - protein, 45 aa, Homo sapiens
MTTSHLKQCIELEQQFDFLKDLVASVPDMQGDGEDNHMDGDKGAR

SEQ ID NO: 20980 - DNA, 841 bp, Homo sapiens
ggtgggcggcagccgggacaccagcaaggccacagactggcagaggagaggctgggcttccaggcagagggagccacctgagtaaagcagggcaggcccgggagcggagatcggcccgggctccagcctgacatctggggccccttgctgccacccactgcgggtttgggtgtctgggcccctcttgagtgccagcccctcctcacctcttccaggaagcagtgcatcgagctggagcagcagtttgacttcttgaaggacctggtggcatctgttcccgacatgcagggggacggggaagacaaccacatggatggggacaagggcgcccgcaggtggggccagggcctggcatacagtggggaaggccaaggccacagggcttgggggtggccaaggagtagggagcactccgggcagatggactgtaccttcccaaaggggccggaagccaggcagcggcggccggaagaacggtgggatgggaacgaaaagcaaggacaagaagctgtccgggacagactcggagcaggaggatgaatctgaggacacagatactgatggggaagaggagacatcacaacccccaccccaggccagccacccctctgcccactttcagagccccccgacacccttcctgcccttcgcctctactctgcctttgcccccagcgcccccgggcccctcagcacctgatgaagaggacgaagaagattacgactcctagcgccttctgccccccagaccatagccccttttagttggttttagttgctctggggggaggagagaaggtagagctgttcttaaatttattaaaaaaaaaaataaaagggaa

SEQ ID NO: 20981 - protein, 138 aa, Homo sapiens
MGTRAPAGGARAWHTVGKAKATGLGGGQGVGSTPGRWTVPSQRGRKPGSGGRKNGGMGTKSKDKKLSGTDSEQEDESEDTDTDGEEETSQPPPQASHPSAHFQSPPTPFLPFASTLPLPPAPPGPSAPDEEDEEDYDS

SEQ ID NO: 20982 - DNA, 1726 bp, Homo sapiens
agttctacggtgcggatgggggatggggcaggatggggcaggacaccgatatgctaaatacctaccaacagttggttaggaccccgtcggtgtgaccagggcaggacgtgcggctccaggctccaggaaccagaacggggctgctcaagctgctgtcgaccgtctctcaggacaagcagggctgcctggggagtggtgatggtgtgccaaatcaagacctgcagcagaggtctcagagctcaaggcagacagcaaagaaggaccgcaagcccaggggccagagcaagaaaggacagggctctgaagagtctgaagatcacttcccgcttcttcctcggaaaccctccttccccttccagtgggcctgggagagcatcgccacagatgtccgggctgtgcttcagccaagctccccaacccctggccaccaagccctgcccatgccctcctcgttctcccagcgtcagtccaggcgcaagtccacggccaacctcccagaggcccatggctgctgctggaagacagaggcgcaaaacctgaaggcgagacagcagctgggagcctggggcggtgtctccatccctactggcaaaggggagctaggatcagagccccccagtggtctccagctgcctgggaggaggccaggatcaggatcggcgtccgacaagcaggtccagctgcaaagcctgggtgctgaggaggccgagaggggtctgagttctggggtgctgccccagcgccccaggagggggtcgatctcagaggaggagcaattttcagaggccacagaggaggctgaggagggagagcacaggactccctgcagaaggagggctggttgtcagagaaaggggcagatttctggagaggaagcctccgatgagggagaagtgcagggccagagccaggggagcagccccagcttcaacaacctccgaaggcgacaatggaggaagacaagggccaaggagctgcaggggccatgggacctggagaagctgcacaggcagctacagagagacctggactgtggcccccaaaagctgccctggaagactttgagggctgccttccaggcctccaagcggaatggaaaggcctatgcctcgggatacgatgaaactttcgtgtctgccaacctccctaatcgcaccttccacaaacgacaggaagccaccaggagcctgctgcaggcctgggagcggcagcggcaggaggagcggcagcaggccgagctgcggcgggcccggacacagcatgtacagcggcaggtggcccactgcctggcagcctacgcacccagagggagccggggccctggggcggcccagcgcaagctggaggagctgaggcgccaggagcgacagcgctttgctgagtaccaggcggagctgcaaggcatccagcacagggtgcaggcccggcccttcctgttccagcaggctatgcaggccaatgcccggctcaccgtcactcggcgcttctcccaggtgctgtcagcactggggctggatgaggagcagctgctgtctgaggcaggaaaggtggacagagagggcacccccaggaaacccaggagccacaggtcaatgggggtgagaatggagcactctcctcagaggcccccaaggacagaacccaccggcagccagcctgacaggcactacaaccccagcctggacccggagtgcagtccctgagataaaattaaaggctttatggc

SEQ ID NO: 20983 - protein, 420 aa, Homo sapiens
MPSSFSQRQSRRKSTANLPEAHGCCWKTEAQNLKARQQLGAWGGVSIPTGKGELGSEPPSGLQLPGRRPGSGSASDKQVQLQSLGAEEAERGLSSGVLPQRPRRGSISEEEQFSEATEEAEEGEHRTPCRRRAGCQRKGQISGEEASDEGEVQGQSQGSSPSFNNLRRRQWRKTRAKELQGPWDLEKLHRQLQRDLDCGPQKLPWKTLRAAFQASKRNGKAYASGYDETFVSANLPNRTFHKRQEATRSLLQAWERQRQEERQQAELRRARTQHVQRQVAHCLAAYAPRGSRGPGAAQRKLEELRRQERQRFAEYQAELQGIQHRVQARPFLFQQAMQANARLTVTRRFSQVLSALGLDEEQLLSEAGKVDREGTPRKPRSHRSMGVRMEHSPQRPPRTEPTGSQPDRHYNPSLDPECSP

SEQ ID NO: 20984 - DNA, 630 bp, Homo sapiens
cggatgggggatggggcaggatggggcaggacaccgatatgctaaatacctaccaacagttggttaggaccccgtcggtgtgaccagggcaggacgtgcggctccaggctccaggaaccagaacggggctgctcaagctgctgtcgaccgtctctcaggacaagcaggtgagggaggcccagtgaggacacttccagctgcctagagccagggctgcctggggagtggtgatggtgtgccaaatcaagacctgcagcagaggtctcagagctcaaggcagacagcaaagaaggaccgcaagcccaggggccagagcaagaaaggacagggctctgaagagtctgaagagtaagcagcagtgggatgggtcaggaggctgttgggggtcagggccctctgggggctggcgccgaccctgacccccaccctttccttcttcagtcacttcccgcttcttcctcggaaaccctccttccccttccagtgggcctgggagagcatcgccacagatgtccgggctgtgcttcagccaagctccccaacccctggccaccaagccctgcccatgccctcctcgttctcccagcgtcagtccaggcgcaagtccacggccaacctcccagaggccca

SEQ ID NO: 20985 - protein, 88 aa, Homo sapiens
MGQEAVGGQGPLGAGADPDPHPFLLQSLPASSSETLLPLPVGLGEHRHRCPGCASAKLPNPWPPSPAHALLVLPASVQAQVHGQPPRG

SEQ ID NO: 20986 - DNA, 2565 bp, Homo sapiens
aacacgacagcggctgccgagcgacccggaagtattcccattttgcgttgtctgggctcggcggcagccgggctcggagtggacgtgccactatggggtcgtccaagaagcatcgcggagagaaggaggcggccgggacgacggcggcggccggcaccgggggtgccaccgagcagccgccgcggcaccgggaacacaaaaaacacaagcaccggagtggcggcagtggcggtagcggtggcgaacgacggaagcggagccgggaacgtgggggcgagcgcgggagcgggcggcgcggggccgaagctgaggcccggagcagcacgcacgggcgggagcgcagccaggcagagccctccgagcggcgcgtgaagcgggagaagcgcgatgacggctacgaggccgctgccagctccaaaactagctcaggcgatgcctcctcactcagcatcgaggagactaacaaactccgggcaaagttggggctgaaacccttggaggttaatgccatcaagaaggaggcgggcaccaaggaggagcccgtgacagctgatgtcatcaaccctatggccttgcgacagcgagaggagctgcgggagaagctggcggctgccaaggagaagcgcctgctgaaccaaaagctggggaagataaagaccctaggagaggatgacccctggctggacgacactgcagcctggatcgagaggagccggcagctgcagaaggagaaggacctggcagagaagagggccaagttactggaggagatggaccaagagtttggtgtcagcactctggtggaggaggagttcgggcagaggcggcaggacctgtacagtgcccgggacctgcagggcctcaccgtggagcatgccattgattccttccgagaaggggagacaatgattcttaccctcaaggacaaaggcgtgctgcaggaggaggaggacgtgctggtgaacgtgaacctggtggataaggagcgggcagagaaaaatgtggagctgcggaagaagaagcctgactacctgccctatgccgaggacgagagcgtggacgacctggcgcagcaaaaacctcgctctatcctgtccaagtatgacgaagagcttgaaggggagcggccacattccttccgcttggagcagggcggcacggctgatggcctgcgggagcgggagctggaggagatccgggccaagctgcggctgcaggctcagtccctgagcacagtggggccccggctggcctccgaatacctcacgcctgaggagatggtgacctttaaaaagaccaagcggagggtgaagaaaatccgcaagaaggagaaggaggtagtagtgcgggcagatgacttgctgcctctcggggaccagactcaggatggggactttggttccagactgcggggacggggtcgccgccgagtgtccgaagtggaggaggagaaggagcctgtgcctcagcccctgccgtcggacgacacccgagtggagaacatggacatcagtgatgaggaggaaggtggagctccaccgccggggtccccgcaggtgctggaggaggacgaggcggagctggagctgcagaagcagctggagaagggacgccggctgcgacagttacagcagctacagcagctgcgagacagtggcgagaaggtggtggagattgtgaagaagctggagtctcgccagcggggctgggaggaggatgaggatcccgagcggaagggggccatcgtgttcaacgccacgtccgagttctgccgcaccttgggggagatccccacctacgggctggctggcaatcgcgaggagcaggaggagctcatggactttgaacgggatgaggagcgctcagccaacggtggctccgaatctgacggggaggagaacatcggctggagcacggtgaacctggacgaggagaagcagcagcaggatttctctgcttcctccaccaccatcctggacgaggaaccgatcgtgaatagggggctggcagctgccctgctcctgtgtcagaacaaagggctgctggagaccacagtgcagaaggtggcccgggtgaaggcccccaacaagtcgctgccctcagccgtgtactgcatcgaggataagatggccatcgatgacaagtacagccggagggaggaataccgaggcttcacacaggacttcaaggagaaggacggctacaaacccgacgttaagatcgaatacgtggatgagacgggccggaaactcacacccaaggaggctttccggcagctgtcgcaccgcttccatggcaagggctcaggcaagatgaagacagagcggcggatgaagaagctggacgaggaggcgctcctgaagaagatgagctccagcgacacgcccctgggcaccgtggccctgctccaggagaagcagaaggctcagaagaccccctacatcgtgctcagcggcagcggcaagagcatgaacgcgaacaccatcaccaagtgacagcgccctcccgccccggccctgcctcaaccttcatattaaataaagctccctccttattttttcctcc

SEQ ID NO: 20987 - protein, 800 aa, Homo sapiens; identical to SEQ ID NO: 2675

SEQ ID NO: 20988 - DNA, 3595 bp, Homo sapiens
aacacgacagcggctgccgagcgacccggaagtattcccattttgcgttgtctgggctcggcggcagccgggctcggagtggacgtgccactatggggtcgtccaagaagcatcgcggagagaaggaggcggccgggacgacggcggcggccggcaccgggggtgccaccgagcagccgccgcggcaccgggaacacaaaaaacacaagcaccggagtggcggcagtggcggtagcggtggcgaacgacggaagcggagccgggaacgtgggggcgagcgcgggagcgggcggcgcggggccgaagctgaggcccggagcagcacgcacgggcgggagcgcagccaggcagagccctccgagcggcgcgtgaagcgggagaagcgcgatgacggctacgaggccgctgccagctccaaaactagctcaggcgatgcctcctcactcagcatcgaggagactaacaaactccgggcaaagttggggctgaaacccttggaggttaatgccatcaagaaggaggcgggcaccaaggaggagcccgtgacagctgatgtcatcaaccctatggccttgcgacagcgagaggagctgcgggagaagctggcggctgccaaggagaagcgcctgctgaaccaaaagctggggaagataaagaccctaggagaggatgacccctggctggacgacactgcagcctggatcgagaggagccggcagctgcagaaggagaaggacctggcagagaagagggccaagttactggaggagatggaccaagagtttggtgtcagcactctggtggaggaggagttcgggcagaggcggcaggacctgtacagtgcccgggacctgcagggcctcaccgtggagcatgccattgattccttccgagaaggggagacaatgattcttaccctcaaggacaaaggcgtgctgcaggaggaggaggacgtgctggtgaacgtgaacctggtggataaggagcgggcagagaaaaatgtggagctgcggaagaagaagcctgactacctgccctatgccgaggacgagagcgtggacgacctggcgcagcaaaaacctcgctctatcctgtccaagtatgacgaagagcttgaaggggagcggccacattccttccgcttggagcagggcggcacggctgatggcctgcgggagcgggagctggaggagatccgggccaagctgcggctgcaggctcagtccctgagcacagtggggccccggctggcctccgaatacctcacgcctgaggagatggtgacctttaaaaagaccaagcggagggtgaagaaaatccgcaagaaggagaaggaggtagtagtgcgggcagatgacttgctgcctctcggggaccagactcaggatggggactttggttccagactgcggggacggggtcgccgccgagtgtccgaagtggaggaggagaaggagcctgtgcctcagcccctgccgtcggacgacacccgagtggagaacatggacatcagtgatgaggaggaaggtggagctccaccgccggggtccccgcaggtgctggaggaggacgaggcggagctggagctgcagaagcagctggagaagggacgccggctgcgacagttacagcagctacagcagctgcgagacagtggcgagaaggtggtggagattgtgaagaagctggagtctcgccagcggggctgggaggaggatgaggatcccgagcggaagggggccatcgtgttcaacgccacgtccgagttctgccgcaccttgggggagatccccacctacgggctggctggcaatcgcgaggagcaggaggagctcatggactttgaacgggatgaggagcgctcagccaacggtggctccgaatctgacggggaggagaacatcggctggagcacggtgaacctggacgaggagaagcagcagcaggatttctctgcttcctccaccaccatcctggacgaggaaccgatcgtgaatagggggctggcagctgccctgctcctgtgtcagaacaaagggctgctggagaccacagtgcagaaggtggcccgggtgaaggcccccaacaagtcgctgccctcagccgtgtactgcatcgaggataagatggccatcgatgacaagtacagccggagggaggaataccgaggcttcacacaggacttcaaggagaaggacggctacaaacccgacgttaagatcgaatacgtggatgagacgggccggaaactcacacccaaggaggctttccggcagctgtcgcaccgcttccatggcaagggctcaggcaagatgaagacagagcggcggatgaagaagctggacgaggaggcgctcctgaagaagatgagctccagcgacacgcccctgggcaccgtggccctgctccaggagaagcagaaggctcagaagaccccctacatcgtgctcagcggcagcggcaagagcatgaacgcgaacaccatcaccaagtgacagcgccctcccgccccggccctgcctcaaccttcatattaaataaagctccctccttattttttcctccctggtcgtggtacagattccagggttggatctttggttgggtgtggcacagagtctggctcctgctaggtgagacctggccatcaaatgacacaaacaactaaacgatggaagagagagcgagcccgggtcctctaaggctccttccttctcccctggctgtcggtcacacctctgcagggccggctctctgatagaaagtggaaggcggttttagaaactcatcaccctgctctctcctggcctcgggggctgcacaggtcactgtcctgtaatgtctcccggtcagggcagcccaggactgcccagcctggtgggctggggattgggctttgggtagggcacaggtgccaccttctgtcctggctgtcctgtgccaccctggtctgtgtctagaggagtgaaactcccagggttgggctgggagtatttggtgcacgcggtatggggagggctgagctcagtgcctcctgggagacttgtcccgtgtacagtgacccagaaagatgagattccttggcctgaactctgtgatagagtgtgactgagctgctgggggacatgtgagcctcaaatccatagaaagacaaacggccaccttgggtgcccaggatactggtgcctggccccacgtacacccacatacttctcagatggctcccacattttaagattttaaaaatgaaaccaaaaaataaattgaagaaaactgtaaactttaaagaataatcagctgggcgcagtggctcatgcttgtaatcacagcactttaggaggctgaggcaggaggactgtttgagcccaggagtttgagaccaacctgagtaaggtggcaaaaccccatctctaccaaaaatacaaagattagccaggcgtggtggtgagcgcctgtagtcccagctacttgggatgctgaggtgggaggatcacttgaacctgggagacacaggctgcagtgggccctgattgagccaccacactgcagcctaggtgacagtcagaccctgtctcaaaaaaaataaaaaaaattt

SEQ ID NO: 20989 - protein, 800 aa, Homo sapiens; identical to SEQ ID NO: 2675

SEQ ID NO: 20990 - DNA, 408 bp, Homo sapiens
ggcctggcattggggtcaatcaacacccgccctgttattatacaccttgtgggcacaggtggctccggccccacccagggccctgcatctcctctcatgccccgcgtccccaggctttccggcagctgtcgcaccgcttccatggcaagggctcaggcaagatgaagacagagcggcggatgaagaagctggacgaggaggcgctcctgaagaagatgagctccagcgacacgcccctgggcaccgtggccctgctccaggagaagcagaaggctcagaagaccccctacatcgtgctcagcggcagcggcaagagcatgaacgcgaacaccatcaccaagtgacagcgccctcccgccccggccctgcctcaaccttcatattaaataaagctccctccttattttt

SEQ ID NO: 20991 - protein, 60 aa, Homo sapiens
MKTERRMKKLDEEALLKKMSSSDTPLGTVALLQEKQKAQKTPYIVLSGSGKSMNANTITK

SEQ ID NO: 20992 - DNA, 1444 bp, Homo sapiens
ggcctggcattggggtcaatcaacacccgccctgttattatacaccttgtgggcacaggtggctccggccccacccagggccctgcatctcctctcatgccccgcgtccccaggctttccggcagctgtcgcaccgcttccatggcaagggctcaggcaagatgaagacagagcggcggatgaagaagctggacgaggaggcgctcctgaagaagatgagctccagcgacacgcccctgggcaccgtggccctgctccaggagaagcagaaggctcagaagaccccctacatcgtgctcagcggcagcggcaagagcatgaacgcgaacaccatcaccaagtgacagcgccctcccgccccggccctgcctcaaccttcatattaaataaagctccctccttattttttcctccctggtcgtggtacagattccagggttggatctttggttgggtgtggcacagagtctggctcctgctaggtgagacctggccatcaaatgacacaaacaactaaacgatggaagagagagcgagcccgggtcctctaaggctccttccttctcccctggctgtcggtcacacctctgcagggccggctctctgatagaaagtggaaggcggttttagaaactcatcaccctgctctctcctggcctcgggggctgcacaggtcactgtcctgtaatgtctcccggtcagggcagcccaggactgcccagcctggtgggctggggattgggctttgggtagggcacaggtgccaccttctgtcctggctgtcctgtgccaccctggtctgtgtctagaggagtgaaactcccagggttgggctgggagtatttggtgcacgcggtatggggagggctgagctcagtgcctcctgggagacttgtcccgtgtacagtgacccagaaagatgagattccttggcctgaactctgtgatagagtgtgactgagctgctgggggacatgtgagcctcaaatccatagaaagacaaacggccaccttgggtgcccaggatactggtgcctggccccacgtacacccacatacttctcagatggctcccacattttaagattttaaaaatgaaaccaaaaaataaattgaagaaaactgtaaactttaaagaataatcagctgggcgcagtggctcatgcttgtaatcacagcactttaggaggctgaggcaggaggactgtttgagcccaggagtttgagaccaacctgagtaaggtggcaaaaccccatctctaccaaaaatacaaagattagccaggcgtggtggtgagcgcctgtagtcccagctacttgggatgctgaggtgggaggatcacttgaacctgggagacacaggctgcagtgggccctgattgagccaccacactgcagcctaggtgacagtcagaccctgtctcaaaaaaaataaaaaaaattt

SEQ ID NO: 20993 - protein, 60 aa, Homo sapiens; identical to SEQ ID NO: 20991

SEQ ID NO: 20994 - DNA, 3153 bp, Homo sapiens
cccgcaacccctctggcctccaatcagggccctgctccgcggctggcgctcacccgcaacttcagttcccgtaacggttcctcccgccacccggccgctcctgcggatacctcaagccactagaactttcttccacttccgcttccgggtcgcttcaagagccgcctttaaaaaagaaacattccacgttgggcacttctagccagttagagctatagagttgaggcgccccggacctcgacggcgtccttagtaggcgctcctttccggtccttcgcgggaagccctgccttctaaggtctcgcttctcgcgcagttctgagggagataggcctccagggagaggacttcctttctctgctgcccggacccggaactcaaggacttaggcttgacggacctggcgtggggaagagttagaagacggacaagggaggggacgggaggcctccgagacagcgccggaagtacggttttcggagggatcagactcagactcacgtcgcactcctcgcagttggactggtgggaactgggaacactggagacctgatttctaactgacgctaccgtcgcggccgccgtgtgggacgacttcagcatgtctcaggccaccaagaggaagcatgtggtgaaggaggtgctaggggagcacatagtgccctccgaccagcagcagattgtcagggtactcaggaccccagggaacaatctgcatgaggtggagacagcccaagggcagcgcttcctggtgagcatgccctccaaataccgcaagaacatctggatcaagagaggggactttctcattgttgaccccattgaagagggagaaaaggtgaaggctgaaatctcgtttgtgctctgcaaggaccacgtgcgctctctgcagaaggaggggttttggcctgaggccttctctgaagtggctgagaaacacaacaacaggaacagacaaactcaaccagaactcccagctgagccacagttatcaggagaggagtccagctcagaagatgattctgacctgtttgttaacacaaaccgcagacagtatcatgagagtgaggaggagagtgaagaggaggaggcagcctgagactccaggacccaattctccacttgctcagggactggcccctggctcttctgggcttggacattcccagggtgctctgcacatcttcacccctgcatgaggacaaagcagggctcctctctgaactgatcttttgattcagagaattaaacccctggtgggttggtgacttgttctggtgtctgagtggctctctcgggggagggagattgtgatgaagtgaaaaactgctccctatttattagagaccttgtgggtgggtgggctgaatggggaggaaatgggaaatggctggagtctttcccaggtggtttgttctttcttattgggcacttagaaagtgccaggccgtgctctgggccttcttgcatgtgtttaacagctgggagcactcctgcttccttgcctgcttgcagttcataccaatttaagcattcaggatgacagccctaggacctaacacccacctgcctctaagagacgctcaggagcccatggtgcctcgtgctgttctccccgcctttctagtcaccctgtgtacgggagtgctcacctccagctactgtgtccatccccacatacgacctcatctctcccactctgcaccatctatcacttccagaaggtggctggcaaatctctctatccttaactttgttttgaatggtccatccatctcctgactttatttgaaacctgattattccctgaggacattgattgtcttataaccttttaaatagaggctgcttttccaccctcacccttcattcttctaaccagccctgacattctcatgagtaaccttctgccttcacttccctcttgtgtagcatcaattccgtagtccaccctacacccctctgtctccctccattctgttccgctagtaaaaccctaaccctgggtaaacccaatcattcacctctgtgcccaaacccaagtcaccatcattaggtgagaaaacagccagcctggccaccagttgtaccttacgtttatcattacaaacctcagatggacactaagcactgcccagcagatctactctgggatgtctgtttcaaaacttctgtcttatctatcaattcccccttgtggtagttaccacaacacatgcctcattaagaaacagcaaccatcagagggaatgcctgcctccctgttaccagctctgcagatgtgcacatatcttcctgtcgtaagccaatgggacttaaaccttacctcttgtgttttggagactatctttttttttttttttttttttttgagagagtgtctccctgtgttgctcaggctggagtgcagtggtgtgatctcggctcactgtaaccttcacctactgggttcaagtaactctcctgcctcagcctcccgagtagcttggactacaggcgtgcaccaccacacctggctaactttttgtatttttagtagagacggggttttgccatgttgcccgggctggtctcgaactcctgaccttaaatgagcctcctgcctcagcctcccaaactgctgggattacaggcgtgtgccaccatgcctggctaatttttatattttcagtagagacgaggttttgccatgttggccaggctggtctcgaactcctgacctcaagtggtccacccaccttggcctcctagagtgctgggattacaggtgtgagccactgtgcccggcctcttttgctttcttaaagactttggtcgggtatttgtgttgttgagtattgtgtctgggtgtgggtatttgattctttttttgttttgtgtttttggctgtcctgtctattggatgtgatatgttatggatgtgatgtgttagtgtcgagcgtgctgtagaatctcccatttctgaaacaggcgtgaaaacctgtactgattcccacgtcctccagctaccacttcatttgtctgtttctcatttactttctcttatagcgtggctttaaacatatatacatttgtatatatgtatatatgaatataatgtataaaatgtatgtagatgtatatacaaaaaataaacgagatgggttaaagata

SEQ ID NO: 20995 - protein, 165 aa, Homo sapiens; identical to SEQ ID NO: 2677

SEQ ID NO: 20996 - DNA, 3283 bp, Homo sapiens
cccgcaacccctctggcctccaatcagggccctgctccgcggctggcgctcacccgcaacttcagttcccgtaacggttcctcccgccacccggccgctcctgcggatacctcaagccactagaactttcttccacttccgcttccgggtcgcttcaagagccgcctttaaaaaagaaacattccacgttgggcacttctagccagttagagctatagagttgaggcgccccggacctcgacggcgtccttagtaggcgctcctttccggtccttcgcgggaagccctgccttctaaggtctcgcttctcgcgcagttctgagggagataggcctccagggagaggacttcctttctctgctgcccggacccggaactcaaggacttaggcttgacggacctggcgtggggaagagttagaagacggacaagggaggggacgggaggcctccgagacagcgccggaagtacggttttcggagggatcagactcagactcacgtcgcactcctcgcagttggactggtgggaactgggaacactggagacctgatttctaactgacgctaccgtcgcggccgccggcaagttcctttactgtgttttcttggttcagccttgaagtgagtcgtggacgatcctctctcagcgtccagcctagacggcggtgttgctccggcagcgttcctgggagccgagggccagagactaagttgtgggacgacttcagcatgtctcaggccaccaagaggaagcatgtggtgaaggaggtgctaggggagcacatagtgccctccgaccagcagcagattgtcagggtactcaggaccccagggaacaatctgcatgaggtggagacagcccaagggcagcgcttcctggtgagcatgccctccaaataccgcaagaacatctggatcaagagaggggactttctcattgttgaccccattgaagagggagaaaaggtgaaggctgaaatctcgtttgtgctctgcaaggaccacgtgcgctctctgcagaaggaggggttttggcctgaggccttctctgaagtggctgagaaacacaacaacaggaacagacaaactcaaccagaactcccagctgagccacagttatcaggagaggagtccagctcagaagatgattctgacctgtttgttaacacaaaccgcagacagtatcatgagagtgaggaggagagtgaagaggaggaggcagcctgagactccaggacccaattctccacttgctcagggactggcccctggctcttctgggcttggacattcccagggtgctctgcacatcttcacccctgcatgaggacaaagcagggctcctctctgaactgatcttttgattcagagaattaaacccctggtgggttggtgacttgttctggtgtctgagtggctctctcgggggagggagattgtgatgaagtgaaaaactgctccctatttattagagaccttgtgggtgggtgggctgaatggggaggaaatgggaaatggctggagtctttcccaggtggtttgttctttcttattgggcacttagaaagtgccaggccgtgctctgggccttcttgcatgtgtttaacagctgggagcactcctgcttccttgcctgcttgcagttcataccaatttaagcattcaggatgacagccctaggacctaacacccacctgcctctaagagacgctcaggagcccatggtgcctcgtgctgttctccccgcctttctagtcaccctgtgtacgggagtgctcacctccagctactgtgtccatccccacatacgacctcatctctcccactctgcaccatctatcacttccagaaggtggctggcaaatctctctatccttaactttgttttgaatggtccatccatctcctgactttatttgaaacctgattattccctgaggacattgattgtcttataaccttttaaatagaggctgcttttccaccctcacccttcattcttctaaccagccctgacattctcatgagtaaccttctgccttcacttccctcttgtgtagcatcaattccgtagtccaccctacacccctctgtctccctccattctgttccgctagtaaaaccctaaccctgggtaaacccaatcattcacctctgtgcccaaacccaagtcaccatcattaggtgagaaaacagccagcctggccaccagttgtaccttacgtttatcattacaaacctcagatggacactaagcactgcccagcagatctactctgggatgtctgtttcaaaacttctgtcttatctatcaattcccccttgtggtagttaccacaacacatgcctcattaagaaacagcaaccatcagagggaatgcctgcctccctgttaccagctctgcagatgtgcacatatcttcctgtcgtaagccaatgggacttaaaccttacctcttgtgttttggagactatctttttttttttttttttttttttgagagagtgtctccctgtgttgctcaggctggagtgcagtggtgtgatctcggctcactgtaaccttcacctactgggttcaagtaactctcctgcctcagcctcccgagtagcttggactacaggcgtgcaccaccacacctggctaactttttgtatttttagtagagacggggttttgccatgttgcccgggctggtctcgaactcctgaccttaaatgagcctcctgcctcagcctcccaaactgctgggattacaggcgtgtgccaccatgcctggctaatttttatattttcagtagagacgaggttttgccatgttggccaggctggtctcgaactcctgacctcaagtggtccacccaccttggcctcctagagtgctgggattacaggtgtgagccactgtgcccggcctcttttgctttcttaaagactttggtcgggtatttgtgttgttgagtattgtgtctgggtgtgggtatttgattctttttttgttttgtgtttttggctgtcctgtctattggatgtgatatgttatggatgtgatgtgttagtgtcgagcgtgctgtagaatctcccatttctgaaacaggcgtgaaaacctgtactgattcccacgtcctccagctaccacttcatttgtctgtttctcatttactttctcttatagcgtggctttaaacatatatacatttgtatatatgtatatatgaatataatgtataaaatgtatgtagatgtatatacaaaaaataaacgagatgggttaaagata

SEQ ID NO: 20997 - protein, 165 aa, Homo sapiens; identical to SEQ ID NO: 2677

SEQ ID NO: 20998 - DNA, 3358 bp, Homo sapiens
cccgcaacccctctggcctccaatcagggccctgctccgcggctggcgctcacccgcaacttcagttcccgtaacggttcctcccgccacccggccgctcctgcggatacctcaagccactagaactttcttccacttccgcttccgggtcgcttcaagagccgcctttaaaaaagaaacattccacgttgggcacttctagccagttagagctatagagttgaggcgccccggacctcgacggcgtccttagtaggcgctcctttccggtccttcgcgggaagccctgccttctaaggtctcgcttctcgcgcagttctgagggagataggcctccagggagaggacttcctttctctgctgcccggacccggaactcaaggacttaggcttgacggacctggcgtggggaagagttagaagacggacaagggaggggacgggaggcctccgagacagcgccggaagtacggttttcggagggatcagactcagactcacgtcgcactcctcgcagttggactggtgggaactgggaacactggagacctgatttctaactgacgctaccgtcgcggccgccggcaagttcctttactgtgttttcttggttcagccttgaagtgagtcgtggacgatcctctctcagcgtccagcctagacggcggtgttgctccggcagcgttcctgggagccgagggccagagactaagtaacagtcctgggttctgagcctgccatccaaggaactcaggaggaggagttgacagtctcttcgttcctaaccagtgtgggacgacttcagcatgtctcaggccaccaagaggaagcatgtggtgaaggaggtgctaggggagcacatagtgccctccgaccagcagcagattgtcagggtactcaggaccccagggaacaatctgcatgaggtggagacagcccaagggcagcgcttcctggtgagcatgccctccaaataccgcaagaacatctggatcaagagaggggactttctcattgttgaccccattgaagagggagaaaaggtgaaggctgaaatctcgtttgtgctctgcaaggaccacgtgcgctctctgcagaaggaggggttttggcctgaggccttctctgaagtggctgagaaacacaacaacaggaacagacaaactcaaccagaactcccagctgagccacagttatcaggagaggagtccagctcagaagatgattctgacctgtttgttaacacaaaccgcagacagtatcatgagagtgaggaggagagtgaagaggaggaggcagcctgagactccaggacccaattctccacttgctcagggactggcccctggctcttctgggcttggacattcccagggtgctctgcacatcttcacccctgcatgaggacaaagcagggctcctctctgaactgatcttttgattcagagaattaaacccctggtgggttggtgacttgttctggtgtctgagtggctctctcgggggagggagattgtgatgaagtgaaaaactgctccctatttattagagaccttgtgggtgggtgggctgaatggggaggaaatgggaaatggctggagtctttcccaggtggtttgttctttcttattgggcacttagaaagtgccaggccgtgctctgggccttcttgcatgtgtttaacagctgggagcactcctgcttccttgcctgcttgcagttcataccaatttaagcattcaggatgacagccctaggacctaacacccacctgcctctaagagacgctcaggagcccatggtgcctcgtgctgttctccccgcctttctagtcaccctgtgtacgggagtgctcacctccagctactgtgtccatccccacatacgacctcatctctcccactctgcaccatctatcacttccagaaggtggctggcaaatctctctatccttaactttgttttgaatggtccatccatctcctgactttatttgaaacctgattattccctgaggacattgattgtcttataaccttttaaatagaggctgcttttccaccctcacccttcattcttctaaccagccctgacattctcatgagtaaccttctgccttcacttccctcttgtgtagcatcaattccgtagtccaccctacacccctctgtctccctccattctgttccgctagtaaaaccctaaccctgggtaaacccaatcattcacctctgtgcccaaacccaagtcaccatcattaggtgagaaaacagccagcctggccaccagttgtaccttacgtttatcattacaaacctcagatggacactaagcactgcccagcagatctactctgggatgtctgtttcaaaacttctgtcttatctatcaattcccccttgtggtagttaccacaacacatgcctcattaagaaacagcaaccatcagagggaatgcctgcctccctgttaccagctctgcagatgtgcacatatcttcctgtcgtaagccaatgggacttaaaccttacctcttgtgttttggagactatctttttttttttttttttttttttgagagagtgtctccctgtgttgctcaggctggagtgcagtggtgtgatctcggctcactgtaaccttcacctactgggttcaagtaactctcctgcctcagcctcccgagtagcttggactacaggcgtgcaccaccacacctggctaactttttgtatttttagtagagacggggttttgccatgttgcccgggctggtctcgaactcctgaccttaaatgagcctcctgcctcagcctcccaaactgctgggattacaggcgtgtgccaccatgcctggctaatttttatattttcagtagagacgaggttttgccatgttggccaggctggtctcgaactcctgacctcaagtggtccacccaccttggcctcctagagtgctgggattacaggtgtgagccactgtgcccggcctcttttgctttcttaaagactttggtcgggtatttgtgttgttgagtattgtgtctgggtgtgggtatttgattctttttttgttttgtgtttttggctgtcctgtctattggatgtgatatgttatggatgtgatgtgttagtgtcgagcgtgctgtagaatctcccatttctgaaacaggcgtgaaaacctgtactgattcccacgtcctccagctaccacttcatttgtctgtttctcatttactttctcttatagcgtggctttaaacatatatacatttgtatatatgtatatatgaatataatgtataaaatgtatgtagatgtatatacaaaaaataaacgagatgggttaaagata

SEQ ID NO: 20999 - protein, 165 aa, Homo sapiens; identical to SEQ ID NO: 2677

SEQ ID NO: 21000 - DNA, 3227 bp, Homo sapiens
cccgcaacccctctggcctccaatcagggccctgctccgcggctggcgctcacccgcaacttcagttcccgtaacggttcctcccgccacccggccgctcctgcggatacctcaagccactagaactttcttccacttccgcttccgggtcgcttcaagagccgcctttaaaaaagaaacattccacgttgggcacttctagccagttagagctatagagttgaggcgccccggacctcgacggcgtccttagtaggcgctcctttccggtccttcgcgggaagccctgccttctaaggtctcgcttctcgcgcagttctgagggagataggcctccagggagaggacttcctttctctgctgcccggacccggaactcaaggacttaggcttgacggacctggcgtggggaagagttagaagacggacaagggaggggacgggaggcctccgagacagcgccggaagtacggttttcggagggatcagactcagactcacgtcgcactcctcgcagttggactggtgggaactgggaacactggagacctgatttctaactgacgctaccgtcgcggccgccggcaatcctgggttctgagcctgccatccaaggaactcaggaggaggagttgacagtctcttcgttcctaaccagtgtgggacgacttcagcatgtctcaggccaccaagaggaagcatgtggtgaaggaggtgctaggggagcacatagtgccctccgaccagcagcagattgtcagggtactcaggaccccagggaacaatctgcatgaggtggagacagcccaagggcagcgcttcctggtgagcatgccctccaaataccgcaagaacatctggatcaagagaggggactttctcattgttgaccccattgaagagggagaaaaggtgaaggctgaaatctcgtttgtgctctgcaaggaccacgtgcgctctctgcagaaggaggggttttggcctgaggccttctctgaagtggctgagaaacacaacaacaggaacagacaaactcaaccagaactcccagctgagccacagttatcaggagaggagtccagctcagaagatgattctgacctgtttgttaacacaaaccgcagacagtatcatgagagtgaggaggagagtgaagaggaggaggcagcctgagactccaggacccaattctccacttgctcagggactggcccctggctcttctgggcttggacattcccagggtgctctgcacatcttcacccctgcatgaggacaaagcagggctcctctctgaactgatcttttgattcagagaattaaacccctggtgggttggtgacttgttctggtgtctgagtggctctctcgggggagggagattgtgatgaagtgaaaaactgctccctatttattagagaccttgtgggtgggtgggctgaatggggaggaaatgggaaatggctggagtctttcccaggtggtttgttctttcttattgggcacttagaaagtgccaggccgtgctctgggccttcttgcatgtgtttaacagctgggagcactcctgcttccttgcctgcttgcagttcataccaatttaagcattcaggatgacagccctaggacctaacacccacctgcctctaagagacgctcaggagcccatggtgcctcgtgctgttctccccgcctttctagtcaccctgtgtacgggagtgctcacctccagctactgtgtccatccccacatacgacctcatctctcccactctgcaccatctatcacttccagaaggtggctggcaaatctctctatccttaactttgttttgaatggtccatccatctcctgactttatttgaaacctgattattccctgaggacattgattgtcttataaccttttaaatagaggctgcttttccaccctcacccttcattcttctaaccagccctgacattctcatgagtaaccttctgccttcacttccctcttgtgtagcatcaattccgtagtccaccctacacccctctgtctccctccattctgttccgctagtaaaaccctaaccctgggtaaacccaatcattcacctctgtgcccaaacccaagtcaccatcattaggtgagaaaacagccagcctggccaccagttgtaccttacgtttatcattacaaacctcagatggacactaagcactgcccagcagatctactctgggatgtctgtttcaaaacttctgtcttatctatcaattcccccttgtggtagttaccacaacacatgcctcattaagaaacagcaaccatcagagggaatgcctgcctccctgttaccagctctgcagatgtgcacatatcttcctgtcgtaagccaatgggacttaaaccttacctcttgtgttttggagactatctttttttttttttttttttttttgagagagtgtctccctgtgttgctcaggctggagtgcagtggtgtgatctcggctcactgtaaccttcacctactgggttcaagtaactctcctgcctcagcctcccgagtagcttggactacaggcgtgcaccaccacacctggctaactttttgtatttttagtagagacggggttttgccatgttgcccgggctggtctcgaactcctgaccttaaatgagcctcctgcctcagcctcccaaactgctgggattacaggcgtgtgccaccatgcctggctaatttttatattttcagtagagacgaggttttgccatgttggccaggctggtctcgaactcctgacctcaagtggtccacccaccttggcctcctagagtgctgggattacaggtgtgagccactgtgcccggcctcttttgctttcttaaagactttggtcgggtatttgtgttgttgagtattgtgtctgggtgtgggtatttgattctttttttgttttgtgtttttggctgtcctgtctattggatgtgatatgttatggatgtgatgtgttagtgtcgagcgtgctgtagaatctcccatttctgaaacaggcgtgaaaacctgtactgattcccacgtcctccagctaccacttcatttgtctgtttctcatttactttctcttatagcgtggctttaaacatatatacatttgtatatatgtatatatgaatataatgtataaaatgtatgtagatgtatatacaaaaaataaacgagatgggttaaagata

SEQ ID NO: 21001 - protein, 165 aa, Homo sapiens; identical to SEQ ID NO: 2677

SEQ ID NO: 21002 - DNA, 3049 bp, Homo sapiens
cccgcaacccctctggcctccaatcagggccctgctccgcggctggcgctcacccgcaacttcagttcccgtaacggttcctcccgccacccggccgctcctgcggatacctcaagccactagaactttcttccacttccgcttccgggtcgcttcaagagccgcctttaaaaaagaaacattccacgttgggcacttctagccagttagagctatagagttgaggcgccccggacctcgacggcgtccttagtaggcgctcctttccggtccttcgcgggaagccctgccttctaaggtctcgcttctcgcgcagttctgagggagataggcctccagggagaggacttcctttctctgctgcccggacccggaactcaaggacttaggcttgacggacctggcgtggggaagagttagaagacggacaagggaggggacgggaggcctccgagacagcgccggaagtacggttttcggagggatcagactcagactcacgtcgcactcctcgcagttggactggtgggaactgggaacactggagacctgatttctaactgacgctaccgtcgcggccgccggtactcaggaccccagggaacaatctgcatgaggtggagacagcccaagggcagcgcttcctggtgagcatgccctccaaataccgcaagaacatctggatcaagagaggggactttctcattgttgaccccattgaagagggagaaaaggtgaaggctgaaatctcgtttgtgctctgcaaggaccacgtgcgctctctgcagaaggaggggttttggcctgaggccttctctgaagtggctgagaaacacaacaacaggaacagacaaactcaaccagaactcccagctgagccacagttatcaggagaggagtccagctcagaagatgattctgacctgtttgttaacacaaaccgcagacagtatcatgagagtgaggaggagagtgaagaggaggaggcagcctgagactccaggacccaattctccacttgctcagggactggcccctggctcttctgggcttggacattcccagggtgctctgcacatcttcacccctgcatgaggacaaagcagggctcctctctgaactgatcttttgattcagagaattaaacccctggtgggttggtgacttgttctggtgtctgagtggctctctcgggggagggagattgtgatgaagtgaaaaactgctccctatttattagagaccttgtgggtgggtgggctgaatggggaggaaatgggaaatggctggagtctttcccaggtggtttgttctttcttattgggcacttagaaagtgccaggccgtgctctgggccttcttgcatgtgtttaacagctgggagcactcctgcttccttgcctgcttgcagttcataccaatttaagcattcaggatgacagccctaggacctaacacccacctgcctctaagagacgctcaggagcccatggtgcctcgtgctgttctccccgcctttctagtcaccctgtgtacgggagtgctcacctccagctactgtgtccatccccacatacgacctcatctctcccactctgcaccatctatcacttccagaaggtggctggcaaatctctctatccttaactttgttttgaatggtccatccatctcctgactttatttgaaacctgattattccctgaggacattgattgtcttataaccttttaaatagaggctgcttttccaccctcacccttcattcttctaaccagccctgacattctcatgagtaaccttctgccttcacttccctcttgtgtagcatcaattccgtagtccaccctacacccctctgtctccctccattctgttccgctagtaaaaccctaaccctgggtaaacccaatcattcacctctgtgcccaaacccaagtcaccatcattaggtgagaaaacagccagcctggccaccagttgtaccttacgtttatcattacaaacctcagatggacactaagcactgcccagcagatctactctgggatgtctgtttcaaaacttctgtcttatctatcaattcccccttgtggtagttaccacaacacatgcctcattaagaaacagcaaccatcagagggaatgcctgcctccctgttaccagctctgcagatgtgcacatatcttcctgtcgtaagccaatgggacttaaaccttacctcttgtgttttggagactatctttttttttttttttttttttttgagagagtgtctccctgtgttgctcaggctggagtgcagtggtgtgatctcggctcactgtaaccttcacctactgggttcaagtaactctcctgcctcagcctcccgagtagcttggactacaggcgtgcaccaccacacctggctaactttttgtatttttagtagagacggggttttgccatgttgcccgggctggtctcgaactcctgaccttaaatgagcctcctgcctcagcctcccaaactgctgggattacaggcgtgtgccaccatgcctggctaatttttatattttcagtagagacgaggttttgccatgttggccaggctggtctcgaactcctgacctcaagtggtccacccaccttggcctcctagagtgctgggattacaggtgtgagccactgtgcccggcctcttttgctttcttaaagactttggtcgggtatttgtgttgttgagtattgtgtctgggtgtgggtatttgattctttttttgttttgtgtttttggctgtcctgtctattggatgtgatatgttatggatgtgatgtgttagtgtcgagcgtgctgtagaatctcccatttctgaaacaggcgtgaaaacctgtactgattcccacgtcctccagctaccacttcatttgtctgtttctcatttactttctcttatagcgtggctttaaacatatatacatttgtatatatgtatatatgaatataatgtataaaatgtatgtagatgtatatacaaaaaataaacgagatgggttaaagata

SEQ ID NO: 21003 - protein, 113 aa, Homo sapiens
MPSKYRKNIWIKRGDFLIVDPIEEGEKVKAEISFVLCKDHVRSLQKEGFWPEAFSEVAEKHNNRNRQTQPELPAEPQLSGEESSSEDDSDLFVNTNRRQYHESEEESEEEEAA

SEQ ID NO: 21004 - DNA, 1087 bp, Homo sapiens
cccgcaacccctctggcctccaatcagggccctgctccgcggctggcgctcacccgcaacttcagttcccgtaacggttcctcccgccacccggccgctcctgcggatacctcaagccactagaactttcttccacttccgcttccgggtcgcttcaagagccgcctttaaaaaagaaacattccacgttgggcacttctagccagttagagctatagagttgaggcgccccggacctcgacggcgtccttagtaggcgctcctttccggtccttcgcgggaagccctgccttctaaggtctcgcttctcgcgcagttctgagggagataggcctccagggagaggacttcctttctctgctgcccggacccggaactcaaggacttaggcttgacggacctggcgtggggaagagttagaagacggacaagggaggggacgggaggcctccgagacagcgccggaagtacggttttcggagggatcagactcagactcacgtcgcactcctcgcagttggactggtgggaactgggaacactggagacctgatttctaactgacgctaccgtcgcggccgccggcaagttcctttactgtgttttcttggttcagccttgaagtgagtcgtggacgatcctctctcagcgtccagcctagacggcggtgttgctccggcagcgttcctgggagccgagggccagagactaagtaacagtcctgggttctgagcctgccatccaaggaactcaggaggaggagttgacagtctcttcgttcctaaccagtgtgggacgacttcagcatgtctcaggccaccaagaggaagcatgtggtgaaggaggtgctaggggagcacatagtgccctccgaccagcagcagattgtcagggtactcaggaccccagggaacaatctgcatgagtaaccttctgccttcacttccctcttgtgtagcatcaattccgtagtccaccctacacccctctgtctccctccattctgttccgctagtaaaaccctaaccctgggtaaacccaatcattcacctctgtgcccaaacccaagtcaccatcattaggtgag

SEQ ID NO: 21005 - protein, 40 aa, Homo sapiens
MSQATKRKHVVKEVLGEHIVPSDQQQIVRVLRTPGNNLHE

SEQ ID NO: 21006 - DNA, 1347 bp, Homo sapiens
cccgcaacccctctggcctccaatcagggccctgctccgcggctggcgctcacccgcaacttcagttcccgtaacggttcctcccgccacccggccgctcctgcggatacctcaagccactagaactttcttccacttccgcttccgggtcgcttcaagagccgcctttaaaaaagaaacattccacgttgggcacttctagccagttagagctatagagttgaggcgccccggacctcgacggcgtccttagtaggcgctcctttccggtccttcgcgggaagccctgccttctaaggtctcgcttctcgcgcagttctgagggagataggcctccagggagaggacttcctttctctgctgcccggacccggaactcaaggacttaggcttgacggacctggcgtggggaagagttagaagacggacaagggaggggacgggaggcctccgagacagcgccggaagtacggttttcggagggatcagactcagactcacgtcgcactcctcgcagttggactggtgggaactgggaacactggagacctgatttctaactgacgctaccgtcgcggccgccggcaatcctgggttctgagcctgccatccaaggaactcaggaggaggagttgacagtctcttcgttcctaaccagtgtgggacgacttcagcatgtctcaggccaccaagaggaagcatgtggtgaaggaggtgctaggggagcacatagtgccctccgaccagcagcagattgtcagggtactcaggaccccagggaacaatctgcatgaggtggagacagcccaagggcagcgcttcctggtgagcatgccctccaaataccgcaagaacatctggatcaagagaggggactttctcattgttgaccccattgaagagggagaaaaggtgaaggctgaaatctcgtttgtgctctgcaaggaccacgtgcgctctctgcagaaggaggggttttggcctgaggccttctctgaagtggctgagaaacacaacaacaggaacagacaaactcaaccagaactcccagctgagccacagttatcaggagaggagtccagctcagaagatgattctgacctgtttgttaacacaaaccgcagacagtatcatgagagtgaggaggagagtgaagaggaggaggcagcctgagactccaggacccaattctccacttgctcagggactggcccctggctcttctgggcttggacattcccagggtgctctgcacatcttcacccctgcatgaggacaaagcagggctcctctctgaactgatcttttgattcagagaattaaacccctggtgggttggtgacttgt

SEQ ID NO: 21007 - protein, 165 aa, Homo sapiens; identical to SEQ ID NO: 2677

SEQ ID NO: 21008 - DNA, 1273 bp, Homo sapiens
cccgcaacccctctggcctccaatcagggccctgctccgcggctggcgctcacccgcaacttcagttcccgtaacggttcctcccgccacccggccgctcctgcggatacctcaagccactagaactttcttccacttccgcttccgggtcgcttcaagagccgcctttaaaaaagaaacattccacgttgggcacttctagccagttagagctatagagttgaggcgccccggacctcgacggcgtccttagtaggcgctcctttccggtccttcgcgggaagccctgccttctaaggtctcgcttctcgcgcagttctgagggagataggcctccagggagaggacttcctttctctgctgcccggacccggaactcaaggacttaggcttgacggacctggcgtggggaagagttagaagacggacaagggaggggacgggaggcctccgagacagcgccggaagtacggttttcggagggatcagactcagactcacgtcgcactcctcgcagttggactggtgggaactgggaacactggagacctgatttctaactgacgctaccgtcgcggccgccgtgtgggacgacttcagcatgtctcaggccaccaagaggaagcatgtggtgaaggaggtgctaggggagcacatagtgccctccgaccagcagcagattgtcagggtactcaggaccccagggaacaatctgcatgaggtggagacagcccaagggcagcgcttcctggtgagcatgccctccaaataccgcaagaacatctggatcaagagaggggactttctcattgttgaccccattgaagagggagaaaaggtgaaggctgaaatctcgtttgtgctctgcaaggaccacgtgcgctctctgcagaaggaggggttttggcctgaggccttctctgaagtggctgagaaacacaacaacaggaacagacaaactcaaccagaactcccagctgagccacagttatcaggagaggagtccagctcagaagatgattctgacctgtttgttaacacaaaccgcagacagtatcatgagagtgaggaggagagtgaagaggaggaggcagcctgagactccaggacccaattctccacttgctcagggactggcccctggctcttctgggcttggacattcccagggtgctctgcacatcttcacccctgcatgaggacaaagcagggctcctctctgaactgatcttttgattcagagaattaaacccctggtgggttggtgacttgt

SEQ ID NO: 21009 - protein, 165 aa, Homo sapiens; identical to SEQ ID NO: 2677

SEQ ID NO: 21010 - DNA, 1403 bp, Homo sapiens
cccgcaacccctctggcctccaatcagggccctgctccgcggctggcgctcacccgcaacttcagttcccgtaacggttcctcccgccacccggccgctcctgcggatacctcaagccactagaactttcttccacttccgcttccgggtcgcttcaagagccgcctttaaaaaagaaacattccacgttgggcacttctagccagttagagctatagagttgaggcgccccggacctcgacggcgtccttagtaggcgctcctttccggtccttcgcgggaagccctgccttctaaggtctcgcttctcgcgcagttctgagggagataggcctccagggagaggacttcctttctctgctgcccggacccggaactcaaggacttaggcttgacggacctggcgtggggaagagttagaagacggacaagggaggggacgggaggcctccgagacagcgccggaagtacggttttcggagggatcagactcagactcacgtcgcactcctcgcagttggactggtgggaactgggaacactggagacctgatttctaactgacgctaccgtcgcggccgccggcaagttcctttactgtgttttcttggttcagccttgaagtgagtcgtggacgatcctctctcagcgtccagcctagacggcggtgttgctccggcagcgttcctgggagccgagggccagagactaagttgtgggacgacttcagcatgtctcaggccaccaagaggaagcatgtggtgaaggaggtgctaggggagcacatagtgccctccgaccagcagcagattgtcagggtactcaggaccccagggaacaatctgcatgaggtggagacagcccaagggcagcgcttcctggtgagcatgccctccaaataccgcaagaacatctggatcaagagaggggactttctcattgttgaccccattgaagagggagaaaaggtgaaggctgaaatctcgtttgtgctctgcaaggaccacgtgcgctctctgcagaaggaggggttttggcctgaggccttctctgaagtggctgagaaacacaacaacaggaacagacaaactcaaccagaactcccagctgagccacagttatcaggagaggagtccagctcagaagatgattctgacctgtttgttaacacaaaccgcagacagtatcatgagagtgaggaggagagtgaagaggaggaggcagcctgagactccaggacccaattctccacttgctcagggactggcccctggctcttctgggcttggacattcccagggtgctctgcacatcttcacccctgcatgaggacaaagcagggctcctctctgaactgatcttttgattcagagaattaaacccctggtgggttggtgacttgt

SEQ ID NO: 21011 - protein, 165 aa, Homo sapiens; identical to SEQ ID NO: 2677

SEQ ID NO: 21012 - DNA, 1478 bp, Homo sapiens
cccgcaacccctctggcctccaatcagggccctgctccgcggctggcgctcacccgcaacttcagttcccgtaacggttcctcccgccacccggccgctcctgcggatacctcaagccactagaactttcttccacttccgcttccgggtcgcttcaagagccgcctttaaaaaagaaacattccacgttgggcacttctagccagttagagctatagagttgaggcgccccggacctcgacggcgtccttagtaggcgctcctttccggtccttcgcgggaagccctgccttctaaggtctcgcttctcgcgcagttctgagggagataggcctccagggagaggacttcctttctctgctgcccggacccggaactcaaggacttaggcttgacggacctggcgtggggaagagttagaagacggacaagggaggggacgggaggcctccgagacagcgccggaagtacggttttcggagggatcagactcagactcacgtcgcactcctcgcagttggactggtgggaactgggaacactggagacctgatttctaactgacgctaccgtcgcggccgccggcaagttcctttactgtgttttcttggttcagccttgaagtgagtcgtggacgatcctctctcagcgtccagcctagacggcggtgttgctccggcagcgttcctgggagccgagggccagagactaagtaacagtcctgggttctgagcctgccatccaaggaactcaggaggaggagttgacagtctcttcgttcctaaccagtgtgggacgacttcagcatgtctcaggccaccaagaggaagcatgtggtgaaggaggtgctaggggagcacatagtgccctccgaccagcagcagattgtcagggtactcaggaccccagggaacaatctgcatgaggtggagacagcccaagggcagcgcttcctggtgagcatgccctccaaataccgcaagaacatctggatcaagagaggggactttctcattgttgaccccattgaagagggagaaaaggtgaaggctgaaatctcgtttgtgctctgcaaggaccacgtgcgctctctgcagaaggaggggttttggcctgaggccttctctgaagtggctgagaaacacaacaacaggaacagacaaactcaaccagaactcccagctgagccacagttatcaggagaggagtccagctcagaagatgattctgacctgtttgttaacacaaaccgcagacagtatcatgagagtgaggaggagagtgaagaggaggaggcagcctgagactccaggacccaattctccacttgctcagggactggcccctggctcttctgggcttggacattcccagggtgctctgcacatcttcacccctgcatgaggacaaagcagggctcctctctgaactgatcttttgattcagagaattaaacccctggtgggttggtgacttgt

SEQ ID NO: 21013 - protein, 165 aa, Homo sapiens; identical to SEQ ID NO: 2677

SEQ ID NO: 21014 - DNA, 1030 bp, Homo sapiens
cccgcaacccctctggcctccaatcagggccctgctccgcggctggcgctcacccgcaacttcagttcccgtaacggttcctcccgccacccggccgctcctgcggatacctcaagccactagaactttcttccacttccgcttccgggtcgcttcaagagccgcctttaaaaaagaaacattccacgttgggcacttctagccagttagagctatagagttgaggcgccccggacctcgacggcgtccttagtaggcgctcctttccggtccttcgcgggaagccctgccttctaaggtctcgcttctcgcgcagttctgagggagataggcctccagggagaggacttcctttctctgctgcccggacccggaactcaaggacttaggcttgacggacctggcgtggggaagagttagaagacggacaagggaggggacgggaggcctccgagacagcgccggaagtacggttttcggagggatcagactcagactcacgtcgcactcctcgcagttggactggtgggaactgggaacactggagacctgatttctaactgacgctaccgtcgcggccgccggcaagttcctttactgtgttttcttggttcagccttgaagtgagtcgtggacgatcctctctcagcgtccagcctagacggcggtgttgctccggcagcgttcctgggagccgagggccagagactaagtaacagtcctgggttctgagcctgccatccaaggaactcaggaggaggagttgacagtctcttcgttcctaaccagtgtgggacgacttcagcatgtctcaggccaccaagaggaagcatgtggtgaaggaggtgctaggggagcacatagtgccctccgaccagcagcagattgtcagggtactcaggaccccagggaacaatctgcatgaggtggagacagcccaagggcagcgcttcctggtgagcatgccctccaaataccgcaagaacatctggatcaagagaggggactttctcattgttgaccccattga

SEQ ID NO: 21015 - protein, 73 aa, Homo sapiens
MSQATKRKHVVKEVLGEHIVPSDQQQIVRVLRTPGNNLHEVETAQGQRFLVSMPSKYRKNIWIKRGDFLIVDP

SEQ ID NO: 21016 - DNA, 1154 bp, Homo sapiens
ccagtgttcccagttcccaccagtccaactgcgaggagtgcgacgtgagtctgagtctgatccctccgaaaaccgtacttccggcgctgtctcggaggcctcccgtcccctcccttgtccgtcttctaactcttccccacgccaggtccgtcaagcctaagtccttgagttccgggtccgggcagcagagaaaggaagtcctctccctggaggcctatctccctcagaactgcgcgagaagcgagaccttagaaggcagggcttcccgcgaaggaccggaaaggagcgcctactaaggacgccgtcgaggtccggggcgcctcaactctatagctctaactggctagaagtgcccaacgtggaatgtttcttttttaaaggcggctcttgaagcgacccggaagcggaagtggaagaaagttctagtggcttgaggtatccgcaggagcggccgggtggcgggaggaaccgttacgggaactgaagttgcggattaagcctgatcaagatgacaacctcccaaaagcaccgagacttcgtggcagagcccatgggggagaagccagtggggagcctggctgggattggtgaagtcctgggcaagaagctggaggaaaggggttttgacaaggcctatgttgtccttggccagtttctggtgctaaagaaagatgaagacctcttccgggaatggctgaaagacacttgtggcgccaacgccaagcagtcccgggactgcttcggatgccttcgagagtggtgcgacgccttcttgtgatgctctctgggaagctctcaatccccagccctcatccagagtttgcagccgagtagggactcctcccctgtcctctacgaaggaaaagattgctattgtcgtactcacctccgacgtactccggggtcttttgggagttttctcccctaaccatttcaacttttttttggattctcgctcttgcatgcctcccccgtcctttttcccttgccagttccctggtgacagttaccagctttcctgaatggattcccggccccatccctcacccccaccctcactttcaatccgtttgataccatttggctccttttttggcagaacagtcactgtccttgtaaagttttttagatcaataaagtcagtggctttcatg

SEQ ID NO: 21017 - protein, 89 aa, Homo sapiens; identical to SEQ ID NO: 2679

SEQ ID NO: 21018 - DNA, 988 bp, Homo sapiens
gcagagaaaggaagtcctctccctggaggcctatctccctcagaactgcgcgagaagcgagaccttagaaggcagggcttcccgcgaaggaccggaaaggagcgcctactaaggacgccgtcgaggtccggggcgcctcaactctatagctctaactggctagaagtgcccaacgtggaatgtttcttttttaaaggcggctcttgaagcgacccggaagcggaagtggaagaaagttctagtggcttgaggtatccgcaggagcggccgggtggcgggaggaaccgttacgggaactgaagttgcggattaagcctgatcaagatgacaacctcccaaaagcaccgagacttcgtggcagagcccatgggggagaagccagtggggagcctggctgggattggtgaagtcctgggcaagaagctggaggaaaggggttttgacaaggcctatgttgtccttggccagtttctggtgctaaagaaagatgaagacctcttccgggaatggctgaaagacacttgtggcgccaacgccaagcagtcccgggactgcttcggatgccttcgagagtggtgcgacgccttcttgtgatgctctctgggaagctctcaatccccagccctcatccagagtttgcagccgagtagggactcctcccctgtcctctacgaaggaaaagattgctattgtcgtactcacctccgacgtactccggggtcttttgggagttttctcccctaaccatttcaacttttttttggattctcgctcttgcatgcctcccccgtcctttttcccttgccagttccctggtgacagttaccagctttcctgaatggattcccggccccatccctcacccccaccctcactttcaatccgtttgataccatttggctccttttttggcagaacagtcactgtccttgtaaagttttttagatcaataaagtcagtggctttcatgactgggctttgtgcactg

SEQ ID NO: 21019 - protein, 89 aa, Homo sapiens; identical to SEQ ID NO: 2679

SEQ ID NO: 21020 - DNA, 913 bp, Homo sapiens
cagagaaaggaagtcctctccctggaggcctatctccctcagaactgcgcgagaagcgagaccttagaaggcagggcttcccgcgaaggaccggaaaggagcgcctactaaggacgccgtcgaggtccggggcgcctcaactctatagctctaactggctagaagtgcccaacgtggaatgtttcttttttaaaggcggctcttgaagcgacccggaagcggaagtggaagaaagttctagtggcttgagattaagcctgatcaagatgacaacctcccaaaagcaccgagacttcgtggcagagcccatgggggagaagccagtggggagcctggctgggattggtgaagtcctgggcaagaagctggaggaaaggggttttgacaaggcctatgttgtccttggccagtttctggtgctaaagaaagatgaagacctcttccgggaatggctgaaagacacttgtggcgccaacgccaagcagtcccgggactgcttcggatgccttcgagagtggtgcgacgccttcttgtgatgctctctgggaagctctcaatccccagccctcatccagagtttgcagccgagtagggactcctcccctgtcctctacgaaggaaaagattgctattgtcgtactcacctccgacgtactccggggtcttttgggagttttctcccctaaccatttcaacttttttttggattctcgctcttgcatgcctcccccgtcctttttcccttgccagttccctggtgacagttaccagctttcctgaatggattcccggccccatccctcacccccaccctcactttcaatccgtttgataccatttggctccttttttggcagaacagtcactgtccttgtaaagttttttagatcaataaagtcagtggctttcatga

SEQ ID NO: 21021 - protein, 89 aa, Homo sapiens; identical to SEQ ID NO: 2679

SEQ ID NO: 21022 - DNA, 767 bp, Homo sapiens
aggaagtcctctccctggaggcctatctccctcagaactgcgcgagaagcgagaccttagaaggcagggcttcccgcgaaggaccggaaaggagcgcctactaaggacgccgtcgaggtccggggcgcctcaactctatagctctaactggctagaagtgcccaacgtggaatgtttcttttttaaaggcggctcttgaagcgacccggaagcggaagtggaagaaagttctagtggcttgaggcctatgttgtccttggccagtttctggtgctaaagaaagatgaagacctcttccgggaatggctgaaagacacttgtggcgccaacgccaagcagtcccgggactgcttcggatgccttcgagagtggtgcgacgccttcttgtgatgctctctgggaagctctcaatccccagccctcatccagagtttgcagccgagtagggactcctcccctgtcctctacgaaggaaaagattgctattgtcgtactcacctccgacgtactccggggtcttttgggagttttctcccctaaccatttcaacttttttttggattctcgctcttgcatgcctcccccgtcctttttcccttgccagttccctggtgacagttaccagctttcctgaatggattcccggccccatccctcacccccaccctcactttcaatccgtttgataccatttggctccttttttggcagaacagtcactgtccttgtaaagttttttagatcaataaagtcagtggctttcatga

SEQ ID NO: 21023 - protein, 47 aa, Homo sapiens
MAERHLWRQRQAVPGLLRMPSRVVRRLLVMLSGKLSIPSPHPEFAAE

SEQ ID NO: 21024 - DNA, 615 bp, Homo sapiens
aagcggaagtggaagaaagttctagtggcttgaggtatccgcaggagcggccgggtggcgggaggaaccgttacgggaactgaagttgcgggcctatgttgtccttggccagtttctggtgctaaagaaagatgaagacctcttccgggaatggctgaaagacacttgtggcgccaacgccaagcagtcccgggactgcttcggatgccttcgagagtggtgcgacgccttcttgtgatgctctctgggaagctctcaatccccagccctcatccagagtttgcagccgagtagggactcctcccctgtcctctacgaaggaaaagattgctattgtcgtactcacctccgacgtactccggggtcttttgggagttttctcccctaaccatttcaacttttttttggattctcgctcttgcatgcctcccccgtcctttttcccttgccagttccctggtgacagttaccagctttcctgaatggattcccggccccatccctcacccccaccctcactttcaatccgtttgataccatttggctccttttttggcagaacagtcactgtccttgtaaagttttttagatcaataaagtcagtggctttcatga

SEQ ID NO: 21025 - protein, 47 aa, Homo sapiens; identical to SEQ ID NO: 21023

SEQ ID NO: 21026 - DNA, 1385 bp, Homo sapiens
ggtatccgcaggagcggccgggtggcgggaggaaccgttacgggaactgaagttgcgggtgagcgccagccgcggagcagggccctgattggaggccagaggggttgcggggagaaggggaggagaggggtcgcaggcgctgtggcgggccctgggggagagcttggccgcgctgcggggagggggcggggtgcagcgcgtgggagccgggccgcgggaaggggcgggccgcagcggcgcgcggtgggggcggagctggggcgcggcgtgaaccccgcgggcggggagcgggtgtgcgcagcgctaggtgtgcgcttcgccctgtaggtagagagaccctttggttagctttccacgccaagtggccgttccaggcaggcagtgtcgtcttggttcagccaaggtcacagagggagtgatagcttccgcgcagccctggctacggactctgggcatctttccactgccccgcttgcgccacctgttaggcaggatcgtttttcctctggggcaagatcaaaatccaggtcctgcaggaagaaactcctcttaaaaatagtagggaagagtctccctggaactgttttctcctttcaggatgagggggatcgagcaagccactgtaacccctggcttggcttcctcttactatgagattgctcgtgggcccttagaagttccaggtcttcagccctaatctgccttttttttgggattcctagattaagcctgatcaagatgacaacctcccaaaagcaccgagacttcgtggcagagcccatgggggagaagccagtggggagcctggctgggattggtgaagtcctgggcaagaagctggaggaaaggggttttgacaaggcctatgttgtccttggccagtttctggtgctaaagaaagatgaagacctcttccgggaatggctgaaagacacttgtggcgccaacgccaagcagtcccgggactgcttcggatgccttcgagagtggtgcgacgccttcttgtgatgctctctgggaagctctcaatccccagccctcatccagagtttgcagccgagtagggactcctcccctgtcctctacgaaggaaaagattgctattgtcgtactcacctccgacgtactccggggtcttttgggagttttctcccctaaccatttcaacttttttttggattctcgctcttgcatgcctcccccgtcctttttcccttgccagttccctggtgacagttaccagctttcctgaatggattcccggccccatccctcacccccaccctcactttcaatccgtttgataccatttggctccttttttggcagaacagtcactgtccttgtaaagttttttagatcaataaagtcagtggctttcatga

SEQ ID NO: 21027 - protein, 89 aa, Homo sapiens; identical to SEQ ID NO: 2679

SEQ ID NO: 21028 - DNA, 703 bp, Homo sapiens
gcgggtgagcgccagccgcggagcagggccctgattggagattaagcctgatcaagatgacaacctcccaaaagcaccgagacttcgtggcagagcccatgggggagaagccagtggggagcctggctgggattggtgaagtcctgggcaagaagctggaggaaaggggttttgacaaggcctatgttgtccttggccagtttctggtgctaaagaaagatgaagacctcttccgggaatggctgaaagacacttgtggcgccaacgccaagcagtcccgggactgcttcggatgccttcgagagtggtgcgacgccttcttgtgatgctctctgggaagctctcaatccccagccctcatccagagtttgcagccgagtagggactcctcccctgtcctctacgaaggaaaagattgctattgtcgtactcacctccgacgtactccggggtcttttgggagttttctcccctaaccatttcaacttttttttggattctcgctcttgcatgcctcccccgtcctttttcccttgccagttccctggtgacagttaccagctttcctgaatggattcccggccccatccctcacccccaccctcactttcaatccgtttgataccatttggctccttttttggcagaacagtcactgtccttgtaaagttttttagatcaataaagtcagtggctttcatga

SEQ ID NO: 21029 - protein, 89 aa, Homo sapiens; identical to SEQ ID NO: 2679

SEQ ID NO: 21030 - DNA, 1153 bp, Homo sapiens
gccgcggagcagggccctgattggaggccagaggggttgcggggagaaggggaggagaggggtcgcaggcgctgtggcgggccctgggggagagcttggccgcgctgcggggagggggcggggtgcagcgcgtgggagccgggccgcgggaaggggcgggccgcagcggcgcgcggtgggggcggagctggggcgcggcgtgaaccccgcgggcggggagcgggtgtgcgcagcgctaggtgtgcgcttcgccctgtaggtagagagaccctttggttagctttccacgccaagtggccgttccaggcaggcagtgtcgtcttggttcagccaaggtcacagagggagtgatagcttccgcgcagccctggctacggactctgggcatctttccactgccccgcttgcgccacctgttaggcaggatcgtttttcctctggggcaagatcaaaatccaggtcctgcaggaagaaactcctcttaaaaataattaagcctgatcaagatgacaacctcccaaaagcaccgagacttcgtggcagagcccatgggggagaagccagtggggagcctggctgggattggtgaagtcctgggcaagaagctggaggaaaggggttttgacaaggcctatgttgtccttggccagtttctggtgctaaagaaagatgaagacctcttccgggaatggctgaaagacacttgtggcgccaacgccaagcagtcccgggactgcttcggatgccttcgagagtggtgcgacgccttcttgtgatgctctctgggaagctctcaatccccagccctcatccagagtttgcagccgagtagggactcctcccctgtcctctacgaaggaaaagattgctattgtcgtactcacctccgacgtactccggggtcttttgggagttttctcccctaaccatttcaacttttttttggattctcgctcttgcatgcctcccccgtcctttttcccttgccagttccctggtgacagttaccagctttcctgaatggattcccggccccatccctcacccccaccctcactttcaatccgtttgataccatttggctccttttttggcagaacagtcactgtccttgtaaagttttttagatcaataaagtcagtggctttcatga

SEQ ID NO: 21031 - protein, 89 aa, Homo sapiens; identical to SEQ ID NO: 2679

SEQ ID NO: 21032 - DNA, 618 bp, Homo sapiens
ttaagcctgatcaagatgacaacctcccaaaagcaccgagacttcgtggcagagcccatgggggagaagccagtggggagcctggctgggattggcctatgttgtccttggccagtttctggtgctaaagaaagatgaagacctcttccgggaatggctgaaagacacttgtggcgccaacgccaagcagtcccgggactgcttcggatgccttcgagagtggtgcgacgccttcttgtgatgctctctgggaagctctcaatccccagccctcatccagagtttgcagccgagtagggactcctcccctgtcctctacgaaggaaaagattgctattgtcgtactcacctccgacgtactccggggtcttttgggagttttctcccctaaccatttcaacttttttttggattctcgctcttgcatgcctcccccgtcctttttcccttgccagttccctggtgacagttaccagctttcctgaatggattcccggccccatccctcacccccaccctcactttcaatccgtttgataccatttggctccttttttggcagaacagtcactgtccttgtaaagttttttagatcaataaagtcagtggctttcatga

SEQ ID NO: 21033 - protein, 40 aa, Homo sapiens
MTTSQKHRDFVAEPMGEKPVGSLAGIGLCCPWPVSGAKER

SEQ ID NO: 21034 - DNA, 1092 bp, Homo sapiens
ggttgtcaggcagcgctgagcagtaatgtgtcctactcacctgctgtttatccagcaccagacctcttctaagaactttacctgtttcagctcactgaatcctcacaacacccattgtacagaagaggaaactgaggcagcgagtggttaagtgacttctccgaggttacacagctaggaaatggtggcaacagtaagagcccacgaagagctgcggttggtagttcattctggacagccctcccgtgaaccgtccctgtactggcacttgttgctggggactgtcgctgtcctctccctccccgggccaggtgtgtcctggagggcagggaagcgtcttggcacgcgggtgcgcgccgccccctcggcctcctgggctccctgaacctcgcaggaccccggcaacttcgagccccgccccagctccaggccgcgggggcgcatcgcgggcgtcgggcggggcggcccagcgggtaaaagctgcgcggccgcaagctcggcactcacggctctgagggctccgacggcactgacggccatggcgcgttcgaacctcccgctggcgctgggcctggccctggtcgcattctgcctcctggcgctgccacgcgacgcccgggcccggccgcaggagcgcatggtcggagaactccgggacctgtcgcccgacgacccgcaggtgcagaaggcggcgcaggcggccgtggccagctacaacatgggcagcaacagcatctactacttccgagacacgcacatcatcaaggcgcagagccagctggtggccggcatcaagtacttcctgacgatggagatggggagcacagactgccgcaagaccagggtcactggagaccacgtcgacctcaccacttgccccctggcagcaggggcgcagcaggagaagctgcgctgtgactttgaggtccttgtggttccctggcagaactcctctcagctcctaaagcacaactgtgtgcagatgtgataagtccccgagggcgaaggccattgggtttggggccatggtggagggcacttcaggtccgtgggccgtatctgtcacaataaatggccagtgctgcttcttgc

SEQ ID NO: 21035 - protein, 149 aa, Homo sapiens; identical to SEQ ID NO: 2681

SEQ ID NO: 21036 - DNA, 1135 bp, Homo sapiens
ggttgtcaggcagcgctgagcagtaatgtgtcctactcacctgctgtttatccagcaccagacctcttctaagaactttacctgtttcagctcactgaatcctcacaacacccattgtacagaagaggaaactgaggcagcgagtggttaagtgacttctccgaggttacacagctaggaaatggtggcaacagtaagagcccacgaagagctgcggttggtagttcattctggacagccctcccgtgaaccgtccctgtactggcacttgttgctggggactgtcgctgtcctctccctccccgggccaggtgtgtcctggagggcagggaagcgtcttggcacgcgggtgcgcgccgccccctcggcctcctgggctccctgaacctcgcaggaccccggcaacttcgagccccgccccagctccaggccgcgggggcgcatcgcgggcgtcgggcggggcggcccagcgggtaaaagctgcgcggccgcaagctcggcactcacggctctgagggctccgacggcactgacggccatggcgcgttcgaacctcccgctggcgctgggcctggccctggtcgcattctgcctcctggcgctgccacgcgacgcccgggcccggccgcaggagcgcatggtcggagaactccgggacctgtcgcccgacgacccgcaggtgcagaaggcggcgcaggcggccgtggccagctacaacatgggcagcaacagcatctactacttccgagacacgcacatcatcaaggcgcagagccagctggtggccggcatcaagtacttcctgacgatggagatggggagcacagactgccgcaagaccagggtcactggagaccacgtcgacctcaccacttgccccctggcagcaggggcgcagcaggagaagctgcgctgtgactttgaggtccttgtggttccctggcagaactcctctcagctcctaaagcacaactgtgtgcagatgtgataagtccccgagggcgaaggccattgggtttggggccatggtggagggcacttcaggtccgtgggccgtatctgtcacaataaatggccagtgctgcttcttgcattggtttcttccaagtgcttcgcttctgcccccatcccccac

SEQ ID NO: 21037 - protein, 149 aa, Homo sapiens; identical to SEQ ID NO: 2681

SEQ ID NO: 21038 - DNA, 720 bp, Homo sapiens
gactcagtccccactccttctgcccacagcttcctgaccagcgtccaggaagtgacagggaccctgggccagtccttgccgtccatcgcagccatcctcatcctcatgtttacctgcctcttcctcttctccgcggtcctccgggcactgttccgcaaatctgaccccaagcgcttccagaacatcttcaccaccatcttcaccctcttcaccttgctcacgctggatgactggtccctcatctacatggacagccgtgcccaggagggccgcccggatccaagagaagctgctggaagactcactgacggagctcagagctgcagagcccaaagaggtggcgagtgaaggcaccatgctgaagcggctcatcgagaaaaagtttgggaccatgactgagaagtgaggagacaggaagggagcgaggcctggggtctgagggcagcaggagctcctgttccattacctgcagctggtggcaagcgtggagcaggagcagcagaagttccgctcccaggcagccgtcatcgatgagattgtggacaccacatttgaggctggagaagaggacttcaggaattgaccccaggaggacaccagatacagacttcagcccctggcagtctgcccacctgggtgcactgggacgggtccccagatctgctggaatgattgtccgggccctgcagagcaggggccccaacagagtttttaaacccc

SEQ ID NO: 21039 - protein, 80 aa, Homo sapiens
MFTCLFLFSAVLRALFRKSDPKRFQNIFTTIFTLFTLLTLDDWSLIYMDSRAQEGRPDPREAAGRLTDGAQSCRAQRGGE

SEQ ID NO: 21040 - DNA, 2618 bp, Homo sapiens
acgagaatagtcaggcctttctggaagcccagtgccacagtctgcattgagcttggctcaggaaagaagggaaatccaggcggggcctgttgggcccaggtcttgagctcttttggctccagagttcccagcacagtcatggatcaaaactcagtgcctgaaaaggctcagaatgaggcagacaccaataacgcagataggttctttcgctctcactcatcacccccacaccacaggccaggccacagcagagctctccaccattacgagttgcaccatcacggcgtgccccaccaacgtggtgaatctcaccaccctccggagttccaagacttccacgaccaagccttgtcctcccatgtccaccaatctcaccaccacagcgaggcacggaatcacggcagagcccatggccccacaggctttggtctggctccctctcaaggcgccgtcccctcccaccgttcctacggtgaggactaccatgatgagctccaacgtgatggcaggaggcatcatgatgggtcccaatacggtgggttccatcagcagagtgactcccattaccatagggggtctcaccatggcagaccccaatatctcggtgagaatttatcccactattcctctggcgtgccccaccacggtgaggcttcccaccatggtgggtcctacctcccccatggacccaatccctacagtgagtccttccaccacagcgaggcttcccaccttagcgggctccaacacgatgagtcccagcatcaccaagtcccccaccgtggctggccccaccatcaccaagtccaccaccatggcaggtcccgtcatcatgaagcccaccagcatggaaagtctcctcatcacggagagaccatttcccctcattcctctgtggggtcctaccagcgtgggatatctgactatcacagcgagtaccaccaaggtgatcaccaccccagtgagtaccaccatggcgaccatccccaccacacacagcaccactaccaccagacccaccggcaccgagactaccatcagcaccaagaccaccacggcgcgtatcattccagttacctccatggcgactacgtccagagcacttcccaactctctatcccacacacatcccggagcctgattcacgatgcccccggccctgctgcttctcgtacaggagtcttcccctatcacgtagcacacccacggggctcggctcacagcatgactcggtcctccagcacaatccgctcacgtgtcacccagatgtccaaaaaagtccatacccaggatatctccaccaaacattcagaagactggggcaaagaagaagggcaatttcagaaacgcaaaaccggccggctccagcggacccgcaagaagggacactctaccaatctcttccagtggctgtgggaaaagctaaccttcctcattcagggcttccgggaaatgatccggaacctgacccaatccttggcctttgaaactttcatcttcttcgttgtctgcctcaacaccgtcatgctggtggcccagaccttcgctgaagtcgagatccggggcgagtggtacttcatggccttggactccatattcttctgcatctacgtggtggaagccctgctcaagatcatcgccctgggcctctcgtacttctttgacttctggaacaatttggacttcttcattatggccatggccgtgctggacttcttgctgatgcagacccactccttcgccatctaccaccaaagcctcttccggatcctcaaggtcttcaagagcctgcgggccctgagggcaatccgggtcctgcggaggctcagcttcctgaccagcgtccaggaagtgacagggaccctgggccagtccttgccgtccatcgcagccatcctcatcctcatgtttacctgcctcttcctcttctccgcggtcctccgggcactgttccgcaaatctgaccccaagcgcttccagaacatcttcaccaccatcttcaccctcttcaccttgctcacgctggatgactggtccctcatctacatggacagccgtgcccagggcgcctggtacatcattcccatcctcgtaatttacatcatcatccagtacttcatcttcctcaacctggtgattactgtcctggtggatagcttccagacggcgctgttcaaaggccttgagaaagcgaagcaggagagggccgcccggatccaagagaagctgctggaagactcactgacggagctcagagctgcagagcccaaagaggtggcgagtgaaggcaccatgctgaagcggctcatcgagaaaaagtttgggaccatgactgagaagcagcaggagctcctgttccattacctgcagctggtggcaagcgtggagcaggagcagcagaagttccgctcccaggcagccgtcatcgatgagattgtggacaccacatttgaggctggagaagaggacttcaggaattgaccccaggaggacaccagatacagacttcagcccctggcagtctgcccacctgggtgcactgggacgggtccccagatctgctggaatgattgtccgggccctgcagagcaggggccccaacagagtttttaaacccc

SEQ ID NO: 21041 - protein, 780 aa, Homo sapiens
MDQNSVPEKAQNEADTNNADRFFRSHSSPPHHRPGHSRALHHYELHHHGVPHQRGESHHPPEFQDFHDQALSSHVHQSHHHSEARNHGRAHGPTGFGLAPSQGAVPSHRSYGEDYHDELQRDGRRHHDGSQYGGFHQQSDSHYHRGSHHGRPQYLGENLSHYSSGVPHHGEASHHGGSYLPHGPNPYSESFHHSEASHLSGLQHDESQHHQVPHRGWPHHHQVHHHGRSRHHEAHQHGKSPHHGETISPHSSVGSYQRGISDYHSEYHQGDHHPSEYHHGDHPHHTQHHYHQTHRHRDYHQHQDHHGAYHSSYLHGDYVQSTSQLSIPHTSRSLIHDAPGPAASRTGVFPYHVAHPRGSAHSMTRSSSTIRSRVTQMSKKVHTQDISTKHSEDWGKEEGQFQKRKTGRLQRTRKKGHSTNLFQWLWEKLTFLIQGFREMIRNLTQSLAFETFIFFVVCLNTVMLVAQTFAEVEIRGEWYFMALDSIFFCIYVVEALLKIIALGLSYFFDFWNNLDFFIMAMAVLDFLLMQTHSFAIYHQSLFRILKVFKSLRALRAIRVLRRLSFLTSVQEVTGTLGQSLPSIAAILILMFTCLFLFSAVLRALFRKSDPKRFQNIFTTIFTLFTLLTLDDWSLIYMDSRAQGAWYIIPILVIYIIIQYFIFLNLVITVLVDSFQTALFKGLEKAKQERAARIQEKLLEDSLTELRAAEPKEVASEGTMLKRLIEKKFGTMTEKQQELLFHYLQLVASVEQEQQKFRSQAAVIDEIVDTTFEAGEEDFRN

SEQ ID NO: 21042 - DNA, 2116 bp, Homo sapiens
atcccatctcctctgcccactgcaaacccgtctgccttcttctgccaggcttctcgggaacactggccctgctaccagagccgcaggatcccccatgagtgcctgtgaagggagtcctggatagtgaggccctggctggtccaggggtgggtactccgccatgccacccatcctccagcgcctgcagcaggccaccaagatgatgagccgccggaaaatcctgctgctggtgctagggtgcagcaccgtaagccttctcatccaccagggggcgcagctcagctggtaccccaagctgttccccttgagctgccctcctctgcggaactcgccgccgcgccccaagcacatgactgtggccttcctgaagactcacaagacggcaggcacgacggtgcagaacatcctgtttcgctttgccgagcgccacaacctgacggtggccctgccgcacccgagctgcgagcaccagttctgctacccccgcaacttctcggcgcacttcgtgcacccggccacgcggccgccgcacgtgctggccagccacctgcgcttcgaccgtgcggagctggagcgcctcatgccgcccagcaccgtctatgtcaccatcctgcgcgagccggccgccatgttcgagtcgctcttcagctactacaaccagtactgcccggccttccggcgcgtacccaacgcctcgctcgaggccttcctgcgcgcgcccgaggcatactaccgcgctggcgagcacttcgccatgttcgcacacaacacgctggcctacgacctgggcggcgacaatgagcgcagcccgcgcgacgacgccgcctacctggcgggcctcatccgccaggtggaggaggttttctcgctcgtcatgatcgccgagtacttcgacgagtcgctagtgctgctgcggcgcctactggcctgggacctggacgacgtgctctacgccaagctcaacgcgcgcgccgccagctcgcgcctggccgccatccccgcggcgctggcgcgggcggcgcgcacctggaacgccctggacgccggcctctacgaccacttcaacgccaccttctggcgccacgtggcgcgcgcgggccgcgcgtgcgtggagcgcgaggcgcgcgagctgcgcgaggcccgccagcgcctactgcggcgctgcttcggggacgagccactgctgcggcctgccgcgcagatccgcaccaagcagctgcagccgtggcagcccagccgcaaggtggacattatgggctatgacctgcccggcggcggcgccggcccggccaccgaggcctgcctcaagctggccatgcccgaggtccagtactcgaactacctgttgcgcaagcagaagcgccggggcggtgcgcgggctcggcccgagcccgtcctggacaatcccccgcctcggcccatccgagtgctgcctcgcggccctcaaggtccctgagctccgcaggcctccaggagtatgggtcctgccctgccctcccaggagtccagccaggggctgcctccatgtcctgcccccatgagagccctttcttttcaaggggcttgagtccctcgctgaactttggggtacgcctccctatctgagcccccgctcccgatcgtgggctgaaccttgccttcgggcacggcgctgataggctggatccagcgctgggccaccctctccttcccagctggttggtgattttgacaagaggcctgagggctgtccagaactgctcaccctgcctttttctgggggctgagcccccacaacctgtcttttccaagtggataagcccaggccccatggagagaggctcagccctagggaaaggctgctcttgctctccctcccagggcttgaggctccctatacttttctgtcttccaggttctaccctccccacagacctaagctgctcccagtctcccagaaccaagagttcttgggttgggatttttgtttggttggtttttcttttttttaataaaacatctttaaaatgtgcgagttgtatgtcagtcatagaagccggattccccacatttgaggatgaaacggatgcccaggaggagctgtggctggacccatgaggatgggggcctggactca

SEQ ID NO: 21043 - protein, 431 aa, Homo sapiens; identical to SEQ ID NO: 2685

SEQ ID NO: 21044 - DNA, 2238 bp, Homo sapiens
ctagcggacgctgccacctgatcccatccaggcgctgagaggcaagccaccggcactcggcgcgcagggccccgggcaccctcggaccccgtgcggatttcgagacaagggtccagagatagcggcggccgcccccaacccgggccagaggcagagcccaggcgtgcggtgcttctcgggaacactggccctgctaccagagccgcaggatcccccatgagtgcctgtgaagggagtcctggatagtgaggccctggctggtccaggggtgggtactccgccatgccacccatcctccagcgcctgcagcaggccaccaagatgatgagccgccggaaaatcctgctgctggtgctagggtgcagcaccgtaagccttctcatccaccagggggcgcagctcagctggtaccccaagctgttccccttgagctgccctcctctgcggaactcgccgccgcgccccaagcacatgactgtggccttcctgaagactcacaagacggcaggcacgacggtgcagaacatcctgtttcgctttgccgagcgccacaacctgacggtggccctgccgcacccgagctgcgagcaccagttctgctacccccgcaacttctcggcgcacttcgtgcacccggccacgcggccgccgcacgtgctggccagccacctgcgcttcgaccgtgcggagctggagcgcctcatgccgcccagcaccgtctatgtcaccatcctgcgcgagccggccgccatgttcgagtcgctcttcagctactacaaccagtactgcccggccttccggcgcgtacccaacgcctcgctcgaggccttcctgcgcgcgcccgaggcatactaccgcgctggcgagcacttcgccatgttcgcacacaacacgctggcctacgacctgggcggcgacaatgagcgcagcccgcgcgacgacgccgcctacctggcgggcctcatccgccaggtggaggaggttttctcgctcgtcatgatcgccgagtacttcgacgagtcgctagtgctgctgcggcgcctactggcctgggacctggacgacgtgctctacgccaagctcaacgcgcgcgccgccagctcgcgcctggccgccatccccgcggcgctggcgcgggcggcgcgcacctggaacgccctggacgccggcctctacgaccacttcaacgccaccttctggcgccacgtggcgcgcgcgggccgcgcgtgcgtggagcgcgaggcgcgcgagctgcgcgaggcccgccagcgcctactgcggcgctgcttcggggacgagccactgctgcggcctgccgcgcagatccgcaccaagcagctgcagccgtggcagcccagccgcaaggtggacattatgggctatgacctgcccggcggcggcgccggcccggccaccgaggcctgcctcaagctggccatgcccgaggtccagtactcgaactacctgttgcgcaagcagaagcgccggggcggtgcgcgggctcggcccgagcccgtcctggacaatcccccgcctcggcccatccgagtgctgcctcgcggccctcaaggtccctgagctccgcaggcctccaggagtatgggtcctgccctgccctcccaggagtccagccaggggctgcctccatgtcctgcccccatgagagccctttcttttcaaggggcttgagtccctcgctgaactttggggtacgcctccctatctgagcccccgctcccgatcgtgggctgaaccttgccttcgggcacggcgctgataggctggatccagcgctgggccaccctctccttcccagctggttggtgattttgacaagaggcctgagggctgtccagaactgctcaccctgcctttttctgggggctgagcccccacaacctgtcttttccaagtggataagcccaggccccatggagagaggctcagccctagggaaaggctgctcttgctctccctcccagggcttgaggctccctatacttttctgtcttccaggttctaccctccccacagacctaagctgctcccagtctcccagaaccaagagttcttgggttgggatttttgtttggttggtttttcttttttttaataaaacatctttaaaatgtgcgagttgtatgtcagtcatagaagccggattccccacatttgaggatgaaacggatgcccaggaggagctgtggctggacccatgaggatgggggcctggactca

SEQ ID NO: 21045 - protein, 431 aa, Homo sapiens; identical to SEQ ID NO: 2685

SEQ ID NO: 21046 - DNA, 3328 bp, Homo sapiens
atgggagctctaagaaaggaaaggaaagcgggaggaggcttagtggagaagacgacatttgagccggcctggaaggtggaaaagggggctttagagtcgcccttcccccaggtcggcagctggagctcagcccgggcaggcctgctgctctcccggcttggatcccctttcagcccattcatccgggcctgggccgggggtgaggcgcagaaaacactccctcggggaagtgccagccctcctcgcagccccgccctccggcccgccgccggccttcggggccgtagcggcgcgcagggcccgcagagaccgagacctgcgcactacaactcccaggaggcctcgcgaccagaccgccgaggggccactagagaaagagaggacgtggcatacggcgccaccggaagttccggcaagtgggccctgaggctggccccagcttccgggttggtcgcgcgccttcctgcggctaagatggcgacggagcatcccgagcctcccaaagcagaattgcagctgccgccgccgccacctccaggccactatggcgcctgggctgcccaggagcttcaggccaagttggcagagatcggagctccgatccagggtaatcgcgaggagctggtggagcggctgcagagctacacccgccagactggcatcgtgctgaatcggccggttttgagaggggaagatggggacaaagccgctccacctcccatgtcggcacagctccctggaattcccatgccaccaccacctttgggactcccccctctgcagcctcctccgccacccccaccacctccaccaggccttggccttggctttcctatggcccacccaccaaatttggggcccccgcctcctctccgtgtgggtgagccagtggcactgtcagaggaggagcggctgaagttggctcagcagcaggcggcattgctgatgcagcaggaggagcgtgccaagcagcagggagatcattcgctgaaggaacatgagctcttggagcagcagaagcgggcagctgtgttactggagcaggaacgacagcaggagattgccaagatgggcaccccagtccctcggcccccacaagacatgggccagattggtgtgcgcactcctctgggtcctcgagtagctgctccagtgggcccagtgggccccactcctacagttttgcccatgggagcccctgttccccggcctcgtggtcccccaccgccccctggagatgagaacagagagatggatgacccctctgtgggccccaagatcccccaggctttggagaagatcctgcagctgaaggagagccgccaggaagagatgaattctcagcaggaggaagaggaaatggaaacagatgctcgctcgtccctgggccagtcagcgtcagagactgaggaggacacagtgtccgtatctaaaaaggagaaaaaccggaagcgtaggaaccgaaagaagaagaaaaagccccagcgggtgcgaggggtgtcctctgagagctctggggaccgggagaaagactcaacccggtcccgtggctctgattccccagcagctgatgttgagattgagtatgtgactgaagaacctgaaatttacgagcccaactttatcttctttaagaggatctttgaggcttttaagctcactgatgatgtgaagaaggagaaagagaaggagccagagaaacttgacaaactggagaactctgcagcccccaagaagaagggatttgaagaggagcacaaggacagtgatgatgacagcagtgatgacgagcaggaaaagaagccagaagcccccaagctgtccaagaagaagttgcgccgaatgaaccgcttcactgtggctgaactcaagcagctggtggctcggcccgatgtcgtggagatgcacgatgtgacagcgcaggaccctaagctcttggttcacctcaaggccactcggaactctgtgcctgtgccacgccactggtgttttaagcgcaaatacctgcagggcaaacggggcattgagaagccccccttcgagctgccagacttcatcaaacgcacaggcatccaggagatgcgagaggccctgcaggagaaggaagaacagaagaccatgaagtcaaaaatgcgagagaaagttcggcctaagatgggcaaaattgacatcgactaccagaaactgcatgatgccttcttcaagtggcagaccaagccaaagctgaccatccatggggacctgtactatgaggggaaggagttcgagacacgactgaaggagaagaagccaggagatctgtctgatgagctaaggatttccttggggatgccagtaggaccaaatgcccacaaggtccctcccccatggctgattgccatgcagcgatatggaccacccccatcgtatcccaacctgaaaatccctgggctgaactcgcccatccctgagagctgttcctttgggtaccatgctggtggctggggcaaacctccagtggatgagactgggaaaccgctctatggggacgtgtttggaaccaatgctgctgaatttcagaccaagactgaggaagaagagattgatcggaccccttggggggaactggaaccatctgatgaagaatcctcagaagaagaggaagaggaagaaagtgatgaagacaaaccagatgagacaggctttattacccctgcagacagtggccttatcactcctggaggcttttcatcagtgcctgctggaatggagacccctgaactcattgagctgaggaagaagaagattgaggaggcgatggacggaagtgagacacctcagctcttcactgtgttgccagagaagagaacagccactgttggaggggccatgatgggatcaacccacatttatgacatgtccacggttatgagccggaagggcccggctcctgagctgcaaggtgtggaagtggcgctggcgcctgaagagttggagctggatcctatggccatgacccagaagtatgaggagcatgtgcgggagcagcaggctcaagtagagaaggaggacttcagtgacatggtggctgagcacgctgccaaacagaagcaaaaaaaacggaaagctcagccccaggacagccgtgggggcagcaagaaatataaggagttcaagttttaggtcccctcacactagccctttttttggccctacgtctggatgcctgggcttcacacaagaaccacctctcccgcagttcccaaggacttgtcatttcatgttcttattttagacctgttttgtaaataaagctgtttcccaaggaaagagatgaatatttaacact

SEQ ID NO: 21047 - protein, 1053 aa, Homo sapiens
MGALRKERKAGGGLVEKTTFEPAWKVEKGALESPFPQVGSWSSARAGLLLSRLGSPFSPFIRAWAGGEAQKTLPRGSASPPRSPALRPAAGLRGRSGAQGPQRPRPAHYNSQEASRPDRRGATREREDVAYGATGSSGKWALRLAPASGLVARLPAAKMATEHPEPPKAELQLPPPPPPGHYGAWAAQELQAKLAEIGAPIQGNREELVERLQSYTRQTGIVLNRPVLRGEDGDKAAPPPMSAQLPGIPMPPPPLGLPPLQPPPPPPPPPPGLGLGFPMAHPPNLGPPPPLRVGEPVALSEEERLKLAQQQAALLMQQEERAKQQGDHSLKEHELLEQQKRAAVLLEQERQQEIAKMGTPVPRPPQDMGQIGVRTPLGPRVAAPVGPVGPTPTVLPMGAPVPRPRGPPPPPGDENREMDDPSVGPKIPQALEKILQLKESRQEEMNSQQEEEEMETDARSSLGQSASETEEDTVSVSKKEKNRKRRNRKKKKKPQRVRGVSSESSGDREKDSTRSRGSDSPAADVEIEYVTEEPEIYEPNFIFFKRIFEAFKLTDDVKKEKEKEPEKLDKLENSAAPKKKGFEEEHKDSDDDSSDDEQEKKPEAPKLSKKKLRRMNRFTVAELKQLVARPDVVEMHDVTAQDPKLLVHLKATRNSVPVPRHWCFKRKYLQGKRGIEKPPFELPDFIKRTGIQEMREALQEKEEQKTMKSKMREKVRPKMGKIDIDYQKLHDAFFKWQTKPKLTIHGDLYYEGKEFETRLKEKKPGDLSDELRISLGMPVGPNAHKVPPPWLIAMQRYGPPPSYPNLKIPGLNSPIPESCSFGYHAGGWGKPPVDETGKPLYGDVFGTNAAEFQTKTEEEEIDRTPWGELEPSDEESSEEEEEEESDEDKPDETGFITPADSGLITPGGFSSVPAGMETPELIELRKKKIEEAMDGSETPQLFTVLPEKRTATVGGAMMGSTHIYDMSTVMSRKGPAPELQGVEVALAPEELELDPMAMTQKYEEHVREQQAQVEKEDFSDMVAEHAAKQKQKKRKAQPQDSRGGSKKYKEFKF

SEQ ID NO: 21048 - DNA, 3568 bp, Homo sapiens
atgggagctctaagaaaggaaaggaaagcgggaggaggcttagtggagaagacgacatttgagccggcctggaaggtggaaaagggggctttagagtcgcccttcccccaggtcggcagctggagctcagcccgggcaggcctgctgctctcccggcttggatcccctttcagcccattcatccgggcctgggccgggggtgaggcgcagaaaacactccctcggggaagtgccagccctcctcgcagccccgccctccggcccgccgccggccttcggggccgtagcggcgcgcagggcccgcagagaccgagacctgcgcactacaactcccaggaggcctcgcgaccagaccgccgaggggccactagagaaagagaggacgtggcatacggcgccaccggaagttccggcaagtgggccctgaggctggccccagcttccgggttggtcgcgcgccttcctgcggctaagatggcgacggagcatcccgagcctcccaaagcagaattgcagctgccgccgccgccacctccaggccactatggcgcctgggctgcccaggagcttcaggccaagttggcagagatcggagctccgatccagggtaatcgcgaggagctggtggagcggctgcagagctacacccgccagactggcatcgtgctgaatcggccggttttgagaggggaagatggggacaaagccgctccacctcccatgtcggcacagctccctggaattcccatgccaccaccacctttgggactcccccctctgcagcctcctccgccacccccaccacctccaccaggccttggccttggctttcctatggcccacccaccaaatttggggcccccgcctcctctccgtgtgggtgagccagtggcactgtcagaggaggagcggctgaagttggctcagcagcaggcggcattgctgatgcagcaggaggagcgtgccaagcagcagggagatcattcgctgaaggaacatgagctcttggagcagcagaagcgggcagctgtgttactggagcaggaacgacagcaggagattgccaagatgggcaccccagtccctcggcccccacaagacatgggccagattggtgtgcgcactcctctgggtcctcgagtagctgctccagtgggcccagtgggccccactcctacagttttgcccatgggagcccctgttccccggcctcgtggtcccccaccgccccctggagatgagaacagagagatggatgacccctctgtgggccccaagatcccccaggctttggagaagatcctgcagctgaaggagagccgccaggaagagatgaattctcagcaggaggaagaggaaatggaaacagatgctcgctcgtccctgggccagtcagcgtcagagactgaggaggacacagtgtccgtatctaaaaaggagaaaaaccggaagcgtaggaaccgaaagaagaagaaaaagccccagcgggtgcgaggggtgtcctctgagagctctggggaccgggagaaagactcaacccggtcccgtggctctgattccccagcagctgatgttgagattgagtatgtgactgaagaacctgaaatttacgagcccaactttatcttctttaagaggatctttgaggcttttaagctcactgatgatgtgaagaaggagaaagagaaggagccagagaaacttgacaaactggagaactctgcagcccccaagaagaagggatttgaagaggagcacaaggacagtgatgatgacagcagtgatgacgagcaggaaaagaagccagaagcccccaagctgtccaagaagaagttgcgccgaatgaaccgcttcactgtggctgaactcaagcagctggtggctcggcccgatgtcgtggagatgcacgatgtgacagcgcaggaccctaagctcttggttcacctcaaggccactcggaactctgtgcctgtgccacgccactggtgttttaagcgcaaatacctgcagggcaaacggggcattgagaagccccccttcgagctgccagacttcatcaaacgcacaggcatccaggagatgcgagaggccctgcaggagaaggaagaacagaagaccatgaagtcaaaaatgcgagagaaagttcggcctaagatgggcaaaattgacatcgactaccagaaactgcatgatgccttcttcaagtggcagaccaagccaaagctgaccatccatggggacctgtactatgaggggaaggagttcgagacacgactgaaggagaagaagccaggagatctgtctgatgagctaaggatttccttggggatgccagtaggaccaaatgcccacaaggtccctcccccatggctgattgccatgcagcgatatggaccacccccatcgtatcccaacctgaaaatccctgggctgaactcgcccatccctgagagctgttcctttgggtaccatgctggtggctggggcaaacctccagtggatgagactgggaaaccgctctatggggacgtgtttggaaccaatgctgctgaatttcagaccaagactgaggaagaagagattgatcggaccccttggggggaactggaaccatctgatgaagaatcctcagaagaagaggaagaggaagaaagtgatgaagacaaaccagatgagacaggctttattacccctgcagacagtggccttatcactcctggaggcttttcatcagtgcctgctggaatggagacccctgaactcattgagctgaggaagaagaagattgaggaggcgatggacggaagtgagacacctcagctcttcactgtgttgccagagaagagaacagccactgttggaggggccatgatgggatcaacccacatttatgacatgtccacggttatgagccggaagggcccggctcctgagctgcaaggtgtggaagtggcgctggcgcctgaagagttggagctggatcctatggccatgacccagaagtatgaggagcatgtgcgggagcagcaggctcaagtagagaaggaggacttcagtgacatggtggctgagcacgctgccaaacagaagcaaaaaaaacggaaagctcagccccaggacagccgtgggggcagcaagaaatataaggagttcaagttttaggtcccctcacactagccctttttttggccctacgtctggatgcctgggcttcacacaagaaccacctctcccgcagttcccaaggacttgtcatttcatgttcttattttagacctgttttgtaaataaagctgtttcccaaggaaagagatgaatatttaacactcctgagcctccctcatctccttttagccccttcttgcaaaaggactaaaatagtctctttctacaatcactgggctgccccagtaaccacgaacataaactgggattagacggcgcatttgactggtggtgacgccaaccccaggctgaaatctgtgtttcaccactgccctgctttgtaggaaggcttgggggaagtacctctaggtctggtttgaccttactactttgtccttgggga

SEQ ID NO: 21049 - protein, 1053 aa, Homo sapiens; identical to SEQ ID NO: 21047

SEQ ID NO: 21050 - DNA, 2613 bp, Homo sapiens
gaggctggccccagcttccgggttggtcgcgcgccttcctgcggctaagatggcgacggagcatcccgagcctcccaaagcagaattgcagctgccgccgccgccacctccaggccactatggcgcctgggctgcccaggagcttcaggccaagttggcagagatcggagctccgatccagggtaatcgcgaggagctggtggagcggctgcagagctacacccgccagactggcatcgtgctgaatcggccggttttgagaggggaagatggggacaaagccgctccacctcccatgtcggcacagctccctggaattcccatgccaccaccacctttgggactcccccctctgcagcctcctccgccacccccaccacctccaccaggccttggccttggctttcctatggcccacccaccaaatttggggcccccgcctcctctccgtgtgggtgagccagtggcactgtcagaggaggagcggctgaagttggctcagcagcaggcggcattgctgatgcagcaggaggagcgtgccaagcagcagggagatcattcgctgaaggaacatgagctcttggagcagcagaagcgggcagctgtgttactggagcaggaacgacagcaggaaggaagaggaaatggaaacagatgctcgctcgtccctgggccagtcagcgtcagagactgaggaggacacagtgtccgtatctaaaaaggagaaaaaccggaagcgtaggaaccgaaagaagaagaaaaagccccagcgggtgcgaggggtgtcctctgagagctctggggaccgggagaaagactcaacccggtcccgtggctctgattccccagcagctgatgttgagattgagtatgtgactgaagaacctgaaatttacgagcccaactttatcttctttaagaggatctttgaggcttttaagctcactgatgatgtgaagaaggagaaagagaaggagccagagaaacttgacaaactggagaactctgcagcccccaagaagaagggatttgaagaggagcacaaggacagtgatgatgacagcagtgatgacgagcaggaaaagaagccagaagcccccaagctgtccaagaagaagttgcgccgaatgaaccgcttcactgtggctgaactcaagcagctggtggctcggcccgatgtcgtggagatgcacgatgtgacagcgcaggaccctaagctcttggttcacctcaaggccactcggaactctgtgcctgtgccacgccactggtgttttaagcgcaaatacctgcagggcaaacggggcattgagaagccccccttcgagctgccagacttcatcaaacgcacaggcatccaggagatgcgagaggccctgcaggagaaggaagaacagaagaccatgaagtcaaaaatgcgagagaaagttcggcctaagatgggcaaaattgacatcgactaccagaaactgcatgatgccttcttcaagtggcagaccaagccaaagctgaccatccatggggacctgtactatgaggggaaggagttcgagacacgactgaaggagaagaagccaggagatctgtctgatgagctaaggatttccttggggatgccagtaggaccaaatgcccacaaggtccctcccccatggctgattgccatgcagcgatatggaccacccccatcgtatcccaacctgaaaatccctgggctgaactcgcccatccctgagagctgttcctttgggtaccatgctggtggctggggcaaacctccagtggatgagactgggaaaccgctctatggggacgtgtttggaaccaatgctgctgaatttcagaccaagactgaggaagaagagattgatcggaccccttggggggaactggaaccatctgatgaagaatcctcagaagaagaggaagaggaagaaagtgatgaagacaaaccagatgagacaggctttattacccctgcagacagtggccttatcactcctggaggcttttcatcagtgcctgctggaatggagacccctgaactcattgagctgaggaagaagaagattgaggaggcgatggacggaagtgagacacctcagctcttcactgtgttgccagagaagagaacagccactgttggaggggccatgatgggatcaacccacatttatgacatgtccacggttatgagccggaagggcccggctcctgagctgcaaggtgtggaagtggcgctggcgcctgaagagttggagctggatcctatggccatgacccagaagtatgaggagcatgtgcgggagcagcaggctcaagtagagaaggaggacttcagtgacatggtggctgagcacgctgccaaacagaagcaaaaaaaacggaaagctcagccccaggacagccgtgggggcagcaagaaatataaggagttcaagttttaggtcccctcacactagccctttttttggccctacgtctggatgcctgggcttcacacaagaaccacctctcccgcagttcccaaggacttgtcatttcatgttcttattttagacctgttttgtaaataaagctgtttcccaaggaaagagatgaatatttaacact

SEQ ID NO: 21051 - protein, 624 aa, Homo sapiens
MSSWSSRSGQLCYWSRNDSRKEEEMETDARSSLGQSASETEEDTVSVSKKEKNRKRRNRKKKKKPQRVRGVSSESSGDREKDSTRSRGSDSPAADVEIEYVTEEPEIYEPNFIFFKRIFEAFKLTDDVKKEKEKEPEKLDKLENSAAPKKKGFEEEHKDSDDDSSDDEQEKKPEAPKLSKKKLRRMNRFTVAELKQLVARPDVVEMHDVTAQDPKLLVHLKATRNSVPVPRHWCFKRKYLQGKRGIEKPPFELPDFIKRTGIQEMREALQEKEEQKTMKSKMREKVRPKMGKIDIDYQKLHDAFFKWQTKPKLTIHGDLYYEGKEFETRLKEKKPGDLSDELRISLGMPVGPNAHKVPPPWLIAMQRYGPPPSYPNLKIPGLNSPIPESCSFGYHAGGWGKPPVDETGKPLYGDVFGTNAAEFQTKTEEEEIDRTPWGELEPSDEESSEEEEEEESDEDKPDETGFITPADSGLITPGGFSSVPAGMETPELIELRKKKIEEAMDGSETPQLFTVLPEKRTATVGGAMMGSTHIYDMSTVMSRKGPAPELQGVEVALAPEELELDPMAMTQKYEEHVREQQAQVEKEDFSDMVAEHAAKQKQKKRKAQPQDSRGGSKKYKEFKF

SEQ ID NO: 21052 - DNA, 2853 bp, Homo sapiens
gaggctggccccagcttccgggttggtcgcgcgccttcctgcggctaagatggcgacggagcatcccgagcctcccaaagcagaattgcagctgccgccgccgccacctccaggccactatggcgcctgggctgcccaggagcttcaggccaagttggcagagatcggagctccgatccagggtaatcgcgaggagctggtggagcggctgcagagctacacccgccagactggcatcgtgctgaatcggccggttttgagaggggaagatggggacaaagccgctccacctcccatgtcggcacagctccctggaattcccatgccaccaccacctttgggactcccccctctgcagcctcctccgccacccccaccacctccaccaggccttggccttggctttcctatggcccacccaccaaatttggggcccccgcctcctctccgtgtgggtgagccagtggcactgtcagaggaggagcggctgaagttggctcagcagcaggcggcattgctgatgcagcaggaggagcgtgccaagcagcagggagatcattcgctgaaggaacatgagctcttggagcagcagaagcgggcagctgtgttactggagcaggaacgacagcaggaaggaagaggaaatggaaacagatgctcgctcgtccctgggccagtcagcgtcagagactgaggaggacacagtgtccgtatctaaaaaggagaaaaaccggaagcgtaggaaccgaaagaagaagaaaaagccccagcgggtgcgaggggtgtcctctgagagctctggggaccgggagaaagactcaacccggtcccgtggctctgattccccagcagctgatgttgagattgagtatgtgactgaagaacctgaaatttacgagcccaactttatcttctttaagaggatctttgaggcttttaagctcactgatgatgtgaagaaggagaaagagaaggagccagagaaacttgacaaactggagaactctgcagcccccaagaagaagggatttgaagaggagcacaaggacagtgatgatgacagcagtgatgacgagcaggaaaagaagccagaagcccccaagctgtccaagaagaagttgcgccgaatgaaccgcttcactgtggctgaactcaagcagctggtggctcggcccgatgtcgtggagatgcacgatgtgacagcgcaggaccctaagctcttggttcacctcaaggccactcggaactctgtgcctgtgccacgccactggtgttttaagcgcaaatacctgcagggcaaacggggcattgagaagccccccttcgagctgccagacttcatcaaacgcacaggcatccaggagatgcgagaggccctgcaggagaaggaagaacagaagaccatgaagtcaaaaatgcgagagaaagttcggcctaagatgggcaaaattgacatcgactaccagaaactgcatgatgccttcttcaagtggcagaccaagccaaagctgaccatccatggggacctgtactatgaggggaaggagttcgagacacgactgaaggagaagaagccaggagatctgtctgatgagctaaggatttccttggggatgccagtaggaccaaatgcccacaaggtccctcccccatggctgattgccatgcagcgatatggaccacccccatcgtatcccaacctgaaaatccctgggctgaactcgcccatccctgagagctgttcctttgggtaccatgctggtggctggggcaaacctccagtggatgagactgggaaaccgctctatggggacgtgtttggaaccaatgctgctgaatttcagaccaagactgaggaagaagagattgatcggaccccttggggggaactggaaccatctgatgaagaatcctcagaagaagaggaagaggaagaaagtgatgaagacaaaccagatgagacaggctttattacccctgcagacagtggccttatcactcctggaggcttttcatcagtgcctgctggaatggagacccctgaactcattgagctgaggaagaagaagattgaggaggcgatggacggaagtgagacacctcagctcttcactgtgttgccagagaagagaacagccactgttggaggggccatgatgggatcaacccacatttatgacatgtccacggttatgagccggaagggcccggctcctgagctgcaaggtgtggaagtggcgctggcgcctgaagagttggagctggatcctatggccatgacccagaagtatgaggagcatgtgcgggagcagcaggctcaagtagagaaggaggacttcagtgacatggtggctgagcacgctgccaaacagaagcaaaaaaaacggaaagctcagccccaggacagccgtgggggcagcaagaaatataaggagttcaagttttaggtcccctcacactagccctttttttggccctacgtctggatgcctgggcttcacacaagaaccacctctcccgcagttcccaaggacttgtcatttcatgttcttattttagacctgttttgtaaataaagctgtttcccaaggaaagagatgaatatttaacactcctgagcctccctcatctccttttagccccttcttgcaaaaggactaaaatagtctctttctacaatcactgggctgccccagtaaccacgaacataaactgggattagacggcgcatttgactggtggtgacgccaaccccaggctgaaatctgtgtttcaccactgccctgctttgtaggaaggcttgggggaagtacctctaggtctggtttgaccttactactttgtccttgggga

SEQ ID NO: 21053 - protein, 624 aa, Homo sapiens; identical to SEQ ID NO: 21051

SEQ ID NO: 21054 - DNA, 661 bp, Homo sapiens
agcttccgggttggtcgcgcgccttcctgcggctaagatggcgacggagcatcccgagcctcccaaagcagaattgcagctgccgccgccgccacctccaggccactatggcgcctgggctgcccaggagcttcaggccaagttggcagagatcggagctccgatccagggtaatcgcgaggagctggtggagcggctgcagagctacacccgccagactggcatcgtgctgaatcggccggttttgagaggggaagatggggacaaagccgctccacctcccatgtcggcacagctccctggaattcccatgccaccaccacctttgggactcccccctctgcagcctcctccgccacccccaccacctccaccaggccttggccttggctttcctatggcccacccaccaaatttggggcccccgcctcctctccgtgtgggtgagccagtggcactgtcagaggaggagcggctgaagttggctcagcagcaggcggcattgctgatgcagcaggaggagcgtgccaagcaggtagggcaggtggcagccctggccttggactcattaggtccctgaaggggcagtggagccttagagaaagctgggtcctagaactaaggcttctgggaaggtcgggactaaagattggaacatggg

SEQ ID NO: 21055 - protein, 180 aa, Homo sapiens [sequence omitted]

SEQ ID NO: 21056 - DNA, 1440 bp, Homo sapiens
gcgccttcctgcggctaagatggcgacggagcatcccgagcctcccaaagcagaattgcagctgccgccgccgccacctccaggccactatggcgcctgggctgcccaggagcttcaggccaagttggcagagatcggagctccgatccagggtaatcgcgaggagctggtggagcggctgcagagctacacccgccaggtaggtgttggcggcgggacgtcaggataggccgagcttctccaggagaccttatataccccatcacggctcggtcttcattctttctttatctcggcacagcaaggcggaggcttgccctttttagcttgttcttgcctttgccagcttagttgtaatttcttgtatccatcttggtcctcttcagtgcccagccagagcgctggcagacaggcactgggtacgttttgttgaatgaattgggagcgaacgtcgtttagtgaaacagctagttttggactgacctagagtcctttctcttttgcagactggcatcgtgctgaatcggccggttttgagaggggaagatggggacaaagccgctccacctcccatgtcggcacaggtagggagattcttctgttttttaagattccatctgctgatccttttgtagttcatgagcatgatgattgggtgttcacgtgcatgtgtgagatgtgacacccttgcacattactcgcctgacctgagtggggaaaaaaaaagattccatatgttcagggtagcccttcctctcacttgcagttgttgggcagggaggtactgccatgacagaattgtgagctcttcagttctctctttgatgctgacacttgcctccttttccactgtctgcttctccaaaagcagcttgtggccgggtgcagtggcgcatgcctgtaatcccaccacttcgggatgcttagatgggacgatcgcttgaagccaggagttcgagaccagcctgggcaacatagtgagactctgttactacaaaaaattttaaaaattagctgggcacggtggcacgcgcctataaagtccctataaagaggctcaaggattgctggagccctggggttggaggctgcagtgagctctggttgcgccactgtactccatgtactccatcctgggtgacagaatgagactttgcttctttaaaaaaaaaaggggggaggtgatgggggaggggctgggagagtgtcagaaaaaatagctaatgcatgccaggcttaatacttaggcagtgggttgataggtgcagcaaaccaccatagcacacatttacctatgtaacaaacctgcgcatactgcacatgtacccgaaaacttacaataaaataaaattaaaccaaaaaataggaaaaaaaaaaaagaggcagggcgtggtggctcatgtctgtaatcccagcactttgagaggccaaggcaggtgg

SEQ ID NO: 21057 - protein, 69 aa, Homo sapiens
MATEHPEPPKAELQLPPPPPPGHYGAWAAQELQAKLAEIGAPIQGNREELVERLQSYTRQVGVGGGTSG

SEQ ID NO: 21058 - DNA, 329 bp, Homo sapiens
agcaggaggagcgtgccaagcagcagggagatcattcgctgaaggaacatgagctcttggagcagcagaagcgggtaatacccctccccctaacctttgacctcgtggtccagtcagttggctgtcatttatagtgcttagagtgcaccattcaagttttccctggaggctactttgttctcaactaagttctagtatcttccaaagctttcaatttttcttgaagttcaggaattgacaaactatgacctgtggcctgcatgtgtatggcctatgagctaaaaataactttaaaattttttaagggttataagaaaacccaaaccaaa

SEQ ID NO: 21059 - protein, 43 aa, Homo sapiens
QEERAKQQGDHSLKEHELLEQQKRVIPLPLTFDLVVQSVGCHL

SEQ ID NO: 21060 - DNA, 806 bp, Homo sapiens
cattgagctgaggaagaagaagattgaggaggcgatggacggaagtgagacacctcagctcttcactgtgttgccagagaagagaacagccactgttggaggggccatgatgggatcaacccacatttatgacatgtccacggttatgagccggaagggcccggctcctgagctgcaaggtgtggaagtggcgctggcgcctgaagagttggagctggatcctatggccatgacccagaagtatgaggagcatgtgcgggagcagcaggctcaagtagagaaggaggacttcagtgacatggtggctgagcacgctgccaaacagaagcaaaaaaaacggaaagctcagccccaggacagccgtgggggcagcaagaaatataaggagttcaagttttaggtcccctcacactagccctttttttggccctacgtctggatgcctgggcttcacacaagaaccacctctcccgcagttcccaaggacttgtcatttcatgttcttattttagacctgttttgtaaataaagctgtttcccaaggaaagagatgaatatttaacactcctgagcctccctcatctccttttagccccttcttgcaaaaggactaaaatagtctctttctacaatcactgggctgccccagtaaccacgaacataaactgggattagacggcgcatttgactggtggtgacgccaaccccaggctgaaatctgtgtttcaccactgccctgctttgtaggaaggcttgggggaagtacctctaggtctggtttgaccttactactttgtccttgggga

SEQ ID NO: 21061 - protein, 121 aa, Homo sapiens
MDGSETPQLFTVLPEKRTATVGGAMMGSTHIYDMSTVMSRKGPAPELQGVEVALAPEELELDPMAMTQKYEEHVREQQAQVEKEDFSDMVAEHAAKQKQKKRKAQPQDSRGGSKKYKEFKF

SEQ ID NO: 21062 - DNA, 4164 bp, Homo sapiens
tatcatttttcctctgcctgaagggcttcctttaacatttcttaagttagggggcgtggtggcttaagcctgtaatctcagtactctcagtactttgggagaaggctgaggtggtaggattgctagattccaggaatttgagaccagcctgggcaacatagtgagaccccatttctacaaaatattaaaaaaacatttcttgtattgtgggtctgctggttttgaatttgttctgcttgagtagtcttaaaaattctttatttggccttcatttttgaaagatctttgccaggtttaggattctaggttgacaatcttttttctttcaacacttttttttttcttctttgagatggaatcttgctatgtcgcccaggctggagtgtagtggtgtgatcttggctcactataacctccacctcctgggttcaagcgattctcctgtttcagcctcccgagtagctgagattacatgtgcataccatcacacccagctaatttttatatttttagtagggatggggttttgccatgttggccaggctggtctcgagctcctggcttcaagtgatccgcctgccttggcctcccagcttgttgggattacatgtgtgagtgaccgcatcagccttctttcagtacttttaagatgttgctccagtgtcttctttcttgcattgtttctagtgagaaaactgctgtcattcttacctttgttcctgtgtacataatgtgtcatttttatttggctgtttttaagattttatcactagttctaacaatttgactacaatgtgccttggtgtagtttctgaatgtttctttgcttggggttttttaagcatcttagatctgggtttttagtttttattaatttggggaaaattttgtcatgatttctgcagatattttctctgttcccttctctttcctttgggaactcaaattattcctctattaatgaaataataaatgaaaaaataaatgaagagctcactgatgctcttcatttttaaagaaattcttctctctttgtatttcactttagaaaatttctattgctatatgttcaagtttactattattttcttctgtaatttctgatctaacagtaatcccatacaatataattctcctttctagaagtttgatttcgggtcttttaaatctattctttctctcttaactttttgaacatgtggaatgcagttataacaatattttatttttatgttattttattttattttatgacggagtcttgccctgttgcctaggctggagtgcagtggcgtgatctcggcttactgcaacctctgccacccaggttccagcaattcttgtgccgcagcctcccaagtagctgggactataggcgtgcgccaccccacccagctaatttttttgtatttttagtagagacagggttttaccatgttgaccaggctgttcttgaactcctaacctcaggtgatctgcctgcctcggcctcccaaagtgctgggattacaggcatgagccaccacacctggctataacaacattttaatgtattgtctgctaactctaacatctgtgccatttctgggttgactgccattagttgattcattttcctcattatggattgtattttcctactcttttgcacgcctggtaatttttttttcttttcctttctttttttgagagaggttctcactgtgttgcccaggctggtcttgaacttctgggctcaagcaatcatcctgcctcagcttcccaaagtgctgggattacaggtgtgagccatcaggcctgtccagtgcctggtaattttttattgaatgctaggctttgtgaaatttaccttgttgggtccaagatatttttgtattcctgtacattttcttcagctcattcgggaatatagttatatggagatagtttgatcctttcaggtcttgttttggggttcttgaggcaggactgaagcagtcctccccattgtgaggcacaagtacctgtgtactctacccaccaccctgtgaatcaggaggtttttccggctggctagtgggagttactctattcccagttctgagtgagcagcagttgctgttatgaatccttttgggtgcttctttccctgtccttggtaggcatgtgctgcttagtactcccctgcatacttgaggaccttctgtaggtctcgagttctctctctgctcttttctccagtactctatcctgtgaactctagctgccttgatctccctggactttcagtttcatcctcccaactcacggagtcctcagggctctccatgagtctcccctctgttctgtggcctgcaaactctcaggtgtggtatgctggggcagttgaagggctcatcacatttgtttcctgtctcgcaggaatcactgtgctttgttgccccatgtgtagtgtcttgaaaaccactgtttcatatattttgcccattttttttggttgtttcaggcaggagggtgtatctggttcctcttgctccttgtcaggaagcagaagtctcaagctttgcatattcaaggaagaaaaataaagaagggtactgtggacagagtatagtgaggagggcttgggtaagggaccaggctatgaaccctttaggtcatggtaaggagtttggattttattcagataatgatcagaagcctcagagggttttgagcaaaggtctgacaggacccgacatccgttttaaggtattttctctggctcctgtgtggacaatagattgtcacctcttccagcgggagaggtggagatgatgggcatagtctggggtgatagtggtagatttgctcttgttcctagtgtaatccttgaaattagtggtgaaactggctgtggatggctcttgcgttggaaggcctggaagtgtgaattacatacatgagaactccaggcatgacattcttcgggtgggaactgttgtcgcctgctctatcttgccagcttctctgtaccaaagttcttttggaaactttgagcctctctgaccttttgacccttatgtgcatgtgggagtcctggtctgtgatcccttgacttgattcagggggccccttagctccatctgtgttccctggagtcagcactgtgccacccccccgcccaattcttttctgtcatgggcagaactgcagaggctgcatccttggggagctcagaagctctccaaggcgctgagtggaggtgccacctgtatcttttgtttccgcttctggagacccttttgtcccttgctttttgggcctgatcccattgtccttcgcagaagtgagacacctcagctcttcactgtgttgccagagaagagaacagccactgttggaggggccatgatgggatcaacccacatttatgacatgtccacggttatgagccggaagggcccggctcctgagctgcaaggtgtggaagtggcgctggcgcctgaagagttggagctggatcctatggccatgacccagaagtatgaggagcatgtgcgggagcagcaggctcaagtagagaaggaggacttcagtgacatggtggctgagcacgctgccaaacagaaggtaggcgcttccaggggcgctgggctgggtgagagccagggaccctggcctgccgttttcagtggcatggtgccctctagtggtgagagtgagggtggcctctgcttgctgctctgtgcttccttagatttggaagtcttagaaatcctccagtgggctgccctctttaaggacgatgagggggaggaactcagccaagtctgagagggagctcgaagagaattcagattcagcgcctttcccacagacttctatgtctatgtcaggctgcccacccttgttttgggggtccgggggtggttcaacctgtcttaacctgtgtctctttctccctatacagcaaaaaaaacggaaagctcagccccaggacagccgtgggggcagcaagaaatataaggagttcaagttttaggtcccctcacactagccctttttttggccctacgtctggatgcctgggcttcacacaagaaccacctctcccgcagttcccaaggacttgtcatttcatgttcttattttagacctgttttgtaaataaagctgtttcccaaggaaagagatgaatattta

SEQ ID NO: 21063 - protein, 141 aa, Homo sapiens
MMGSTHIYDMSTVMSRKGPAPELQGVEVALAPEELELDPMAMTQKYEEHVREQQAQVEKEDFSDMVAEHAAKQKVGASRGAGLGESQGPWPAVFSGMVPSSGESEGGLCLLLCASLDLEVLEILQWAALFKDDEGEELSQV

SEQ ID NO: 21064 - DNA, 4409 bp, Homo sapiens
tatcatttttcctctgcctgaagggcttcctttaacatttcttaagttagggggcgtggtggcttaagcctgtaatctcagtactctcagtactttgggagaaggctgaggtggtaggattgctagattccaggaatttgagaccagcctgggcaacatagtgagaccccatttctacaaaatattaaaaaaacatttcttgtattgtgggtctgctggttttgaatttgttctgcttgagtagtcttaaaaattctttatttggccttcatttttgaaagatctttgccaggtttaggattctaggttgacaatcttttttctttcaacacttttttttttcttctttgagatggaatcttgctatgtcgcccaggctggagtgtagtggtgtgatcttggctcactataacctccacctcctgggttcaagcgattctcctgtttcagcctcccgagtagctgagattacatgtgcataccatcacacccagctaatttttatatttttagtagggatggggttttgccatgttggccaggctggtctcgagctcctggcttcaagtgatccgcctgccttggcctcccagcttgttgggattacatgtgtgagtgaccgcatcagccttctttcagtacttttaagatgttgctccagtgtcttctttcttgcattgtttctagtgagaaaactgctgtcattcttacctttgttcctgtgtacataatgtgtcatttttatttggctgtttttaagattttatcactagttctaacaatttgactacaatgtgccttggtgtagtttctgaatgtttctttgcttggggttttttaagcatcttagatctgggtttttagtttttattaatttggggaaaattttgtcatgatttctgcagatattttctctgttcccttctctttcctttgggaactcaaattattcctctattaatgaaataataaatgaaaaaataaatgaagagctcactgatgctcttcatttttaaagaaattcttctctctttgtatttcactttagaaaatttctattgctatatgttcaagtttactattattttcttctgtaatttctgatctaacagtaatcccatacaatataattctcctttctagaagtttgatttcgggtcttttaaatctattctttctctcttaactttttgaacatgtggaatgcagttataacaatattttatttttatgttattttattttattttatgacggagtcttgccctgttgcctaggctggagtgcagtggcgtgatctcggcttactgcaacctctgccacccaggttccagcaattcttgtgccgcagcctcccaagtagctgggactataggcgtgcgccaccccacccagctaatttttttgtatttttagtagagacagggttttaccatgttgaccaggctgttcttgaactcctaacctcaggtgatctgcctgcctcggcctcccaaagtgctgggattacaggcatgagccaccacacctggctataacaacattttaatgtattgtctgctaactctaacatctgtgccatttctgggttgactgccattagttgattcattttcctcattatggattgtattttcctactcttttgcacgcctggtaatttttttttcttttcctttctttttttgagagaggttctcactgtgttgcccaggctggtcttgaacttctgggctcaagcaatcatcctgcctcagcttcccaaagtgctgggattacaggtgtgagccatcaggcctgtccagtgcctggtaattttttattgaatgctaggctttgtgaaatttaccttgttgggtccaagatatttttgtattcctgtacattttcttcagctcattcgggaatatagttatatggagatagtttgatcctttcaggtcttgttttggggttcttgaggcaggactgaagcagtcctccccattgtgaggcacaagtacctgtgtactctacccaccaccctgtgaatcaggaggtttttccggctggctagtgggagttactctattcccagttctgagtgagcagcagttgctgttatgaatccttttgggtgcttctttccctgtccttggtaggcatgtgctgcttagtactcccctgcatacttgaggaccttctgtaggtctcgagttctctctctgctcttttctccagtactctatcctgtgaactctagctgccttgatctccctggactttcagtttcatcctcccaactcacggagtcctcagggctctccatgagtctcccctctgttctgtggcctgcaaactctcaggtgtggtatgctggggcagttgaagggctcatcacatttgtttcctgtctcgcaggaatcactgtgctttgttgccccatgtgtagtgtcttgaaaaccactgtttcatatattttgcccattttttttggttgtttcaggcaggagggtgtatctggttcctcttgctccttgtcaggaagcagaagtctcaagctttgcatattcaaggaagaaaaataaagaagggtactgtggacagagtatagtgaggagggcttgggtaagggaccaggctatgaaccctttaggtcatggtaaggagtttggattttattcagataatgatcagaagcctcagagggttttgagcaaaggtctgacaggacccgacatccgttttaaggtattttctctggctcctgtgtggacaatagattgtcacctcttccagcgggagaggtggagatgatgggcatagtctggggtgatagtggtagatttgctcttgttcctagtgtaatccttgaaattagtggtgaaactggctgtggatggctcttgcgttggaaggcctggaagtgtgaattacatacatgagaactccaggcatgacattcttcgggtgggaactgttgtcgcctgctctatcttgccagcttctctgtaccaaagttcttttggaaactttgagcctctctgaccttttgacccttatgtgcatgtgggagtcctggtctgtgatcccttgacttgattcagggggccccttagctccatctgtgttccctggagtcagcactgtgccacccccccgcccaattcttttctgtcatgggcagaactgcagaggctgcatccttggggagctcagaagctctccaaggcgctgagtggaggtgccacctgtatcttttgtttccgcttctggagacccttttgtcccttgctttttgggcctgatcccattgtccttcgcagaagtgagacacctcagctcttcactgtgttgccagagaagagaacagccactgttggaggggccatgatgggatcaacccacatttatgacatgtccacggttatgagccggaagggcccggctcctgagctgcaaggtgtggaagtggcgctggcgcctgaagagttggagctggatcctatggccatgacccagaagtatgaggagcatgtgcgggagcagcaggctcaagtagagaaggaggacttcagtgacatggtggctgagcacgctgccaaacagaaggtaggcgcttccaggggcgctgggctgggtgagagccagggaccctggcctgccgttttcagtggcatggtgccctctagtggtgagagtgagggtggcctctgcttgctgctctgtgcttccttagatttggaagtcttagaaatcctccagtgggctgccctctttaaggacgatgagggggaggaactcagccaagtctgagagggagctcgaagagaattcagattcagcgcctttcccacagacttctatgtctatgtcaggctgcccacccttgttttgggggtccgggggtggttcaacctgtcttaacctgtgtctctttctccctatacagcaaaaaaaacggaaagctcagccccaggacagccgtgggggcagcaagaaatataaggagttcaagttttaggtcccctcacactagccctttttttggccctacgtctggatgcctgggcttcacacaagaaccacctctcccgcagttcccaaggacttgtcatttcatgttcttattttagacctgttttgtaaataaagctgtttcccaaggaaagagatgaatatttaacactcctgagcctccctcatctccttttagccccttcttgcaaaaggactaaaatagtctctttctacaatcactgggctgccccagtaaccacgaacataaactgggattagacggcgcatttgactggtggtgacgccaaccccaggctgaaatctgtgtttcaccactgccctgctttgtaggaaggcttgggggaagtacctctaggtctggtttgaccttactactttgtccttgggga

SEQ ID NO: 21065 - protein, 141 aa, Homo sapiens; identical to SEQ ID NO: 21063

SEQ ID NO: 21066 - DNA, 1544 bp, Homo sapiens
tgtgtactctacccaccaccctgtgaatcaggaggtttttccggctggctagtgggagttactctattcccagttctgagtgagcagcagttgctgttatgaatccttttgggtgcttctttccctgtccttggtaggcatgtgctgcttagtactcccctgcatacttgaggaccttctgtaggtctcgagttctctctctgctcttttctccagtactctatcctgtgaactctagctgccttgatctccctggactttcagtttcatcctcccaactcacggagtcctcagggctctccatgagtctcccctctgttctgtggcctgcaaactctcaggtgtggtatgctggggcagttgaagggctcatcacatttgtttcctgtctcgcaggaatcactgtgctttgttgccccatgtgtagtgtcttgaaaaccactgtttcatatattttgcccattttttttggttgtttcaggcaggagggtgtatctggttcctcttgctccttgtcaggaagcagaagtctcaagctttgcatattcaaggaagaaaaataaagaagggtactgtggacagagtatagtgaggagggcttgggtaagggaccaggctatgaaccctttaggtcatggtaaggagtttggattttattcagataatgatcagaagcctcagagggttttgagcaaaggtctgacaggacccgacatccgttttaaggtattttctctggctcctgtgtggacaatagattgtcacctcttccagcgggagaggtggagatgatgggcatagtctggggtgatagtggtagatttgctcttgttcctagtgtaatccttgaaattagtggtgaaactggctgtggatggctcttgcgttggaaggcctggaagtgtgaattacatacatgagaactccaggcatgacattcttcgggtgggaactgttgtcgcctgctctatcttgccagcttctctgtaccaaagttcttttggaaactttgagcctctctgaccttttgacccttatgtgcatgtgggagtcctggtctgtgatcccttgacttgattcagggggccccttagctccatctgtgttccctggagtcagcactgtgccacccccccgcccaattcttttctgtcatgggcagaactgcagaggctgcatccttggggagctcagaagctctccaaggcgctgagtggaggtgccacctgtatcttttgtttccgcttctggagacccttttgtcccttgctttttgggcctgatcccattgtccttcgcagaagtgagacacctcagagcaaaaaaaacggaaagctcagccccaggacagccgtgggggcagcaagaaatataaggagttcaagttttaggtcccctcacactagccctttttttggccctacgtctggatgcctgggcttcacacaagaaccacctctcccgcagttcccaaggacttgtcatttcatgttcttattttagacctgttttgtaaataaagctgtttcccaaggaaagagatg

SEQ ID NO: 21067 - protein, 86 aa, Homo sapiens
MSLPSVLWPANSQVWYAGAVEGLITFVSCLAGITVLCCPMCSVLKTTVSYILPIFFGCFRQEGVSGSSCSLSGSRSLKLCIFKEEK

SEQ ID NO: 21068 - DNA, 1797 bp, Homo sapiens
tgtgtactctacccaccaccctgtgaatcaggaggtttttccggctggctagtgggagttactctattcccagttctgagtgagcagcagttgctgttatgaatccttttgggtgcttctttccctgtccttggtaggcatgtgctgcttagtactcccctgcatacttgaggaccttctgtaggtctcgagttctctctctgctcttttctccagtactctatcctgtgaactctagctgccttgatctccctggactttcagtttcatcctcccaactcacggagtcctcagggctctccatgagtctcccctctgttctgtggcctgcaaactctcaggtgtggtatgctggggcagttgaagggctcatcacatttgtttcctgtctcgcaggaatcactgtgctttgttgccccatgtgtagtgtcttgaaaaccactgtttcatatattttgcccattttttttggttgtttcaggcaggagggtgtatctggttcctcttgctccttgtcaggaagcagaagtctcaagctttgcatattcaaggaagaaaaataaagaagggtactgtggacagagtatagtgaggagggcttgggtaagggaccaggctatgaaccctttaggtcatggtaaggagtttggattttattcagataatgatcagaagcctcagagggttttgagcaaaggtctgacaggacccgacatccgttttaaggtattttctctggctcctgtgtggacaatagattgtcacctcttccagcgggagaggtggagatgatgggcatagtctggggtgatagtggtagatttgctcttgttcctagtgtaatccttgaaattagtggtgaaactggctgtggatggctcttgcgttggaaggcctggaagtgtgaattacatacatgagaactccaggcatgacattcttcgggtgggaactgttgtcgcctgctctatcttgccagcttctctgtaccaaagttcttttggaaactttgagcctctctgaccttttgacccttatgtgcatgtgggagtcctggtctgtgatcccttgacttgattcagggggccccttagctccatctgtgttccctggagtcagcactgtgccacccccccgcccaattcttttctgtcatgggcagaactgcagaggctgcatccttggggagctcagaagctctccaaggcgctgagtggaggtgccacctgtatcttttgtttccgcttctggagacccttttgtcccttgctttttgggcctgatcccattgtccttcgcagaagtgagacacctcagagcaaaaaaaacggaaagctcagccccaggacagccgtgggggcagcaagaaatataaggagttcaagttttaggtcccctcacactagccctttttttggccctacgtctggatgcctgggcttcacacaagaaccacctctcccgcagttcccaaggacttgtcatttcatgttcttattttagacctgttttgtaaataaagctgtttcccaaggaaagagatgaatatttaacactcctgagcctccctcatctccttttagccccttcttgcaaaaggactaaaatagtctctttctacaatcactgggctgccccagtaaccacgaacataaactgggattagacggcgcatttgactggtggtgacgccaaccccaggctgaaatctgtgtttcaccactgccctgctttgtaggaaggcttgggggaagtacctctaggtctggtttgaccttactactttgtccttgggga

SEQ ID NO: 21069 - protein, 86 aa, Homo sapiens; identical to SEQ ID NO: 21067

SEQ ID NO: 21070 - DNA, 502 bp, Homo sapiens
cctaaggcctagctcagctgccacgtcctatctggatcatgccccccacaaccccgagaccatcttgaaccctccggcaagtgagcgcctccactggtgcacttaaacaccaacagtagtacaacagcagcgcatgactaccctccccacaggctggcaaatgcccatgggagccagtgatccagcctgctctagtctgtcagaaaggctgctcaggaccagattacaacctggagaaagccttccaacgcaagagccatccacagccagtttcaccactaatttcaaggattacactaggaacaagagcaaatctaccactatcaccccagactatgcccatcatctccacctctcccgctggaagaggtgacaatctattgtccacacaggagccagagaaaataccttaaaacggatgtcgggtcctgtcagacctttgctcaaaaccctctgaggcttctgatcattatctgaataaaatccaaactccttaccatga

SEQ ID NO: 21071 - protein, 79 aa, Homo sapiens
MTTLPTGWQMPMGASDPACSSLSERLLRTRLQPGESLPTQEPSTASFTTNFKDYTRNKSKSTTITPDYAHHLHLSRWKR

SEQ ID NO: 21072 - DNA, 4493 bp, Homo sapiens
gcagctcgctggctgctcgcgctcgggcaggcgggctgaggaggctgccgcgcccccgccgccgccgccgcgggggaagcctgggagccagatcggcgtcgcctcggcctccgtaacccccgcctagccgggccatggcggaacgcggaggggcgggcggtggtcccggaggcgccgggggcggcagcggccagcggggatccggggtcgcccagtcccctcagcagccgccgccgcagcagcagcagcagcagccgccgcagcagccgacgccccccaagctggcccaggccacctcgtcgtcctcgtccacctcggcggcggctgcctcctcctcgtcctcgtctacctccacctccatggccgtggcggtggcctcgggctccgcgcctcccggtggcccggggccaggccgcacccccgccccggtgcagatgaacctgtacgccacctgggaggtggaccggagctcgtccagctgcgtgcctaggctattcagcttgaccctgaagaaactcgtcatgctaaaagaaatggacaaagatcttaactcagtggtcatcgctgtgaagctgcagggttcaaaaagaattcttcgctccaacgagatcgtccttccagctagtggactggtggaaacagagctccaattaaccttctcccttcagtaccctcatttccttaagcgagatgccaacaagctgcagatcatgctgcaaaggagaaaacgttacaagaatcggaccatcttgggctataagaccttggccgtgggactcatcaacatggcagaggtgatgcagcatcctaatgaaggcgcactggtgcttggcctacacagcaacgtgaaggatgtctctgtgcctgtggcagaaataaagatctactccctgtccagccaacccattgaccatgaaggaatcaaatccaagctttctgatcgttctcctgatattgacaattattctgaggaagaggaagagagtttctcatcagaacaggaaggcagtgatgatccattgcatgggcaggacttgttctacgaagacgaagatctccggaaagtgaagaagacccggaggaaactaacctcaacctctgccatcacaaggcaacctaacatcaaacagaagtttgtggccctcctgaagcggtttaaagtttcagatgaggtgggctttgggctggagcatgtgtcccgcgagcagatccgggaagtggaagaggacttggatgaattgtatgacagtctggagatgtacaaccccagcgacagtggccctgagatggaggagacagaaagcatcctcagcacgccaaagcccaagctcaagcctttctttgaggggatgtcgcagtccagctcccagacggagattggcagcctcaacagcaaaggcagcctcggaaaagacaccaccagccctatggaattggctgctctagaaaaaattaaatctacttggattaaaaaccaagatgacagcttgactgaaacagacactctggaaatcactgaccaggacatgtttggagatgccagcacgagtctggttgtgccggagaaagtcaaaactcccatgaagtccagtaaaacggatctccagggctctgcctcccccagcaaagtggagggggtgcacacaccccggcagaagaggagcacgcccctgaaggagcggcagctctccaagcccctaagtgagaggaccaacagttccgacagcgagcgctccccagatctgggccacagcacgcagattccaagaaaggtggtgtatgaccagctcaatcagatcctggtgtcagatgcagccctcccagaaaatgtcattctggtgaacaccactgactggcagggccagtatgtggctgagctgctccaggaccagcggaagcctgtggtgtgcacctgctccaccgtggaggtccaggccgtgctgtccgccctgctcacccggatccagcgctactgcaactgcaactcttccatgccgaggccagtgaaggtggctgctgtgggaggccagagctacctgagctccatcctcaggttctttgtcaagtccctggccaacaagacctccgactggcttggctacatgcgcttcctcatcatccccctcggttctcaccctgtggccaaatacttggggtcagtcgacagtaaatacagtagttccttcctggattctggttggagagatctgttcagtcgctcggagccaccagtgtcagagcaactggacgtggcagggcgggtgatgcagtacgtcaacggggcagccacgacacaccagcttcccgtggccgaagccatgctgacttgccggcataagttccctgatgaagactcctatcagaagtttattcccttcattggcgtggtgaaggtgggtctggttgaagactctccctccacagcaggcgatggggacgattctcctgtggtcagccttactgtgccctccacatcaccaccctccagctcgggcctgagccgagacgccacggccacccctccctcctccccatctatgagcagcgccctggccatcgtggggagccctaatagcccatatggggacgtgattggcctccaggtggactactggctgggccaccccggggagcggaggagggaaggcgacaagagggacgccagctcgaagaacaccctcaagagtgtcttccgctcagtgcaggtgtcccgcctgccccatagtggggaggcccagctttctggcaccatggccatgactgtggtcaccaaagaaaagaacaagaaagttcccaccatcttcctgagcaagaaaccccgagaaaaggaggtggattctaagagccaggtcattgaaggcatcagccgcctcatctgctcagccaagcagcagcagactatgctgagagtgtccatcgatggggtcgagtggagtgacatcaagttcttccagctggcagcccagtggcccacccatgtcaagcactttccagtgggactcttcagtggcagcaaggccacctgaggccctgtctcccagccactttccctcctggcactgccaccagcctcaccgcctgcgggcagggggaggccagcaggcccgggcccagcaccccttccctggcaccagggtctgcctctcactcgcccaggtcccgaaggacactgccacagggacgccttccctcccctcccctccagcccacccctgcacagcccctcctccttcccgcttttccccttctccctcctgctccaggcccaaggcgtgttggttttgccttctggtgcccatagtcccctggactgagtcccccaggccttccttcacccgacttccaaactcttccttgtggtatcagtttccttctcggaaatgagaaagctggaatcctggtccccagcaggagagcctagtcctcccccagcccctccagccaccagggtgtcctctaggatgcagctgccagatccactcactctgctgcctccagcaggacccaaggccactttcaactcttatggggttctccacctgccccagagcttctcaagggagggtaagggggcaccctgagcccacaggacccctacttcacagctcacaggggcaggaggcagctcccctgcctccaggaccctgttgctatggtgacacagcgtttctaggacagaggggcctcccagtctccccccaccacccgtgcacgacttcctcaccacccccaggttccctgcagatgtcgtgtgtgtcctgagtgtttctttggttctttgcacgccaagtctcttggttgtaccatgtgacacaccctgtgcactggtcgctgtcttcgtggcttccacccttgttaatgatgctcctgcctctgcctcccagcccctcacccagcacagctctgcctggacttggagagatgggaggcagacccccaccaccatacatgctgtctgtggcccctcagacattctgtttcatctcccattcatctccctcctcccaccgtgtcagtttttctgcctttccctgctctgttcttccccctccttaggccccagcctgggcccagacccatcctcccagccaggtttccctccagcaggctccttccctccctgtcacctccctctcaccaacccggggtctgagcccctcattcctgaccgtccgtgttctcaggagtggttgaggacacagggccccagcccagccctctgcaccccccagcccggccatctgcgccccacagcccctttggagcttttctcttgtcctctcactccttcccagaagtttttgcacagaacttcattttgaaagtgtttttctcattctccatacctcccccaagctctcctccagcccttcccagggctcagccctgctgtcctgagcgtctcctgggccagagagaggagatgggggtgggagggactgagttgatgttgggtttttcattcaataaattggtgatttcttaccgactgc

SEQ ID NO: 21073 - protein, 963 aa, Homo sapiens; identical to SEQ ID NO: 2689

SEQ ID NO: 21074 - DNA, 5568 bp, Homo sapiens
gcagctcgctggctgctcgcgctcgggcaggcgggctgaggaggctgccgcgcccccgccgccgccgccgcgggggaagcctgggagccagatcggcgtcgcctcggcctccgtaacccccgcctagccgggccatggcggaacgcggaggggcgggcggtggtcccggaggcgccgggggcggcagcggccagcggggatccggggtcgcccagtcccctcagcagccgccgccgcagcagcagcagcagcagccgccgcagcagccgacgccccccaagctggcccaggccacctcgtcgtcctcgtccacctcggcggcggctgcctcctcctcgtcctcgtctacctccacctccatggccgtggcggtggcctcgggctccgcgcctcccggtggcccggggccaggccgcacccccgccccggtgcagatgaacctgtacgccacctgggaggtggaccggagctcgtccagctgcgtgcctaggctattcagcttgaccctgaagaaactcgtcatgctaaaagaaatggacaaagatcttaactcagtggtcatcgctgtgaagctgcagggttcaaaaagaattcttcgctccaacgagatcgtccttccagctagtggactggtggaaacagagctccaattaaccttctcccttcagtaccctcatttccttaagcgagatgccaacaagctgcagatcatgctgcaaaggagaaaacgttacaagaatcggaccatcttgggctataagaccttggccgtgggactcatcaacatggcagaggtgatgcagcatcctaatgaaggcgcactggtgcttggcctacacagcaacgtgaaggatgtctctgtgcctgtggcagaaataaagatctactccctgtccagccaacccattgaccatgaaggaatcaaatccaagctttctgatcgttctcctgatattgacaattattctgaggaagaggaagagagtttctcatcagaacaggaaggcagtgatgatccattgcatgggcaggacttgttctacgaagacgaagatctccggaaagtgaagaagacccggaggaaactaacctcaacctctgccatcacaaggcaacctaacatcaaacagaagtttgtggccctcctgaagcggtttaaagtttcagatgaggtgggctttgggctggagcatgtgtcccgcgagcagatccgggaagtggaagaggacttggatgaattgtatgacagtctggagatgtacaaccccagcgacagtggccctgagatggaggagacagaaagcatcctcagcacgccaaagcccaagctcaagcctttctttgaggggatgtcgcagtccagctcccagacggagattggcagcctcaacagcaaaggcagcctcggaaaagacaccaccagccctatggaattggctgctctagaaaaaattaaatctacttggattaaaaaccaagatgacagcttgactgaaacagacactctggaaatcactgaccaggacatgtttggagatgccagcacgagtctggttgtgccggagaaagtcaaaactcccatgaagtccagtaaaacggatctccagggctctgcctcccccagcaaagtggagggggtgcacacaccccggcagaagaggagcacgcccctgaaggagcggcagctctccaagcccctaagtgagaggaccaacagttccgacagcgagcgctccccagatctgggccacagcacgcagattccaagaaaggtggtgtatgaccagctcaatcagatcctggtgtcagatgcagccctcccagaaaatgtcattctggtgaacaccactgactggcagggccagtatgtggctgagctgctccaggaccagcggaagcctgtggtgtgcacctgctccaccgtggaggtccaggccgtgctgtccgccctgctcacccggatccagcgctactgcaactgcaactcttccatgccgaggccagtgaaggtggctgctgtgggaggccagagctacctgagctccatcctcaggttctttgtcaagtccctggccaacaagacctccgactggcttggctacatgcgcttcctcatcatccccctcggttctcaccctgtggccaaatacttggggtcagtcgacagtaaatacagtagttccttcctggattctggttggagagatctgttcagtcgctcggagccaccagtgtcagagcaactggacgtggcagggcgggtgatgcagtacgtcaacggggcagccacgacacaccagcttcccgtggccgaagccatgctgacttgccggcataagttccctgatgaagactcctatcagaagtttattcccttcattggcgtggtgaaggtgggtctggttgaagactctccctccacagcaggcgatggggacgattctcctgtggtcagccttactgtgccctccacatcaccaccctccagctcgggcctgagccgagacgccacggccacccctccctcctccccatctatgagcagcgccctggccatcgtggggagccctaatagcccatatggggacgtgattggcctccaggtggactactggctgggccaccccggggagcggaggagggaaggcgacaagagggacgccagctcgaagaacaccctcaagagtgtcttccgctcagtgcaggtgtcccgcctgccccatagtggggaggcccagctttctggcaccatggccatgactgtggtcaccaaagaaaagaacaagaaagttcccaccatcttcctgagcaagaaaccccgagaaaaggaggtggattctaagagccaggtcattgaaggcatcagccgcctcatctgctcagccaagcagcagcagactatgctgagagtgtccatcgatggggtcgagtggagtgacatcaagttcttccagctggcagcccagtggcccacccatgtcaagcactttccagtgggactcttcagtggcagcaaggccacctgaggccctgtctcccagccactttccctcctggcactgccaccagcctcaccgcctgcgggcagggggaggccagcaggcccgggcccagcaccccttccctggcaccagggtctgcctctcactcgcccaggtcccgaaggacactgccacagggacgccttccctcccctcccctccagcccacccctgcacagcccctcctccttcccgcttttccccttctccctcctgctccaggcccaaggcgtgttggttttgccttctggtgcccatagtcccctggactgagtcccccaggccttccttcacccgacttccaaactcttccttgtggtatcagtttccttctcggaaatgagaaagctggaatcctggtccccagcaggagagcctagtcctcccccagcccctccagccaccagggtgtcctctaggatgcagctgccagatccactcactctgctgcctccagcaggacccaaggccactttcaactcttatggggttctccacctgccccagagcttctcaagggagggtaagggggcaccctgagcccacaggacccctacttcacagctcacaggggcaggaggcagctcccctgcctccaggaccctgttgctatggtgacacagcgtttctaggacagaggggcctcccagtctccccccaccacccgtgcacgacttcctcaccacccccaggttccctgcagatgtcgtgtgtgtcctgagtgtttctttggttctttgcacgccaagtctcttggttgtaccatgtgacacaccctgtgcactggtcgctgtcttcgtggcttccacccttgttaatgatgctcctgcctctgcctcccagcccctcacccagcacagctctgcctggacttggagagatgggaggcagacccccaccaccatacatgctgtctgtggcccctcagacattctgtttcatctcccattcatctccctcctcccaccgtgtcagtttttctgcctttccctgctctgttcttccccctccttaggccccagcctgggcccagacccatcctcccagccaggtttccctccagcaggctccttccctccctgtcacctccctctcaccaacccggggtctgagcccctcattcctgaccgtccgtgttctcaggagtggttgaggacacagggccccagcccagccctctgcaccccccagcccggccatctgcgccccacagcccctttggagcttttctcttgtcctctcactccttcccagaagtttttgcacagaacttcattttgaaagtgtttttctcattctccatacctcccccaagctctcctccagcccttcccagggctcagccctgctgtcctgagcgtctcctgggccagagagaggagatgggggtgggagggactgagttgatgttgggtttttcattcaataaattggtgatttcttaccgactgccttgggcttctatgccccctcactgtgccacaggagctgcccaaccccttttccacagtgcagcccaactccagtgaaaatccaccaggaacgtaggtggaaagaagcgtactcccatgttctcaatcatggaaacaggcatgaaggtgtctcacctggcatgaggcaggcagaggtcggaaacaggaaagatgtcatttccacaccaaaagcccgtttttccccaggacccaccatccccaaatccacctcccaaggcagtgacgtgttgagtgtggcttccccatcttctgatcaaaggtcagaacttagcttctctcccctgctccaggttggtgaagtccgagccagtggggtctttgcctctgcaggtggagggaatagggctgagggacatctgtggagttccttttcctgcccgcccttgacttagagatggaaagcagtggtagccactgtcccctgggtgcccggtttttccactagcttccaagacaggcctgcacacacgaagaagtgtgtgccttccccatgaagaagtgcccagaggtggccaggcacagtggctcacgcctgtaatcccagcactttgggaggccaaggcaggcgttttgcccgaactcaggagtttgagaccagcctgggcaatgtggcgaaaccccgtctctactaaaaaatataaaaaattggctgggtgcggtggctcacacctgtaatcccagcactttgggaggctgaggtgggtggatcatgaggtcaggagattaagaccatcctggccaacatggtgaaaccccgtccctactaaaaatacaaagattagctgggtgtggtggcacgtgcctgtaatcccagctactcaggaggctgaggcaggagaatcacttgaactcaggaggtggaggttgcagtgagccgagatcgcgccactgtactccagcctggcgacacagcgagactccgtctcaaaaaaaaaaaaaaaatttttgccgggcgtggtggtatgtgcctgtaatctcagctactcaggaggctgaggcacgagaatcacttgaacccgggaggcggaggttgc

SEQ ID NO: 21075 - protein, 963 aa, Homo sapiens; identical to SEQ ID NO: 2689

SEQ ID NO: 21076 - DNA, 3024 bp, Homo sapiens
ggctgctcgcgctcgggcaggcgggctgaggaggctgccgcgcccccgccgccgccgccgcgggggaagcctgggagccagatcggcgtcgcctcggcctccgtaacccccgcctagccgggccatggcggaacgcggaggggcgggcggtggtcccggaggcgccgggggcggcagcggccagcggggatccggggtcgcccagtcccctcagcagccgccgccgcagcagcagcagcagcagccgccgcagcagccgacgccccccaagctggcccaggccacctcgtcgtcctcgtccacctcggcggcggctgcctcctcctcgtcctcgtctacctccacctccatggccgtggcggtggcctcgggctccgcgcctcccggtggcccggggccaggccgcacccccgccccggtgcagatgaacctgtacgccacctgggaggtggaccggagctcgtccagctgcgtgcctaggctattcagcttgaccctgaagaaactcgtcatgctaaaagaaatggacaaagatcttaactcagtggtcatcgctgtgaagctgcagggttcaaaaagaattcttcgctccaacgagatcgtccttccagctagtggactggtggaaacagagctccaattaaccttctcccttcagtaccctcatttccttaagcgagatgccaacaagctgcagatcatgctgcaaaggagaaaacgttacaagaatcggaccatcttgggctataagaccttggccgtgggactcatcaacatggcagaggtgatgcagcatcctaatgaaggcgcactggtgcttggcctacacagcaacgtgaaggatgtctctgtgcctgtggcagaaataaagatctactccctgtccagccaacccattgaccatgaaggaatcaaatccaagctttctgatcgttctcctgatattgacaattattctgaggaagaggaagagagtttctcatcagaacaggaaggcagtgatgatccattgcatgggcaggacttgttctacgaagacgaagatctccggaaagtgaagaagacccggaggaaactaacctcaacctctgccatcacaagggtgagcctcaaaggtctggggagtggttggctaagattttcagtctgggggtaggttggcagcagcatattcaggcctagtggagacttcttaaaatcaacacagggtcatcccttcaacgattccaatgaacgctctatatcctcaccaccgcccaattagactcactgttgttgggaaccacaattactgataagagtgttatatccttcaggttatcgtcagatagaaaaaaggaggagaacccttcttgtagaattcagaacagatagtggtccatcagggaacagaccgcctcccacccactccagtggctgcttcatgtcacatgctgtcctctgcagcgagaaagccagctccctctaggagtagcactagttttaatcatgtgctgaacttaggcagagataataggctagtcatggggtgctcctatgaccctgggcttgctaagctttaattacatcagatatcgttcctgccttaacggatccataaccttggagaccaggtgccttttgatacttttcctccataagacttcctcaagagtcactgttttgatgacatttgagtcctgaactaagaagctaaaaacctgaattcctaggtggtctttgacagattctggagtgcctgcatgaagtgtgggagggccagaagtgctgggagcatttccgaaggggaattcacagctccatttacccagaggcatcctgattctccccagtgcagagctagcctagggaccaaacccctgagagccgagatgcccaccccttcagggatgaaacggaggccagatcactctcccatcacaatgaggtgtcactggacttcaggtaaatccgtgagactgtgacctggatttcccatccagtcagcaactagggagcgggaggactgtttccttgtcctcaggtatccacctctcaattggtgctccaaatggtccccatgaggtgtgtcaccagtaccccaaatgcttgacctccattgcactctggaaatagggagtggctgtaggatctctctctagtcagcccctactgctgaggctttctttttcctgctctgtaaccagaaagcggccctattttcttcccaacgggtgcccccagagcttcataagtcacctcttcctacgtggggtctcttccttggcatgaccctggcacatgactggagttcagtgctcctgctaatgtatactcccccagaggtgtttctttttaagctgcaggcactttccagttctatcccagagactcagtgacctcccttagtgcctgtctcctctgtgcatgcgcattcttctctcccaccaagaacacagatgtacttgaccttctgtgaacatgtctcatgctgctctgtcactgggagctcgactttttttctctgctgtgaatgccctttctgccctttctctgaagacctatcagcctcgcaagttcattgttttcatccccagatggcgagtctgtcattcaggcaggaagtacatacaaccacaggctaagcatcgtgcccagagacaaagagatagggcccagtccatgccatcaagcgcacagtgtctagtgacaccacacatttcaacaaataattacagcccagtaggacaggtgccataagacagagctttgcaatgacaccaggggactgtggccacctgtcccaggagtgccaggacagcttcccagatgagatgctgagagatgggttttttaaaataaaacttcaccaagtggatttggggaaaatttttattcaaggcagaagataccctatataaagacccagtacagtgctgtggctcacgcctgtaatcccagcactttgggaggccgaggcaggcgcatcacaaggtcaggagatcgagaccgtcctggccaacatggtgaaaccccgtctctact

SEQ ID NO: 21077 - protein, 343 aa, Homo sapiens [sequence omitted]

SEQ ID NO: 21078 - DNA, 590 bp, Homo sapiens
tctcagaagggaaaattgaggccctgtgaggtgaaggcatttttttaagactacacagtttaaaagtgggcggggctggaatttgtctcatgactcatgattgccagacaccagagccgtttctgtgtttaaacttggtcccccaagccctgtctggttctcatagctgacaaataatatttaatgccttattctttgccagctggaattacaaaacactgctcaatttccatcatagacagcgagaggctgtgtggtatagtggctgtgagtgtgggttctggagccagtcaggtcagattttactatttgagtgactctggacaagtttttaacctctataatgcttcaacttttctcatctgtaaatgggcataataattgtccctgctgagtgtggtggctcatacttataaccccacctcccaaggtgctggcgttacaggcatgagccgtagcacccagccaacattttactctttatacgtgtgttcagctacaaaactttcttccctaccaaccctcccaagtctaagtaaaattgatctcggagtcacttgacctatttatctggtattatcctggtacgc

SEQ ID NO: 21079 - protein, 64 aa, Homo sapiens
MPYSLPAGITKHCSISIIDSERLCGIVAVSVGSGASQVRFYYLSDSGQVFNLYNASTFLICKWA

SEQ ID NO: 21080 - DNA, 318 bp, Homo sapiens
cccatgaggtgtgtcaccagtaccccaaatgcttgacctccattgcactctggaaatagggagtggctgtaggatctctctctagtcagcccctactgctgaggcaggagagtcacttgaaccagggaggcagaggttgcagtgatccgagatcacctcactgcactccagcctggcaacagagcaagactccatctctaaaaaaaaaaaaaaaggcccagtacaacagcatgcagtttttcccaggaactcaaagcagtgagtttccacttgactatggggtgtgaagggtcaaatagagagataaggctagaaaca

SEQ ID NO: 21081 - protein, 38 aa, Homo sapiens
SEITSLHSSLATEQDSISKKKKKGPVQQHAVFPRNSKQ

SEQ ID NO: 21082 - DNA, 1329 bp, Homo sapiens
gtcgagtggagtgacatcaagttcttccagctggcagcccagtggcccacccatgtcaagcactttccagtgggactcttcagtggcagcaaggccacctgaggccctgtctcccagccactttccctcctggcactgccaccagcctcaccgcctgcgggcagggggaggccagcaggcccgggcccagcaccccttccctggcaccagggtctgcctctcactcgcccaggtcccgaaggacactgccacagggacgccttccctcccctcccctccagcccacccctgcacagcccctcctccttcccgcttttccccttctccctcctgctccaggcccaaggcgtgttggttttgccttctggtgcccatagtcccctggactgagtcccccaggccttccttcacccgacttccaaactcttccttgtggtatcagtttccttctcggaaatgagaaagctggaatcctggtccccagcaggagagcctagtcctcccccagcccctccagccaccagggtgtcctctaggatgcagctgccagatccactcactctgctgcctccagcaggacccaaggccactttcaactcttatggggttctccacctgccccagagcttctcaagggagggtaagggggcaccctgagcccacaggacccctacttcacagctcacaggggcaggaggcagctcccctgcctccaggaccctgttgctatggtgacacagcgtttctaggacagaggggcctcccagtctccccccaccacccgtgcacgacttcctcaccacccccaggttccctgcagatgtcgtgtgtgtcctgagtgtttctttggttctttgcacgccaagtctcttggttgtaccatgtgacacaccctgtgcactggtcgctgtcttcgtggcttccacccttgttaatgatgctcctgcctctgcctcccagcccctcacccagcacagctctgcctggacttggagagatgggaggcagacccccaccaccatacatgctgtctgtggcccctcagacattctgtttcatctcccattcatctccctcctcccaccgtgtcagtttttctgcctttccctgctctgttcttcccctccttcccagaagtttttgcacagaacttcattttgaaagtgtttttctcattctccatacctcccccaagctctcctccagcccttcccagggctcagccctgctgtcctgagcgtctcctgggccagagagaggagatgggggtgggagggactgagttgatgttgggtttttcattcaataaattggtgatttcttaccgac

SEQ ID NO: 21083 - protein, 100 aa, Homo sapiens
MMLLPLPPSPSPSTALPGLGEMGGRPPPPYMLSVAPQTFCFISHSSPSSHRVSFSAFPCSVLPLLPRSFCTELHFESVFLILHTSPKLSSSPSQGSALLS

SEQ ID NO: 21084 - DNA, 1341 bp, Homo sapiens
gtgacatcaagttcttccagctggcagcccagtggcccacccatgtcaagcactttccagtgggactcttcagtggcagcaaggccacctgaggccctgtctcccagccactttccctcctggcactgccaccagcctcaccgcctgcgggcagggggaggccagcaggcccgggcccagcaccccttccctggcaccagggtctgcctctcactcgcccaggtcccgaaggacactgccacagggacgccttccctcccctcccctccagcccacccctgcacagcccctcctccttcccgcttttccccttctccctcctgctccaggcccaaggcgtgttggttttgccttctggtgcccatagtcccctggactgagtcccccaggccttccttcacccgacttccaaactcttccttgtggtatcagtttccttctcggaaatgagaaagctggaatcctggtccccagcaggagagcctagtcctcccccagcccctccagccaccagggtgtcctctaggatgcagctgccagatccactcactctgctgcctccagcaggacccaaggccactttcaactcttatggggttctccacctgccccagagcttctcaagggagggtaagggggcaccctgagcccacaggacccctacttcacagctcacaggggcaggaggcagctcccctgcctccaggaccctgttgctatggtgacacagcgtttctaggacagaggggcctcccagtctccccccaccacccgtgcacgacttcccccaccaccatacatgctgtctgtggcccctcagacattctgtttcatctcccattcatctccctcctcccaccgtgtcagtttttctgcctttccctgctctgttcttccccctccttaggccccagcctgggcccagacccatcctcccagccaggtttccctccagcaggctccttccctccctgtcacctccctctcaccaacccggggtctgagcccctcattcctgaccgtccgtgttctcaggagtggttgaggacacagggccccagcccagccctctgcaccccccagcccggccatctgcgccccacagcccctttggagcttttctcttgtcctctcactccttcccagaagtttttgcacagaacttcattttgaaagtgtttttctcattctccatacctcccccaagctctcctccagcccttcccagggctcagccctgctgtcctgagcgtctcctgggccagagagaggagatgggggtgggagggactgagttgatgttgggtttttcattcaataaattggtgatttcttaccgac

SEQ ID NO: 21085 - protein, 193 aa, Homo sapiens
MGFSTCPRASQGRVRGHPEPTGPLLHSSQGQEAAPLPPGPCCYGDTAFLGQRGLPVSPHHPCTTSPTTIHAVCGPSDILFHLPFISLLPPCQFFCLSLLCSSPSLGPSLGPDPSSQPGFPPAGSFPPCHLPLTNPGSEPLIPDRPCSQEWLRTQGPSPALCTPQPGHLRPTAPLELFSCPLTPSQKFLHRTSF

SEQ ID NO: 21086 - DNA, 2419 bp, Homo sapiens
gtgacatcaagttcttccagctggcagcccagtggcccacccatgtcaagcactttccagtgggactcttcagtggcagcaaggccacctgaggccctgtctcccagccactttccctcctggcactgccaccagcctcaccgcctgcgggcagggggaggccagcaggcccgggcccagcaccccttccctggcaccagggtctgcctctcactcgcccaggtcccgaaggacactgccacagggacgccttccctcccctcccctccagcccacccctgcacagcccctcctccttcccgcttttccccttctccctcctgctccaggcccaaggcgtgttggttttgccttctggtgcccatagtcccctggactgagtcccccaggccttccttcacccgacttccaaactcttccttgtggtatcagtttccttctcggaaatgagaaagctggaatcctggtccccagcaggagagcctagtcctcccccagcccctccagccaccagggtgtcctctaggatgcagctgccagatccactcactctgctgcctccagcaggacccaaggccactttcaactcttatggggttctccacctgccccagagcttctcaagggagggtaagggggcaccctgagcccacaggacccctacttcacagctcacaggggcaggaggcagctcccctgcctccaggaccctgttgctatggtgacacagcgtttctaggacagaggggcctcccagtctccccccaccacccgtgcacgacttcccccaccaccatacatgctgtctgtggcccctcagacattctgtttcatctcccattcatctccctcctcccaccgtgtcagtttttctgcctttccctgctctgttcttccccctccttaggccccagcctgggcccagacccatcctcccagccaggtttccctccagcaggctccttccctccctgtcacctccctctcaccaacccggggtctgagcccctcattcctgaccgtccgtgttctcaggagtggttgaggacacagggccccagcccagccctctgcaccccccagcccggccatctgcgccccacagcccctttggagcttttctcttgtcctctcactccttcccagaagtttttgcacagaacttcattttgaaagtgtttttctcattctccatacctcccccaagctctcctccagcccttcccagggctcagccctgctgtcctgagcgtctcctgggccagagagaggagatgggggtgggagggactgagttgatgttgggtttttcattcaataaattggtgatttcttaccgactgccttgggcttctatgccccctcactgtgccacaggagctgcccaaccccttttccacagtgcagcccaactccagtgaaaatccaccaggaacgtaggtggaaagaagcgtactcccatgttctcaatcatggaaacaggcatgaaggtgtctcacctggcatgaggcaggcagaggtcggaaacaggaaagatgtcatttccacaccaaaagcccgtttttccccaggacccaccatccccaaatccacctcccaaggcagtgacgtgttgagtgtggcttccccatcttctgatcaaaggtcagaacttagcttctctcccctgctccaggttggtgaagtccgagccagtggggtctttgcctctgcaggtggagggaatagggctgagggacatctgtggagttccttttcctgcccgcccttgacttagagatggaaagcagtggtagccactgtcccctgggtgcccggtttttccactagcttccaagacaggcctgcacacacgaagaagtgtgtgccttccccatgaagaagtgcccagaggtggccaggcacagtggctcacgcctgtaatcccagcactttgggaggccaaggcaggcgttttgcccgaactcaggagtttgagaccagcctgggcaatgtggcgaaaccccgtctctactaaaaaatataaaaaattggctgggtgcggtggctcacacctgtaatcccagcactttgggaggctgaggtgggtggatcatgaggtcaggagattaagaccatcctggccaacatggtgaaaccccgtccctactaaaaatacaaagattagctgggtgtggtggcacgtgcctgtaatcccagctactcaggaggctgaggcaggagaatcacttgaactcaggaggtggaggttgcagtgagccgagatcgcgccactgtactccagcctggcgacacagcgagactccgtctcaaaaaaaaaaaaaaaatttttgccgggcgtggtggtatgtgcctgtaatctcagctactcaggaggctgaggcacgagaatcacttgaacccgggaggcggaggttgc

SEQ ID NO: 21087 - protein, 193 aa, Homo sapiens; identical to SEQ ID NO: 21085

SEQ ID NO: 21088 - DNA, 399 bp, Homo sapiens
gtcctcgtgggcacttcaccctgctctgcagccacactcacaccctagatccaggtcacactaggtatgatttgcttctcctggcctttcctctcaccagccccgctatcacctcatttagaaggcaggcaaagaccccactggctcggacttcaccaacctggagcaggggagagaagctaagttctgacctttgatcagaagatggggaagccacactcaacacgtcactgccttgggaggtggatttggggatggtgggtcctggggaaaaacgggcttttggtgtggaaatgacatctttcctgtttccgacctctgcctgcctcatgccaggtgagacaccttcatgcctgtttccatgattgagaacatgggagtacgcttctttccacctac

SEQ ID NO: 21089 - protein, 38 aa, Homo sapiens
MICFSWPFLSPAPLSPHLEGRQRPHWLGLHQPGAGERS

SEQ ID NO: 21090 - DNA, 655 bp, Homo sapiens
gggggctgctgggaaggccggcgggatggaggcggcgggaccggctcgcgggtgcgggtccgggtgaagcgggaggcagccagagtcggagccgggcccgagcaccaggcgcaggcccggcgcccgcctgcccgcaccctcgtcctcacagacgccacagccatggccatgatggtgtttccgcgggaggagaagctgagccaggatgagatcgtgctgggcaccaaggctgtcatccagggactggagactctgcgtggggagcatcgtgccctgctggctcctctggttgcacctgaggccggcgaagccgagcctggctcgcaggagcgctgcatcctcctgcgtcgctccctggaagccattgagcttgggctgggggaggcccaggtgatcttggcattgtcgagccacctgggggctgtagaatcagagaagcagaagctgcgggcgcaggtgcggcgtctggtgcaggagaaccagtggctgcgtgaggagctggcggggacacagcagaagctgcagcgcagtgagcaggccgtggcccagctcgaggaggagaagcagcacttgctgttcatgagccagatccgcaagttggatgaagacgcctcccctaacgaggagaagggggacgtccccaaagacacactgg

SEQ ID NO: 21091 - protein, 163 aa, Homo sapiens
MAMMVFPREEKLSQDEIVLGTKAVIQGLETLRGEHRALLAPLVAPEAGEAEPGSQERCILLRRSLEAIELGLGEAQVILALSSHLGAVESEKQKLRAQVRRLVQENQWLREELAGTQQKLQRSEQAVAQLEEEKQHLLFMSQIRKLDEDASPNEEKGDVPKDT

SEQ ID NO: 21092 - DNA, 2935 bp, Homo sapiens
gggggctgctgggaaggccggcgggatggaggcggcgggaccggctcgcgggtgcgggtccgggtgaagcgggaggcagccagagtcggagccgggcccgagcaccaggcgcaggcccggcgcccgcctgcccgcaccctcgtcctcacagacgccacagccatggccatgatggtgtttccgcgggaggagaagctgagccaggatgagatcgtgctgggcaccaaggctgtcatccagggactggagactctgcgtggggagcatcgtgccctgctggctcctctggttgcacctgaggccggcgaagccgagcctggctcgcaggagcgctgcatcctcctgcgtcgctccctggaagccattgagcttgggctgggggaggcccaggtgatcttggcattgtcgagccacctgggggctgtagaatcagagaagcagaagctgcgggcgcaggtgcggcgtctggtgcaggagaaccagtggctgcgtgaggagctggcggggacacagcagaagctgcagcgcagtgagcaggccgtggcccagctcgaggaggagaagcagcacttgctgttcatgagccagatccgcaagttggatgaagacgcctcccctaacgaggagaagggggacgtccccaaagacacactggatgacctgttccccaatgaggatgagcagagcccagcccctagcccaggaggaggggatgtgtctggtcagcatgggggctacgagatcccggcccggctccgcaccctgcacaacctggtgatccaatacgcctcacagggccgctacgaggtagctgtgccactctgcaagcaggcactcgaagacctggagaagacgtcaggccacgaccaccctgacgttgccaccatgctgaacatcctggcactggtctatcgggatcagaacaagtacaaggaggctgcccacctgctcaatgatgctctggccatccgggagaaaacactgggcaaggaccacccagccgtggctgcgacactaaacaacctggcagtcctgtatggcaagaggggcaagtacaaggaggctgagccattgtgcaagcgggcactggagatccgggagaaggtcctgggcaagtttcacccagatgtggccaagcagctcagcaacctggccctgctgtgccagaaccagggcaaagctgaggaggtggaatattactatcggcgggcactggagatctatgctacacgcctcgggcccgatgaccccaatgtggccaagaccaagaacaacctggcttcctgctacctgaagcagggcaagtaccaggatgcggagaccttgtacaaggagatcctcacccgcgctcatgagaaagagtttggctctgtcaatggggacaacaagcccatctggatgcacgcagaggagcgggaggaaagcaaggataagcgccgggacagcgccccctatggggaatacggcagctggtacaaggcctgtaaagtagacagccccacagtcaacaccaccctgcgcagcttgggggccctataccggcgccagggcaagctggaagccgcgcacacactagaggactgtgccagccgtaaccgcaagcagggtttggaccccgcaagccagaccaaggtggtagaactgctgaaagatggcagtggcaggcggggagaccgccgcagcagccgagacatggctgggggtgccgggcctcggtctgagtctgacctcgaggacgtgggacctacagctgagtggaatggggatggcagtggctccttgaggcgcagcggttcctttgggaaactccgggatgccctgaggcgcagcagtgagatgctggtaaagaagctgcaggggggcaccccccaggagccccctaaccccaggatgaagcgggccagttccctcaacttcctcaacaagagcgtggaagagccgacccagcctggaggcacaggtctctctgacagccgcactctcagctccagctccatggacctctcccgacgaagctccctggtgggctaatgctgaaggggcagccagtcaccagagcgcccacctggcacacccccctcaccccagccctgcgcatgggcctgctgcttgtcccgcctgtctctcccacagcccctgtcttttctgttcaatctcagggtaaccttctcccttgtcatctcagcctgagccctggaggctgggcctgcccactccagctccatcccttatttattccttccagcagggccctcttccctaggttcgggccagcaggaggtgccggctggagtctccaccatagactcagtggcctggcctccccagaccccagagccaagaacactaagcactcgccggcccttcggcaccctcgccctccctcccgactcaacccggccgttgcttctgtatatagagaaataagttattggccgcgcgcctcccttcagtccacggtactacccgggcctcccctcgtccctcttctagtggtaccgcccaggccttaatcacccccattccgtgcggtggtatctcccaggctctacattctcgggagcggcgcctcccaagggggtcctgggaccttctcgcgctcctcctggcctctgagggatgcgtcctacccgcgccatcgccccgtggcccaggacggggacctccccttagtccgtcctcccaccgccgggccctgccccgcatcccggccttatgcactgcccctcccacccggccccgcccaggcacggccgaccccgccccgggcaccgcccaccgagccatcctgcctcgcctccccccacgcctgcagcttctcgcgaggggcggcgacggtcccctggtggcaggaggggctccccctgttgcgggtgaggcggctgctctcatattttcagatgttgctgtagaaataaagacggtttaaatctga

SEQ ID NO: 21093 - protein, 622 aa, Homo sapiens; identical to SEQ ID NO: 2691

SEQ ID NO: 21094 - DNA, 2895 bp, Homo sapiens
ggctgctgggaaggccggcgggatggaggcggcgggaccggctcgcgggtgcgggtccgggtgaagcgggaggcagccagagtcggagccgggcccgagcaccaggcgcagacgccacagccatggccatgatggtgtttccgcgggaggagaagctgagccaggatgagatcgtgctgggcaccaaggctgtcatccagggactggagactctgcgtggggagcatcgtgccctgctggctcctctggttgcacctgaggccggcgaagccgagcctggctcgcaggagcgctgcatcctcctgcgtcgctccctggaagccattgagcttgggctgggggaggcccaggtgatcttggcattgtcgagccacctgggggctgtagaatcagagaagcagaagctgcgggcgcaggtgcggcgtctggtgcaggagaaccagtggctgcgtgaggagctggcggggacacagcagaagctgcagcgcagtgagcaggccgtggcccagctcgaggaggagaagcagcacttgctgttcatgagccagatccgcaagttggatgaagacgcctcccctaacgaggagaagggggacgtccccaaagacacactggatgacctgttccccaatgaggatgagcagagcccagcccctagcccaggaggaggggatgtgtctggtcagcatgggggctacgagatcccggcccggctccgcaccctgcacaacctggtgatccaatacgcctcacagggccgctacgaggtagctgtgccactctgcaagcaggcactcgaagacctggagaagacgtcaggccacgaccaccctgacgttgccaccatgctgaacatcctggcactggtctatcgggatcagaacaagtacaaggaggctgcccacctgctcaatgatgctctggccatccgggagaaaacactgggcaaggaccacccagccgtggctgcgacactaaacaacctggcagtcctgtatggcaagaggggcaagtacaaggaggctgagccattgtgcaagcgggcactggagatccgggagaaggtcctgggcaagtttcacccagatgtggccaagcagctcagcaacctggccctgctgtgccagaaccagggcaaagctgaggaggtggaatattactatcggcgggcactggagatctatgctacacgcctcgggcccgatgaccccaatgtggccaagaccaagaacaacctggcttcctgctacctgaagcagggcaagtaccaggatgcggagaccttgtacaaggagatcctcacccgcgctcatgagaaagagtttggctctgtcaatggggacaacaagcccatctggatgcacgcagaggagcgggaggaaagcaaggataagcgccgggacagcgccccctatggggaatacggcagctggtacaaggcctgtaaagtagacagccccacagtcaacaccaccctgcgcagcttgggggccctataccggcgccagggcaagctggaagccgcgcacacactagaggactgtgccagccgtaaccgcaagcagggtttggaccccgcaagccagaccaaggtggtagaactgctgaaagatggcagtggcaggcggggagaccgccgcagcagccgagacatggctgggggtgccgggcctcggtctgagtctgacctcgaggacgtgggacctacagctgagtggaatggggatggcagtggctccttgaggcgcagcggttcctttgggaaactccgggatgccctgaggcgcagcagtgagatgctggtaaagaagctgcaggggggcaccccccaggagccccctaaccccaggatgaagcgggccagttccctcaacttcctcaacaagagcgtggaagagccgacccagcctggaggcacaggtctctctgacagccgcactctcagctccagctccatggacctctcccgacgaagctccctggtgggctaatgctgaaggggcagccagtcaccagagcgcccacctggcacacccccctcaccccagccctgcgcatgggcctgctgcttgtcccgcctgtctctcccacagcccctgtcttttctgttcaatctcagggtaaccttctcccttgtcatctcagcctgagccctggaggctgggcctgcccactccagctccatcccttatttattccttccagcagggccctcttccctaggttcgggccagcaggaggtgccggctggagtctccaccatagactcagtggcctggcctccccagaccccagagccaagaacactaagcactcgccggcccttcggcaccctcgccctccctcccgactcaacccggccgttgcttctgtatatagagaaataagttattggccgcgcgcctcccttcagtccacggtactacccgggcctcccctcgtccctcttctagtggtaccgcccaggccttaatcacccccattccgtgcggtggtatctcccaggctctacattctcgggagcggcgcctcccaagggggtcctgggaccttctcgcgctcctcctggcctctgagggatgcgtcctacccgcgccatcgccccgtggcccaggacggggacctccccttagtccgtcctcccaccgccgggccctgccccgcatcccggccttatgcactgcccctcccacccggccccgcccaggcacggccgaccccgccccgggcaccgcccaccgagccatcctgcctcgcctccccccacgcctgcagcttctcgcgaggggcggcgacggtcccctggtggcaggaggggctccccctgttgcgggtgaggcggctgctctcatattttcagatgttgctgtagaaataaagacggtttaaatctga

SEQ ID NO: 21095 - protein, 622 aa, Homo sapiens; identical to SEQ ID NO: 2691

SEQ ID NO: 21096 - DNA, 2592 bp, Homo sapiens
aggcccggcgcccgcctgcccgcaccctcgtcctcacagacgccacagccatggccatgatggtgtttccgcgggaggagaagctgagccaggatgagatcgtgctgggcaccaaggctgtcatccagggactggagactctgcgtggggagcatcgtgccctgctggctcctctggttgcacctgaggccggcgaagccgagcctggctcgcaggagcgctgcatcctcctgcgtcgctccctggaagccattgagcttgggctgggggaggcccaggaggagaagggggacgtccccaaagacacactggatgacctgttccccaatgaggatgagcagagcccagcccctagcccaggaggaggggatgtgtctggtcagcatgggggctacgagatcccggcccggctccgcaccctgcacaacctggtgatccaatacgcctcacagggccgctacgaggtagctgtgccactctgcaagcaggcactcgaagacctggagaagacgtcaggccacgaccaccctgacgttgccaccatgctgaacatcctggcactggtctatcgggatcagaacaagtacaaggaggctgcccacctgctcaatgatgctctggccatccgggagaaaacactgggcaaggaccacccagccgtggctgcgacactaaacaacctggcagtcctgtatggcaagaggggcaagtacaaggaggctgagccattgtgcaagcgggcactggagatccgggagaaggtcctgggcaagtttcacccagatgtggccaagcagctcagcaacctggccctgctgtgccagaaccagggcaaagctgaggaggtggaatattactatcggcgggcactggagatctatgctacacgcctcgggcccgatgaccccaatgtggccaagaccaagaacaacctggcttcctgctacctgaagcagggcaagtaccaggatgcggagaccttgtacaaggagatcctcacccgcgctcatgagaaagagtttggctctgtcaatggggacaacaagcccatctggatgcacgcagaggagcgggaggaaagcaaggataagcgccgggacagcgccccctatggggaatacggcagctggtacaaggcctgtaaagtagacagccccacagtcaacaccaccctgcgcagcttgggggccctataccggcgccagggcaagctggaagccgcgcacacactagaggactgtgccagccgtaaccgcaagcagggtttggaccccgcaagccagaccaaggtggtagaactgctgaaagatggcagtggcaggcggggagaccgccgcagcagccgagacatggctgggggtgccgggcctcggtctgagtctgacctcgaggacgtgggacctacagctgagtggaatggggatggcagtggctccttgaggcgcagcggttcctttgggaaactccgggatgccctgaggcgcagcagtgagatgctggtaaagaagctgcaggggggcaccccccaggagccccctaaccccaggatgaagcgggccagttccctcaacttcctcaacaagagcgtggaagagccgacccagcctggaggcacaggtctctctgacagccgcactctcagctccagctccatggacctctcccgacgaagctccctggtgggctaatgctgaaggggcagccagtcaccagagcgcccacctggcacacccccctcaccccagccctgcgcatgggcctgctgcttgtcccgcctgtctctcccacagcccctgtcttttctgttcaatctcagggtaaccttctcccttgtcatctcagcctgagccctggaggctgggcctgcccactccagctccatcccttatttattccttccagcagggccctcttccctaggttcgggccagcaggaggtgccggctggagtctccaccatagactcagtggcctggcctccccagaccccagagccaagaacactaagcactcgccggcccttcggcaccctcgccctccctcccgactcaacccggccgttgcttctgtatatagagaaataagttattggccgcgcgcctcccttcagtccacggtactacccgggcctcccctcgtccctcttctagtggtaccgcccaggccttaatcacccccattccgtgcggtggtatctcccaggctctacattctcgggagcggcgcctcccaagggggtcctgggaccttctcgcgctcctcctggcctctgagggatgcgtcctacccgcgccatcgccccgtggcccaggacggggacctccccttagtccgtcctcccaccgccgggccctgccccgcatcccggccttatgcactgcccctcccacccggccccgcccaggcacggccgaccccgccccgggcaccgcccaccgagccatcctgcctcgcctccccccacgcctgcagcttctcgcgaggggcggcgacggtcccctggtggcaggaggggctccccctgttgcgggtgaggcggctgctctcatattttcagatgttgctgtagaaataaagacggtttaaatctga

SEQ ID NO: 21097 - protein, 545 aa, Homo sapiens
MAMMVFPREEKLSQDEIVLGTKAVIQGLETLRGEHRALLAPLVAPEAGEAEPGSQERCILLRRSLEAIELGLGEAQEEKGDVPKDTLDDLFPNEDEQSPAPSPGGGDVSGQHGGYEIPARLRTLHNLVIQYASQGRYEVAVPLCKQALEDLEKTSGHDHPDVATMLNILALVYRDQNKYKEAAHLLNDALAIREKTLGKDHPAVAATLNNLAVLYGKRGKYKEAEPLCKRALEIREKVLGKFHPDVAKQLSNLALLCQNQGKAEEVEYYYRRALEIYATRLGPDDPNVAKTKNNLASCYLKQGKYQDAETLYKEILTRAHEKEFGSVNGDNKPIWMHAEEREESKDKRRDSAPYGEYGSWYKACKVDSPTVNTTLRSLGALYRRQGKLEAAHTLEDCASRNRKQGLDPASQTKVVELLKDGSGRRGDRRSSRDMAGGAGPRSESDLEDVGPTAEWNGDGSGSLRRSGSFGKLRDALRRSSEMLVKKLQGGTPQEPPNPRMKRASSLNFLNKSVEEPTQPGGTGLSDSRTLSSSSMDLSRRSSLVG

SEQ ID NO: 21098 - DNA, 899 bp, Homo sapiens
gcagcagcacgtacaactgttcttgaagctctaacacactaggatgtcatgatcagaagtgaggcaggaaggaacatggcagccactcggtcccaaggaccaagagttcacacaacctttccttcccccactccagaactgcccatccgcacctgggctctgctcatcctcattggggaacaggtcatccagtgtgtctttggggacgtcccccttctcctcctgggaaggaagacaggatgagcatcagggaaggaggcacagggcagccggggtgtccatgggctggggtggagccgaatctgctccatgctgcccctccctgctcccaggcctccttgctgggcaacagtgaccatggtaggagctcacgttaggggaggcgtcttcatccaacttgcggatctggctcatgaacagcaagtgctgcttctcctcctcgagctgggccacggcctgctcactgcgctgcagcttctgctgtgtccccgccagctcctcacgcagccactggttctcctgcaccagacgccgcacctgcgcccgcagcttctgcttctctgattctacagcccccaggtggctcgacaatgccaagatcacctgtgcaaccagcccaggtcttgctggacctacctccagaacatccagaactggtcccttttctccaccgtcatagccaccccttaattccaagcaccagctctcatttgaattccagcagtggcttcctaaccactcattggagagtgattccatcctcgacccactgaggtttattctccacatctcagccagagagagtttttagaaactcaagtcagactgtgttgcctgcctgcttaaagccctccagaggctttctgatttcctgagaataaaacccaaaccaaccaggc

SEQ ID NO: 21099 - protein, 88 aa, Homo sapiens
MNSKCCFSSSSWATACSLRCSFCCVPASSSRSHWFSCTRRRTCARSFCFSDSTAPRWLDNAKITCATSPGLAGPTSRTSRTGPFSPPS

SEQ ID NO: 21100 - DNA, 681 bp, Homo sapiens
ctcacgttaggggaggcgtcttcatccaacttgcggatctggctcatgaacagcaagtgctgcttctcctcctcgagctgggccacggcctgctcactgcgctgcagcttctgctgtgtccccgccagctcctcacgcagccactggttctcctgcaccagacgccgcacctgcgcccgcagcttctgcttctctgattctacagcccccaggtggctcgacaatgccaagatcacctgtgcaaccagcccagcctctgctgccacagccagtaggttactgctccctgcctcagggctagcgcttgcccacagaactctgctagatggctgaaggaccacccaaagactccatccccacttctgctgaggggccacagcatcccctgcctttctgcagctcccaggtcttgctggacctacctccagaacatccagaactggtcccttttctccaccgtcatagccaccccttaattccaagcaccagctctcatttgaattccagcagtggcttcctaaccactcattggagagtgattccatcctcgacccactgaggtttattctccacatctcagccagagagagtttttagaaactcaagtcagactgtgttgcctgcctgcttaaagccctccagaggctttctgatttcctgagaataaaacccaaaccaacc

SEQ ID NO: 21101 - protein, 95 aa, Homo sapiens
MNSKCCFSSSSWATACSLRCSFCCVPASSSRSHWFSCTRRRTCARSFCFSDSTAPRWLDNAKITCATSPASAATASRLLLPASGLALAHRTLLDG

SEQ ID NO: 21102 - DNA, 544 bp, Homo sapiens
tttttttttttttttaaagctagtggttatggaaacacctgtcacttaggcatttgctaaccaacaacaaagtacagggtctcagacagcctggccctctgcaaggacattcactccctgccagttggccgtcagaggtagagaggaccactcaggggccgcacacctggtggagcacgtgcactctcacagagggggaacaatctgcacggagggcatgggcatcaaggccatgtgtgaagctggagcaaagtgggaggtgtgactagctggagacacaactgcagaaatgatcctgaaccgggaaggactgggaaagggtggaggccgggtgtggtggctcacgcctgtaattccagcactttgggaggcccaggtgggaagactgcttaaatcccggacttcatgagaccctgtatctacaaaaaataatttttctttttttttttgagacagtcttgctctgttgcccaggctgcagtgagctgtgacggtgccatagcccttcggcccaggtgacagagtgagacattgtcttaaatta

SEQ ID NO: 21103 - protein, 39 aa, Homo sapiens
MILNREGLGKGGGRVWWLTPVIPALWEAQVGRLLKSRTS

SEQ ID NO: 21104 - DNA, 3756 bp, Homo sapiens
gccagctgtggtggtgtgcacccgtagtcccagttactcaggaggctgagggggaaggaccacttgagcctggaaggtagaggctgcagtgagctgtgacggtgccatagcccttcggcccaggtgacagagtgagacattgtcttaaattaaaaaaaaaaaaaaaaaagagagagcaagaagggaggttggaccctaggcaggaaggcaggaagagactggaaactaaggaaaggagttgcagaggctggggagaggggtgggggttgaggccaaggcctttggatacttttcctgcccctgtggctcctcatgccaactgagcatttgggacacatgccccttccctacctgggagctgcagaaaggcaggggatgctgtggcccctcagcagaagtggggatggagtctttgggtggtccttcagccatctagcagagttctgtgggcaagcgctagccctgaggcagggagcagtaacctactggctgtggcagcagaggcttgagtacaacccagggagagacgaaggaaggggctagtagctcagggaaagcacagcaccccaactagcccttttggggttctcctgatcctagaaggaaggaactggggactcccaagcctcctgggtttgggctttgcattatggtgtgtcgggggccttgaggagattctcccttgacaagcagagaaaagacctgcagctcctcactgtagggccaggcctggcccttcactgggtgccagagcccaactaggcccaggctacagtcataggcgagggggtcgacaggcctccgacccttacctgggctggttgcacaggtgatcttggcattgtcgagccacctgggggctgtagaatcagagaagcagaagctgcgggcgcaggtgcggcgtctggtgcaggagaaccagtggctgcgtgaggagctggcggggacacagcagaagctgcagcgcagtgagcaggccgtggcccagctcgaggaggagaagcagcacttgctgttcatgagccagatccgcaagttggatgaagacgcctcccctaacgaggagaagggggacgtccccaaagacacactggatgacctgttccccaatgaggatgagcagagcccagcccctagcccaggaggaggggatgtgtctggtcagcatgggggctacgagatcccggcccggctccgcaccctgcacaacctggtgatccaatacgcctcacagggccgctacgaggtagctgtgccactctgcaagcaggcactcgaagacctggagaagacgtcaggccacgaccaccctgacgttgccaccatgctgaacatcctggcactggtctatcgggatcagaacaagtacaaggaggctgcccacctgctcaatgatgctctggccatccgggagaaaacactgggcaaggaccacccagccgtggctgcgacactaaacaacctggcagtcctgtatggcaagaggggcaagtacaaggaggctgagccattgtgcaagcgggcactggagatccgggagaaggtcctgggcaagtttcacccagatgtggccaagcagctcagcaacctggccctgctgtgccagaaccagggcaaagctgaggaggtggaatattactatcggcgggcactggagatctatgctacacgcctcgggcccgatgaccccaatgtggccaagaccaagaacaacctggcttcctgctacctgaagcagggcaagtaccaggatgcggagaccttgtacaaggagatcctcacccgcgctcatgagaaagagtttggctctgtcaatggggacaacaagcccatctggatgcacgcagaggagcgggaggaaagcaaggataagcgccgggacagcgccccctatggggaatacggcagctggtacaaggcctgtaaagtagacagccccacagtcaacaccaccctgcgcagcttgggggccctataccggcgccagggcaagctggaagccgcgcacacactagaggactgtgccagccgtaaccgcaagcagggtttggaccccgcaagccagaccaaggtggtagaactgctgaaagatggcagtggcaggcggggagaccgccgcagcagccgagacatggctgggggtgccgggcctcggtctgagtctgacctcgaggacgtgggacctacagctgagtggaatggggatggcagtggctccttgaggcgcagcggttcctttgggaaactccgggatgccctgaggcgcagcagtgagatgctggtaaagaagctgcaggggggcaccccccaggagccccctaaccccaggatgaagcgggccagttccctcaacttcctcaacaagagcgtggaagagccgacccaggtaggggcaggcgggtgtctgggcactgggcagctgcggccggggctgcatgcgtgctgccaagcttccctccagcatgcctcttcatccagcaacagttcctggctctgtctcaggcctactttgggctggacaacggggagacacgaggggaacccagcctctcctgggggtggacgtgtaaacggccagtgctaacaccgtcactgtggagatggacgggagtgtcagggcaccagggtgtggccttgggtcagaactgccattgcctctgcccagctcagggattccggctgcctctgccaggtcagaccccttcaggccagggaggcacagactggcagcagcacagggctgagccacctgccccctctgcccacagcctggaggcacaggtctctctgacagccgcactctcagctccagctccatggacctctcccgacgaagctccctggtgggctaatgctgaaggggcagccagtcaccagagcgcccacctggcacacccccctcaccccagccctgcgcatgggcctgctgcttgtcccgcctgtctctcccacagcccctgtcttttctgttcaatctcagggtaaccttctcccttgtcatctcagcctgagccctggaggctgggcctgcccactccagctccatcccttatttattccttccagcagggccctcttccctaggttcgggccagcaggaggtgccggctggagtctccaccatagactcagtggcctggcctccccagaccccagagccaagaacactaagcactcgccggcccttcggcaccctcgccctccctcccgactcaacccggccgttgcttctgtatatagagaaataagttattggccgcgcgcctcccttcagtccacggtactacccgggcctcccctcgtccctcttctagtggtaccgcccaggccttaatcacccccattccgtgcggtggtatctcccaggctctacattctcgggagcggcgcctcccaagggggtcctgggaccttctcgcgctcctcctggcctctgagggatgcgtcctacccgcgccatcgccccgtggcccaggacggggacctccccttagtccgtcctcccaccgccgggccctgccccgcatcccggccttatgcactgcccctcccacccggccccgcccaggcacggccgaccccgccccgggcaccgcccaccgagccatcctgcctcgcctccccccacgcctgcagcttctcgcgaggggcggcgacggtcccctggtggcaggaggggctccccctgttgcgggtgaggcggctgctctcatattttcagatgttgctgtagaaataaagacggtttaaatctga

SEQ ID NO: 21105 - protein, 521 aa, Homo sapiens
MSQIRKLDEDASPNEEKGDVPKDTLDDLFPNEDEQSPAPSPGGGDVSGQHGGYEIPARLRTLHNLVIQYASQGRYEVAVPLCKQALEDLEKTSGHDHPDVATMLNILALVYRDQNKYKEAAHLLNDALAIREKTLGKDHPAVAATLNNLAVLYGKRGKYKEAEPLCKRALEIREKVLGKFHPDVAKQLSNLALLCQNQGKAEEVEYYYRRALEIYATRLGPDDPNVAKTKNNLASCYLKQGKYQDAETLYKEILTRAHEKEFGSVNGDNKPIWMHAEEREESKDKRRDSAPYGEYGSWYKACKVDSPTVNTTLRSLGALYRRQGKLEAAHTLEDCASRNRKQGLDPASQTKVVELLKDGSGRRGDRRSSRDMAGGAGPRSESDLEDVGPTAEWNGDGSGSLRRSGSFGKLRDALRRSSEMLVKKLQGGTPQEPPNPRMKRASSLNFLNKSVEEPTQVGAGGCLGTGQLRPGLHACCQASLQHASSSSNSSWLCLRPTLGWTTGRHEGNPASPGGGRVNGQC

SEQ ID NO: 21106 - DNA, 449 bp, Homo sapiens
tccaagctccaagggctgtaggcagttttctcacaattggctggggtgcgcagtgctggggtcccaccgactgcctggtgcctagcattcctgggcgccacatggctctcctgctgcccctttagcgtgtcctgctctccaggtcccagtgcctttgctcatgctggctttttgccatgggaaccttttctagccctcttgtgtttgggcaaactcactttctggcaaagcccctcctccagccatggtaggagctcacgttaggggaggcgtcttcatccaacttgcggatctggctcatgaacagcaagtgctgcttctcctcctcgagctgggccacggcctgctcactgcgctgcagcttctgctgtgtccccgccagctcctcacgcagccactggttctcctgcaccagacgccgcacctgcgcccgcagcttctgcttctct

SEQ ID NO: 21107 - protein, 67 aa, Homo sapiens
MVGAHVRGGVFIQLADLAHEQQVLLLLLELGHGLLTALQLLLCPRQLLTQPLVLLHQTPHLRPQLLL

SEQ ID NO: 21108 - DNA, 605 bp, Homo sapiens
atgcgtgctgccaagcttccctccagcatgcctcttcatccagcaacagttcctggctctgtctcaggcctactttgggctggacaacggggagacacgaggggaacccagcgcctcccttcagtccacggtactacccgggcctcccctcgtccctcttctagtggtaccgcccaggccttaatcacccccattccgtgcggtggtatctcccaggctctacattctcgggagcggcgcctcccaagggggtcctgggaccttctcgcgctcctcctggcctctgagggatgcgtcctacccgcgccatcgccccgtggcccaggacggggacctccccttagtccgtcctcccaccgccgggccctgccccgcatcccggccttatgcactgcccctcccacccggccccgcccaggcacggccgaccccgccccgggcaccgcccaccgagccatcctgcctcgcctccccccacgcctgcagcttctcgcgaggggcggcgacggtcccctggtggcaggaggggctccccctgttgcgggtgaggcggctgctctcatattttcagatgttgctgtagaaataaagacggtttaaatctg

SEQ ID NO: 21109 - protein, 199 aa, Homo sapiens
MRAAKLPSSMPLHPATVPGSVSGLLWAGQRGDTRGTQRLPSVHGTTRASPRPSSSGTAQALITPIPCGGISQALHSRERRLPRGSWDLLALLLASEGCVLPAPSPRGPGRGPPLSPSSHRRALPRIPALCTAPPTRPRPGTADPAPGTAHRAILPRLPPRLQLLARGGDGPLVAGGAPPVAGEAAALIFSDVAVEIKTV

SEQ ID NO: 21110 - DNA, 514 bp, Homo sapiens
ccagctccatggacctctcccgacgaagctccctggtgggctaatgctgaaggggcagccagtcaccagagcgcccacctggcacacccccctcaccccagccctgcgcatgggcctgctgcttgtcccgcctgtctctcccacagcccctgtcttttctgttcaatctcagggtaaccttctcccttgtcatctcagcctgagccctggaggctgggcctgcccactccagctccatcccttatttattccttccagcagggccctcttccctaggttcgggccagcaggaggtgccggctggagtctccaccatagactcagtggcctggcctccccagaccccagagccaagaacactaagcactcgccggcccttcggcaccctcgcccagcttctcgcgaggggcggcgacggtcccctggtggcaggaggggctccccctgttgcgggtgaggcggctgctctcatattttcagatgttgctgtagaaataaagacggtttaaatctg

SEQ ID NO: 21111 - protein, 137 aa, Homo sapiens
MLKGQPVTRAPTWHTPLTPALRMGLLLVPPVSPTAPVFSVQSQGNLLPCHLSLSPGGWACPLQLHPLFIPSSRALFPRFGPAGGAGWSLHHRLSGLASPDPRAKNTKHSPALRHPRPASREGRRRSPGGRRGSPCCG

SEQ ID NO: 21112 - DNA, 1948 bp, Homo sapiens
ggcctctggggcggagcggccaccatcttggaacgggaggcggagcagagtcgactgggagcgaccgagcgggccgccgccgccgccatgaaccccgaatatgactacctgtttaagctgcttttgattggcgactcaggcgtgggcaagtcatgcctgctcctgcggtttgctgatgacacgtacacagagagctacatcagcaccatcggggtggacttcaagatccgaaccatcgagctggatggcaaaactatcaaacttcagatctgggacacagcgggccaggaacggttccggaccatcacttccagctactaccggggggctcatggcatcatcgtggtgtatgacgtcactgaccaggaatcctacgccaacgtgaagcagtggctgcaggagattgaccgctatgccagcgagaacgtcaataagctcctggtgggcaacaagagcgacctcaccaccaagaaggtggtggacaacaccacagccaaggagtttgcagactctctgggcatccccttcttggagacgagcgccaagaatgccaccaatgtcgagcaggcgttcatgaccatggctgctgaaatcaaaaagcggatggggcctggagcagcctctgggggcgagcggcccaatctcaagatcgacagcacccctgtaaagccggctggcggtggctgttgctaggaggggcacatggagtgggacaggagggggcaccttctccagatgatgtccctggagggggcaggaggtacctccctctccctctcctggggcatttgagtctgtggctttggggtgtcctgggctccccatctccttctggcccatctgcctgctgccctgagccccggttctgtcagggtccctaagggaggacactcagggcctgtggccaggcagggcggaggcctgctgtgctgttgcctctaggtgactttccaagatgcccccctacacacctttctttggaacgagggctcttctgtcggtgtccctcccacccccatgtatgctgcactgggttctctccttcttcttcctgctgtcctgcccaagaactgagggtctccccggcctctactgccctggctgcagtcagtgcccagggcgaggaatgtggccaggggatccaggacctgggatccagggccctgggctggacctcaggacaggcatggaggccacaggggcccagcagcccaccctttcctctccccactgcctcctctcccttcctacactcccagctcgagccgtccagctgcggtgggatctgagtatatctagggcgggtgggcgggtagcagtgctgggcctgtgtcttgagcctggagggagtctgctcctgccgccctctgccctgccagagacagacccatgcgctgcctgcccaccgtgcccctttgtccccatgtcaggcggaggcggaaggcccaccgtgccagaggctgggcaccagccttaaccctcactctgctagcacctcctccctttccccaaggtagcacatctggctcactccccactccgtctctggagcccaccagggaaggccctcatcccctgccgctacttctctggggaatgtgggttccatccaggattgggggcctctctgctcacccactctgcacccaggatcctagtcccctgccctctggcacagctgcttcctgcaagaaagcaagtctttggtctccctgagaagccatgtccctcgtgctgtctcttgcctgtcccacctgtgccctgccctccagcttgtatttaagtccctgggctgcccccttggggtgccccccgctcccaggttcccctctggtgtcatgtcaggcattttgcaaggaaaagccacttggggaaagatggaaaaggacaaaaaaaattaataaatttccattggccctcgggtgagctgagggtttttgcaaggaag

SEQ ID NO: 21113 - protein, 201 aa, Homo sapiens; identical to SEQ ID NO: 2693

SEQ ID NO: 21114 - DNA, 1849 bp, Homo sapiens
ctctggggcggagcggccaccatcttggaacgggaggcggagcagagtcgactgggagcgaccgagcgggccgccgccgccgccatgaaccccgaatatgactacctgtttaagctgcttttgattggcgactcaggcgtgggcaagtcatgcctgctcctgcggtttgctgatgacacgtacacagagagctacatcagcaccatcggggtggacttcaagatccgaaccatcgagctggatggcaaaactatcaaacttcagatcgaatcctacgccaacgtgaagcagtggctgcaggagattgaccgctatgccagcgagaacgtcaataagctcctggtgggcaacaagagcgacctcaccaccaagaaggtggtggacaacaccacagccaaggagtttgcagactctctgggcatccccttcttggagacgagcgccaagaatgccaccaatgtcgagcaggcgttcatgaccatggctgctgaaatcaaaaagcggatggggcctggagcagcctctgggggcgagcggcccaatctcaagatcgacagcacccctgtaaagccggctggcggtggctgttgctaggaggggcacatggagtgggacaggagggggcaccttctccagatgatgtccctggagggggcaggaggtacctccctctccctctcctggggcatttgagtctgtggctttggggtgtcctgggctccccatctccttctggcccatctgcctgctgccctgagccccggttctgtcagggtccctaagggaggacactcagggcctgtggccaggcagggcggaggcctgctgtgctgttgcctctaggtgactttccaagatgcccccctacacacctttctttggaacgagggctcttctgtcggtgtccctcccacccccatgtatgctgcactgggttctctccttcttcttcctgctgtcctgcccaagaactgagggtctccccggcctctactgccctggctgcagtcagtgcccagggcgaggaatgtggccaggggatccaggacctgggatccagggccctgggctggacctcaggacaggcatggaggccacaggggcccagcagcccaccctttcctctccccactgcctcctctcccttcctacactcccagctcgagccgtccagctgcggtgggatctgagtatatctagggcgggtgggcgggtagcagtgctgggcctgtgtcttgagcctggagggagtctgctcctgccgccctctgccctgccagagacagacccatgcgctgcctgcccaccgtgcccctttgtccccatgtcaggcggaggcggaaggcccaccgtgccagaggctgggcaccagccttaaccctcactctgctagcacctcctccctttccccaaggtagcacatctggctcactccccactccgtctctggagcccaccagggaaggccctcatcccctgccgctacttctctggggaatgtgggttccatccaggattgggggcctctctgctcacccactctgcacccaggatcctagtcccctgccctctggcacagctgcttcctgcaagaaagcaagtctttggtctccctgagaagccatgtccctcgtgctgtctcttgcctgtcccacctgtgccctgccctccagcttgtatttaagtccctgggctgcccccttggggtgccccccgctcccaggttcccctctggtgtcatgtcaggcattttgcaaggaaaagccacttggggaaagatggaaaaggacaaaaaaaattaataaatttccattggccctcgggtgagctgagggtttttgcaaggaag

SEQ ID NO: 21115 - protein, 169 aa, Homo sapiens
MNPEYDYLFKLLLIGDSGVGKSCLLLRFADDTYTESYISTIGVDFKIRTIELDGKTIKLQIESYANVKQWLQEIDRYASENVNKLLVGNKSDLTTKKVVDNTTAKEFADSLGIPFLETSAKNATNVEQAFMTMAAEIKKRMGPGAASGGERPNLKIDSTPVKPAGGGCC

SEQ ID NO: 21116 - DNA, 2048 bp, Homo sapiens
gggcggagcggccaccatcttggaacgggaggcggagcagagtcgactgggagcgaccgagcgggccgccgccgccgccatgaaccccgaatatgactacctgtttaagctgcttttgattggcgactcaggcgtgggcaagtcatgcctgctcctgcggtttgctgatgacacgtacacagagagctacatcagcaccatcggggtggacttcaagatccgaaccatcgagctggatggcaaaactatcaaacttcagatctgggacacagcgggccaggaacggttccggaccatcacttccagctactaccggggggctcatggcatcatcgtggtgtatgacgtcactgaccaggaatcctacgccaacgtgaagcagtggctgcaggagattgaccgctatgccagcgagaacgtcaataagctcctggtgggcaacaagagcgacctcaccaccaagaaggtggtggacaacaccacagccaaggtagcagacgggccggtctgcccggggtcggggcgctggggcctgctgcccctcacctgctctcccctcctcttctctcccctcctcttctctcctctcccttgtcaggagtttgcagactctctgggcatccccttcttggagacgagcgccaagaatgccaccaatgtcgagcaggcgttcatgaccatggctgctgaaatcaaaaagcggatggggcctggagcagcctctgggggcgagcggcccaatctcaagatcgacagcacccctgtaaagccggctggcggtggctgttgctaggaggggcacatggagtgggacaggagggggcaccttctccagatgatgtccctggagggggcaggaggtacctccctctccctctcctggggcatttgagtctgtggctttggggtgtcctgggctccccatctccttctggcccatctgcctgctgccctgagccccggttctgtcagggtccctaagggaggacactcagggcctgtggccaggcagggcggaggcctgctgtgctgttgcctctaggtgactttccaagatgcccccctacacacctttctttggaacgagggctcttctgtcggtgtccctcccacccccatgtatgctgcactgggttctctccttcttcttcctgctgtcctgcccaagaactgagggtctccccggcctctactgccctggctgcagtcagtgcccagggcgaggaatgtggccaggggatccaggacctgggatccagggccctgggctggacctcaggacaggcatggaggccacaggggcccagcagcccaccctttcctctccccactgcctcctctcccttcctacactcccagctcgagccgtccagctgcggtgggatctgagtatatctagggcgggtgggcgggtagcagtgctgggcctgtgtcttgagcctggagggagtctgctcctgccgccctctgccctgccagagacagacccatgcgctgcctgcccaccgtgcccctttgtccccatgtcaggcggaggcggaaggcccaccgtgccagaggctgggcaccagccttaaccctcactctgctagcacctcctccctttccccaaggtagcacatctggctcactccccactccgtctctggagcccaccagggaaggccctcatcccctgccgctacttctctggggaatgtgggttccatccaggattgggggcctctctgctcacccactctgcacccaggatcctagtcccctgccctctggcacagctgcttcctgcaagaaagcaagtctttggtctccctgagaagccatgtccctcgtgctgtctcttgcctgtcccacctgtgccctgccctccagcttgtatttaagtccctgggctgcccccttggggtgccccccgctcccaggttcccctctggtgtcatgtcaggcattttgcaaggaaaagccacttggggaaagatggaaaaggacaaaaaaaattaataaatttccattggccctcgggtgagctgagggtttttgcaaggaag

SEQ ID NO: 21117 - protein, 237 aa, Homo sapiens
MNPEYDYLFKLLLIGDSGVGKSCLLLRFADDTYTESYISTIGVDFKIRTIELDGKTIKLQIWDTAGQERFRTITSSYYRGAHGIIVVYDVTDQESYANVKQWLQEIDRYASENVNKLLVGNKSDLTTKKVVDNTTAKVADGPVCPGSGRWGLLPLTCSPLLFSPLLFSPLPCQEFADSLGIPFLETSAKNATNVEQAFMTMAAEIKKRMGPGAASGGERPNLKIDSTPVKPAGGGCC

SEQ ID NO: 21118 - DNA, 700 bp, Homo sapiens
agcgaccgagcgggccgccgccgccgccatgaaccccgaatatgactacctgtttaagctgcttttgattggcgactcaggcgtgggcaagtcatgcctgctcctgcggtttgctgatgacacgtacacagagagctacatcagcaccatcggggtggacttcaagatccgaaccatcgagctggatggcaaaactatcaaacttcagatcgctgggcaccagccttaaccctcactctgctagcacctcctccctttccccaaggtagcacatctggctcactccccactccgtctctggagcccaccagggaaggccctcatcccctgccgctacttctctggggaatgtgggttccatccaggattgggggcctctctgctcacccactctgcacccaggatcctagtcccctgccctctggcacagctgcttcctgcaagaaagcaagtctttggtctccctgagaagccatgtccctcgtgctgtctcttgcctgtcccacctgtgccctgccctccagcttgtatttaagtccctgggctgcccccttggggtgccccccgctcccaggttcccctctggtgtcatgtcaggcattttgcaaggaaaagccacttggggaaagatggaaaaggacaaaaaaaattaataaatttccattggccctcgggtgagctgagggtttttgcaaggaag

SEQ ID NO: 21119 - protein, 66 aa, Homo sapiens
MNPEYDYLFKLLLIGDSGVGKSCLLLRFADDTYTESYISTIGVDFKIRTIELDGKTIKLQIAGHQP

SEQ ID NO: 21120 - DNA, 1928 bp, Homo sapiens
atctcccgtccgctctctctttgcttctcacatgtggttagggcctgcaagtgtctcagggagagagacagctgcagggagcagagctggcaggcccaagttggggcagctgttgaggtgttggggcagctggcaggctgctggggctgttctgggtctcggatggaagagggcagggaggaaggttcagcctggagcagagggcttcctctgcatctctgcatcgctgagcccaggacttaaggggcccggagctgtactgttcccctcagagaaggtcttctccaggcctggggtaggggtgacagttgggagcaaaataactttggcccctggccccctttaggaatcctacgccaacgtgaagcagtggctgcaggagattgaccgctatgccagcgagaacgtcaataagctcctggtgggcaacaagagcgacctcaccaccaagaaggtggtggacaacaccacagccaaggagtttgcagactctctgggcatccccttcttggagacgagcgccaagaatgccaccaatgtcgagcaggcgttcatgaccatggctgctgaaatcaaaaagcggatggggcctggagcagcctctgggggcgagcggcccaatctcaagatcgacagcacccctgtaaagccggctggcggtggctgttgctaggaggggcacatggagtgggacaggagggggcaccttctccagatgatgtccctggagggggcaggaggtacctccctctccctctcctggggcatttgagtctgtggctttggggtgtcctgggctccccatctccttctggcccatctgcctgctgccctgagccccggttctgtcagggtccctaagggaggacactcagggcctgtggccaggcagggcggaggcctgctgtgctgttgcctctaggtgactttccaagatgcccccctacacacctttctttggaacgagggctcttctgtcggtgtccctcccacccccatgtatgctgcactgggttctctccttcttcttcctgctgtcctgcccaagaactgagggtctccccggcctctactgccctggctgcagtcagtgcccagggcgaggaatgtggccaggggatccaggacctgggatccagggccctgggctggacctcaggacaggcatggaggccacaggggcccagcagcccaccctttcctctccccactgcctcctctcccttcctacactcccagctcgagccgtccagctgcggtgggatctgagtatatctagggcgggtgggcgggtagcagtgctgggcctgtgtcttgagcctggagggagtctgctcctgccgccctctgccctgccagagacagacccatgcgctgcctgcccaccgtgcccctttgtccccatgtcaggcggaggcggaaggcccaccgtgccagaggctgggcaccagccttaaccctcactctgctagcacctcctccctttccccaaggtagcacatctggctcactccccactccgtctctggagcccaccagggaaggccctcatcccctgccgctacttctctggggaatgtgggttccatccaggattgggggcctctctgctcacccactctgcacccaggatcctagtcccctgccctctggcacagctgcttcctgcaagaaagcaagtctttggtctccctgagaagccatgtccctcgtgctgtctcttgcctgtcccacctgtgccctgccctccagcttgtatttaagtccctgggctgcccccttggggtgccccccgctcccaggttcccctctggtgtcatgtcaggcattttgcaaggaaaagccacttggggaaagatggaaaaggacaaaaaaaattaataaatttccattggccctcgggtgagctgagggtttttgcaaggaag

SEQ ID NO: 21121 - protein, 54 aa, Homo sapiens
MPARTSISSWWATRATSPPRRWWTTPQPRSLQTLWASPSWRRAPRMPPMSSRRS

SEQ ID NO: 21122 - DNA, 606 bp, Homo sapiens
aggagtttgcagactctctgggcatccccttcttggagacgagcgccaagaatgccaccaatgtcgagcaggcgttcatgaccatggctgctgaaatcaaaaagcggatggggcctggagcagcctctgggggcgagcggcccaatctcaagatcgacagcacccctgtaaagccggctggcggtggctgttgctaggaggggcacatggagtgggacaggagggggcaccttctccagatgatgtccctggagggggcaggaggtacctccctctccctctcctggggcatttgagtctgtggctttggggtgtcctgggctccccatctccttctggcccatctgcctgctgccctgagccccggttctgtcagggtccctaagggaggacactcagggcctgtggccaggcagggcggaggcctgctgtgctgttgcctctaggtgactttccaagatgcccccctacacacctttctttggaacgagggctcttctgtcggcattttgcaaggaaaagccacttggggaaagatggaaaaggacaaaaaaaattaataaatttccattggccctcgggtgagctgagggtttttgcaaggaa

SEQ ID NO: 21123 - protein, 41 aa, Homo sapiens
MPPYTPFFGTRALLSAFCKEKPLGERWKRTKKINKFPLALG

SEQ ID NO: 21124 - DNA, 351 bp, Homo sapiens
ggagtttgcagactctctgggcatccccttcttggagacgagcgccaagaatgccaccaatgtcgagcaggcgttcatgaccatggctgctgaaatcaaaaagcggatggggcctggagcagcctctgggggcgagcggcccaatctcaagatcgacagcacccctgccctccagcttgtatttaagtccctgggctgcccccttggggtgccccccgctcccaggttcccctctggtgtcatgtcaggcattttgcaaggaaaagccacttggggaaagatggaaaaggacaaaaaaaattaataaatttccattggccctcgggtgagctgagggtttttgcaaggaag

SEQ ID NO: 21125 - protein, 75 aa, Homo sapiens
MTMAAEIKKRMGPGAASGGERPNLKIDSTPALQLVFKSLGCPLGVPPAPRFPSGVMSGILQGKATWGKMEKDKKN

SEQ ID NO: 21126 - DNA, 1296 bp, Homo sapiens
cttggagacgagcgccaagaatgccaccaatgtcgagcaggcgttcatgaccatggctgctgaaatcaaaaagcggatggggcctggagcagcctctgggggcgagcggcccaatctcaagatcgacagcacccctgtaaagccggctggcggtggctgttgctaggaggggcacatggagtgggacaggagggggcaccttctccagatgatgtccctggagggggcaggaggtacctccctctccctctcctggggcatttgagtctgtggctttggggtgtcctgggctccccatctccttctggcccatctgcctgctgccctgagccccggttctgtcagggtccctaagggaggacactcagggcctgtggccaggcagggcggaggcctgctgtgctgttgcctctaggtgactttccaagatgcccccctacacacctttctttggaacgagggctcttctgtcggtgtccctcccacccccatgtatgctgcactgggttctctccttcttcttcctgctgtcctgcccaagaactgagggtctccccggcctctactgccctggctgcagtcagtgcccagggcgaggaatgtggccaggggatccaggacctgggatccagggccctgggctggacctcaggacaggcatggaggccacaggggcccagcagcccaccctttcctctccccactgcctcctctcccttcctacactcccagctcgagccgtccagctgcggtgggatctgagtatatctagggcgggtgggcgggtagcagtgctgggcctgtgtcttgagcctggagggagtctgctcctgccgccctctgccctgccagagacagacccatgcgctgcctgcccaccgtgcccctttgtccccatgtcaggcggaggcggaaggcccaccgtgccagaggctgggcaccagccttaaccctcactctgctagcacctcctctctgctcacccactctgcacccaggatcctagtcccctgccctctggcacagctgcttcctgcaagaaagcaagtctttggtctccctgagaagccatgtccctcgtgctgtctcttgcctgtcccacctgtgccctgccctccagcttgtatttaagtccctgggctgcccccttggggtgccccccgctcccaggttcccctctggtgtcatgtcaggcattttgcaaggaaaagccacttggggaaagatggaaaaggacaaaaaaaattaataaatttccattggccctcgggtgagctgagggtttttgcaaggaag

SEQ ID NO: 21127 - protein, 47 aa, Homo sapiens
MRCLPTVPLCPHVRRRRKAHRARGWAPALTLTLLAPPLCSPTLHPGS

SEQ ID NO: 21128 - DNA, 1165 bp, Homo sapiens
cttggagacgagcgccaagaatgccaccaatgtcgagcaggcgttcatgaccatggctgctgaaatcaaaaagcggatggggcctggagcagcctctgggggcgagcggcccaatctcaagatcgacagcacccctgtaaagccggctggcggtggctgttgctaggaggggcacatggagtgggacaggagggggcaccttctccagatgatgtccctggagggggcaggaggtacctccctctccctctcctggggcatttgagtctgtggctttggggtgtcctgggctccccatctccttctggcccatctgcctgctgccctgagccccggttctgtcagggtccctaagggaggacactcagggcctgtggccaggcagggcggaggcctgctgtgctgttgcctctaggtgactttccaagatgcccccctacacacctttctttggaacgagggctcttctgtcggtgtccctcccacccccatgtatgctgcactgggttctctccttcttcttcctgctgtcctgcccaagaactgagggtctccccggcctctactgccctggctgcagtcagtgcccagggcgaggaatgtggccaggggatccaggacctgggatccagggccctgggctggacctcaggacaggcatggaggccacaggggcccagcagcccaccctttcctctccccactgcctcctctcccttcctacactcccagctcgagccgtccagctgcggtgggatctgagtatatctagggcgggtgggcgggtagcagtgctgggcctgtgtcttgagcctggagggagtctgctcctgccgccctctgccctgccagagacagacccatgcgctgcctgcccaccgtgcccctttgtccccatgtcaggcggaggcggaaggcccaccgtgccagaggctgggcaccagccttaaccctcactctgctagcacctcctgtgccctgccctccagcttgtatttaagtccctgggctgcccccttggggtgccccccgctcccaggttcccctctggtgtcatgtcaggcattttgcaaggaaaagccacttggggaaagatggaaaaggacaaaaaaaattaataaatttccattggccctcgggtgagctgagggtttttgcaaggaag

SEQ ID NO: 21129 - protein, 45 aa, Homo sapiens
MRCLPTVPLCPHVRRRRKAHRARGWAPALTLTLLAPPVPCPPACI

SEQ ID NO: 21130 - DNA, 1356 bp, Homo sapiens
gcgagggagccgcgggcgagggatcgcaggatgagcgatcggggcccgggcagccggcagcggacgcgccccccgagcccaccggcccgcgccccgcgccccccacggccccgcggtcccggtcccggccgcatcacccacgtcccccgagccccacgggccatgcccggccggccctaagcgcgggccggggggcgtccccttgcgcccgggccccgcgctggcgccccccgggccgccgcccggcgcgggggccatggcgttcaccttcgccgcgttctgctacatgctcaccctggtgctgtgcgcctccctcatcttctttgtcatctggcacatcatagcctttgatgagctgcggaccgacttcaagaaccccatcgaccaggggaaccctgcgcgggcacgcgagcgtttaaaaaacatcgaacgcatctgctgcctcctgaggaagctggtggtcccagaatactccatccacggcctcttctgtctgatgtttctgtgtgcagcagagtgggtgaccctgggcctcaacatccccctcctcttctaccacctctggaggtacttccaccgtcctgcagatggctctgaggtcatgtatgatgcggtctccatcatgaatgctgacattctcaactactgccagaaggagtcctggtgcaaacttgccttctacctgctctccttcttctattacctgtacagtatggtttatacgttggtgagtttctaagggggaagccggccagggagcgagcccagaacggaccggacgcctgtgcacccccagccctgccccttggccgcagaggcctcagccctggggagggagggggcactggtgcccccagcctctccaacccccaaactgctgctgcggggaaccccccccaccccgccttcagagccctcccccttggactagagcggctgggcagagctctaaacaggggcaggggctcctctgccagcctgtgggcatggcagtcattcctggaaggggcaggacctccggccttgtccatttcgggggaaacttgggccctgccaaggggcagagcttgaccctggaaattctgggccatccccctccacccccaccctgaggctccccctgcaggtgggggggtacccgcaccgggaatgagcaggctcagcaggggggcagccccacccctagtctgccctcccctctcccccaggctctttctccagccctgtctccatctgccccaacctcagcccaccttgtctcttggacctattttctatgtcgcctggaggagtccggcaccccctccccggccatttgtgacaaaatatgaataaactactgcaaatatgtgggcc

SEQ ID NO: 21131 - protein, 160 aa, Homo sapiens; identical to SEQ ID NO: 2695

SEQ ID NO: 21132 - DNA, 1532 bp, Homo sapiens
gagggagccgcgggcgagggatcgcaggatgagcgatcggggcccgggcagccggcagcggacgcgccccccgagcccaccggcccgcgccccgcgccccccacggccccgcggtcccggtcccggccgcatcacccacgtcccccgagccccacgggccatgcccggccggccctaagcgcgggccggggggcgtccccttgcgcccgggccccgcgctggcgccccccgggccgccgcccggcgcgggggccatggcgttcaccttcgccgcgttctgctacatgctcaccctggtgctgtgcgcctccctcatcttctttgtcatctggcacatcatagcctttgatgagctgcggaccgacttcaagaaccccatcgaccaggggaaccctgcgcgggcacgcgagcgtttaaaaaacatcgaacgcatctgctgcctcctgaggaagctggtggtcccagaatactccatccacggcctcttctgtctgatgtttctgtgtgcagcagagtgggtgaccctgggcctcaacatccccctcctcttctaccacctctggaggtacttccaccgtcctgcagatggctctgaggtcatgtatgatgcggtctccatcatgaatgctgacattctcaactactgccagaaggagtcctggtgcaaacttgccttctacctgctctccttcttctattacctgtacaggtgaggccttgcccacagcagtcagaactcagggaagggatgtcccagcatcacgcttccaatcccaagttcctgccttttgcccctgaggactgagggcagcccagggtgtgaccaggtgggcatctgggtggctgtgtgtgtgcagggctaggctcactggctcatcttcctacagtatggtttatacgttggtgagtttctaagggggaagccggccagggagcgagcccagaacggaccggacgcctgtgcacccccagccctgccccttggccgcagaggcctcagccctggggagggagggggcactggtgcccccagcctctccaacccccaaactgctgctgcggggaaccccccccaccccgccttcagagccctcccccttggactagagcggctgggcagagctctaaacaggggcaggggctcctctgccagcctgtgggcatggcagtcattcctggaaggggcaggacctccggccttgtccatttcgggggaaacttgggccctgccaaggggcagagcttgaccctggaaattctgggccatccccctccacccccaccctgaggctccccctgcaggtgggggggtacccgcaccgggaatgagcaggctcagcaggggggcagccccacccctagtctgccctcccctctcccccaggctctttctccagccctgtctccatctgccccaacctcagcccaccttgtctcttggacctattttctatgtcgcctggaggagtccggcaccccctccccggccatttgtgacaaaatatgaataaactactgcaaatatgtgggcc

SEQ ID NO: 21133 - protein, 152 aa, Homo sapiens
MAFTFAAFCYMLTLVLCASLIFFVIWHIIAFDELRTDFKNPIDQGNPARARERLKNIERICCLLRKLVVPEYSIHGLFCLMFLCAAEWVTLGLNIPLLFYHLWRYFHRPADGSEVMYDAVSIMNADILNYCQKESWCKLAFYLLSFFYYLYR

SEQ ID NO: 21134 - DNA, 1089 bp, Homo sapiens
cgcggctgcttcccggccgtgccgacagtgccgcagagatcgctctggcgccccctggcggccacatgtggagcggtgggagctgctccagtacctgcttctccgccaccccatcgcggccttttccttcccccaacagcgcgagcgtttaaaaaacatcgaacgcatctgctgcctcctgaggaagctggtggtcccagaatactccatccacggcctcttctgtctgatgtttctgtgtgcagcagagtgggtgaccctgggcctcaacatccccctcctcttctaccacctctggaggtacttccaccgtcctgcagatggctctgaggtcatgtatgatgcggtctccatcatgaatgctgacattctcaactactgccagaaggagtcctggtgcaaacttgccttctacctgctctccttcttctattacctgtacagtatggtttatacgttggtgagtttctaagggggaagccggccagggagcgagcccagaacggaccggacgcctgtgcacccccagccctgccccttggccgcagaggcctcagccctggggagggagggggcactggtgcccccagcctctccaacccccaaactgctgctgcggggaaccccccccaccccgccttcagagccctcccccttggactagagcggctgggcagagctctaaacaggggcaggggctcctctgccagcctgtgggcatggcagtcattcctggaaggggcaggacctccggccttgtccatttcgggggaaacttgggccctgccaaggggcagagcttgaccctggaaattctgggccatccccctccacccccaccctgaggctccccctgcaggtgggggggtacccgcaccgggaatgagcaggctcagcaggggggcagccccacccctagtctgccctcccctctcccccaggctctttctccagccctgtctccatctgccccaacctcagcccaccttgtctcttggacctattttctatgtcgcctggaggagtccggcaccccctccccggccatttgtgacaaaatatgaataaactactgcaaatatgtgggcc

SEQ ID NO: 21135 - protein, 80 aa, Homo sapiens
MFLCAAEWVTLGLNIPLLFYHLWRYFHRPADGSEVMYDAVSIMNADILNYCQKESWCKLAFYLLSFFYYLYSMVYTLVSF

SEQ ID NO: 21136 - DNA, 541 bp, Homo sapiens
ccccagctcaccctctgttgccccagtctctcttcctcacccctgcctcaggatgcctggctctgagccacccctgctttggcgcaggttctccccggaggtgctgggcctgtgtgcaagcacagcgctggtgtgggtggtgatggaggtgctggccctgctcctgggcctctacctggccaccgtgcgcagtgacctgagcacctttcacctgctggcctacagtggctacaaatacgtgggaatgatcctcagtgtgctcacggggctgctgttcggcagcgatggctactacgtggcgctggcctggacctcatcggcgctcatgtacttcattgtgcgctctttgcggacagcagccctgggccccgacagcatggggggccccgtcccccggcagcgtctccagctctacctgactctgggagctgcagccttccagcccctcatcatatactggctgactttccacctggtccggtgaccccctggccccagatggcactgagtttttcattcattgaagatttgatttccttga

SEQ ID NO: 21137 - protein, 143 aa, Homo sapiens
MPGSEPPLLWRRFSPEVLGLCASTALVWVVMEVLALLLGLYLATVRSDLSTFHLLAYSGYKYVGMILSVLTGLLFGSDGYYVALAWTSSALMYFIVRSLRTAALGPDSMGGPVPRQRLQLYLTLGAAAFQPLIIYWLTFHLVR

SEQ ID NO: 21138 - DNA, 1110 bp, Homo sapiens
aggcgcgggggatgacgccacggacatggtggccgagaccggcggggtgggggacgtgtcgcgcggccgggtggcctcggtcggtaccctgggcgcggagcagctgcctcattagtattcgtacccacgaggcggcgcagcgggccctcggggacagcgagcgtcgcggccatggcttatcactcgggctacggagcccacggctccaagcacagggcccgggcagccccggatccccctcccctcttcgatgacacaagcggtggttattccagccagcccgggggatacccagccacaggagcagacgtggccttcagtgtcaaccacttgcttggggacccaatggccaatgtggctatggcctatggcagctccatcgcatcccatgggaaggacatggtgcacaaggagctgcaccgttttgtgtctgtgagcaaactcaagtatttttttgctgtggacacagcctacgtggccaagaagctagggctgctggtcttcccctacacacaccagaactgggaagtgcagtacagtcgtgatgctcctctgcccccccggcaagacctcaacgcccctgacctctatatccccacgatggccttcattacttacgtgctcctggctgggatggcactgggcattcagaaaaggttctccccggaggtgctgggcctgtgtgcaagcacagcgctggtgtgggtggtgatggaggtgctggccctgctcctgggcctctacctggccaccgtgcgcagtgacctgagcacctttcacctgctggcctacagtggctacaaatacgtgggaatgatcctcagtgtgctcacggggctgctgttcggcagcgatggctactacgtggcgctggcctggacctcatcggcgctcatgtacttcattgtgcgctctttgcggacagcagccctgggccccgacagcatggggggccccgtcccccggcagcgtctccagctctacctgactctgggagctgcagccttccagcccctcatcatatactggctgactttccacctggtccggtgaccccctggccccagatggcactgagtttttcattcattgaagatttgatttccttga

SEQ ID NO: 21139 - protein, 293 aa, Homo sapiens
MAYHSGYGAHGSKHRARAAPDPPPLFDDTSGGYSSQPGGYPATGADVAFSVNHLLGDPMANVAMAYGSSIASHGKDMVHKELHRFVSVSKLKYFFAVDTAYVAKKLGLLVFPYTHQNWEVQYSRDAPLPPRQDLNAPDLYIPTMAFITYVLLAGMALGIQKRFSPEVLGLCASTALVWVVMEVLALLLGLYLATVRSDLSTFHLLAYSGYKYVGMILSVLTGLLFGSDGYYVALAWTSSALMYFIVRSLRTAALGPDSMGGPVPRQRLQLYLTLGAAAFQPLIIYWLTFHLVR

SEQ ID NO: 21140 - DNA, 954 bp, Homo sapiens
aggcgcgggggatgacgccacggacatggtggccgagaccggcggggtgggggacgtgtcgcgcggccgggtggcctcggtcggtaccctgggcgcggagcagctgcctcattagtattcgtacccacgaggcggcgcagcgggccctcggggacagcgagcgtcgcggccatggcttatcactcgggctacggagcccacggctccaagcacagggcccgggcagccccggatccccctcccctcttcgatgacacaagcggtggttattccagccagcccgggggatacccagccacaggagcagacgtggccttcagtgtcaaccacttgcttggggacccaatggccaatgtggctatggcctatggcagctccatcgcatcccatgggaaggacatggtgcacaaggagctgcaccgttttgtgtctgtgagcaaactcaagtatttttttgctgtggacacagcctacgtggccaagaagctagggctgctggtcttcccctacacacaccagaactgggaagtgcagtacagtcgtgatgctcctctgcccccccggcaagacctcaacgcccctgacctctatatccccacgatggccttcattacttacgtgctcctggctgggatggcactgggcattcagaaaagaatgatcctcagtgtgctcacggggctgctgttcggcagcgatggctactacgtggcgctggcctggacctcatcggcgctcatgtacttcattgtgcgctctttgcggacagcagccctgggccccgacagcatggggggccccgtcccccggcagcgtctccagctctacctgactctgggagctgcagccttccagcccctcatcatatactggctgactttccacctggtccggtgaccccctggccccagatggcactgagtttttcattcattgaagatttgatttccttga

SEQ ID NO: 21141 - protein, 241 aa, Homo sapiens
MAYHSGYGAHGSKHRARAAPDPPPLFDDTSGGYSSQPGGYPATGADVAFSVNHLLGDPMANVAMAYGSSIASHGKDMVHKELHRFVSVSKLKYFFAVDTAYVAKKLGLLVFPYTHQNWEVQYSRDAPLPPRQDLNAPDLYIPTMAFITYVLLAGMALGIQKRMILSVLTGLLFGSDGYYVALAWTSSALMYFIVRSLRTAALGPDSMGGPVPRQRLQLYLTLGAAAFQPLIIYWLTFHLVR

SEQ ID NO: 21142 - DNA, 666 bp, Homo sapiens
gcatagctgtagcctcgaactgtgaccctggacatgtctcggcccctagtgacctctagcactgctctgttaagagggagcagctgtctccagcagtctcctgaggatctgcgtgccatgcagaggttggggaggtgttgagagtcactctgcgagtcttggggagagaagggggtctcagatccaggtcctggggctgagtcctgggccttccatatccctttggggtctgggtccctgtggggacagattgagagtaaaaggtgctgtgggaggtggggtctagctgggctctgggcgttgggggtagggccaatctcaggcctagacccctgggggtcaccaaccctttcctcctcccacccccagaatgatcctcagtgtgctcacggggctgctgttcggcagcgatggctactacgtggcgctggcctggacctcatcggcgctcatgtacttcattgtgcgctctttgcggacagcagccctgggccccgacagcatggggggccccgtcccccggcagcgtctccagctctacctgactctgggagctgcagccttccagcccctcatcatatactggctgactttccacctggtccggtgaccccctggccccagatggcactgagtttttcattcattgaagatttgatttccttg

SEQ ID NO: 21143 - protein, 79 aa, Homo sapiens
MILSVLTGLLFGSDGYYVALAWTSSALMYFIVRSLRTAALGPDSMGGPVPRQRLQLYLTLGAAAFQPLIIYWLTFHLVR

SEQ ID NO: 21144 - DNA, 652 bp, Homo sapiens
ctccctagggcatatgtggtggtccccagctcaccctctgttgccccagtctctcttcctcacccctgcctcaggatgcctggctctgagccacccctgctttggcgcaggttctccccggaggtgctgggcctgtgtgcaagcacagcgctggtgtgggtggtgatggaggtgctggccctgctcctgggcctctacctggccaccgtgcgcagtgacctgagcacctttcacctgctggcctacagtggctacaaatacgtgggaatgatcctcagtgtgctcacggggctgctgttcggcagcgatggctactacgtggcgctggcctggacctcatcggcgctcatgtacttcattgtgagtctggtgcacccccccattcccctgccttcacttgagggcaaacctccccctcctggccaggcttcagttctcctttcttccaggtgcgctctttgcggacagcagccctgggccccgacagcatggggggccccgtcccccggcagcgtctccagctctacctgactctgggagctgcagccttccagcccctcatcatatactggctgactttccacctggtccggtgaccccctggccccagatggcactgagtttttcattcattgaagatttgatttccttg

SEQ ID NO: 21145 - protein, 151 aa, Homo sapiens
MPGSEPPLLWRRFSPEVLGLCASTALVWVVMEVLALLLGLYLATVRSDLSTFHLLAYSGYKYVGMILSVLTGLLFGSDGYYVALAWTSSALMYFIVSLVHPPIPLPSLEGKPPPPGQASVLLSSRCALCGQQPWAPTAWGAPSPGSVSSST

SEQ ID NO: 21146 - DNA, 838 bp, Homo sapiens
aggcgcgggggatgacgccacggacatggtggccgagaccggcggggtgggggacgtgtcgcgcggccgggtggcctcggtcggtaccctgggcgcggagcagctgcctcattagtattcgtacccacgaggcggcgcagcgggccctcggggacagcgagcgtcgcggccatggcttatcactcgggctacggagcccacggctccaagcacagggcccgggcagccccggatccccctcccctcttcgatgacacaagcggtggttattccagccagcccgggggatacccagccacaggagcagacgtggccttcagtgtcaaccacttgcttggggacccaatggccaatgtggctatggcctatggcagctccatcgcatcccatgggaaggacatggtgcacaaggagctgcaccgttttgtgtctgtgagcaaactcaagtatttttttgctgtggacacagcctacgtggccaagaagctagggctgctggtcttcccctacacacaccagaactgggaagtgcagtacagtcgtgatgctcctctgcccccccggcaagacctcaacgcccctgacctctatatccccacgatggccttcattacttacgtgctcctggctgggatggcactgggcattcagaaaaggatgcctggctctgagccacccctgctttggcgcaggttctccccggaggtgctgggcctgtgtgcaagcacagcgctggtgtgggtggtgatggaggtgctggccctgctcctgggcctctacctggccaccgtgcgcagtgacctgagcacctttcacctgctggcctacagtggctaca

SEQ ID NO: 21147 - protein, 221 aa, Homo sapiens
MAYHSGYGAHGSKHRARAAPDPPPLFDDTSGGYSSQPGGYPATGADVAFSVNHLLGDPMANVAMAYGSSIASHGKDMVHKELHRFVSVSKLKYFFAVDTAYVAKKLGLLVFPYTHQNWEVQYSRDAPLPPRQDLNAPDLYIPTMAFITYVLLAGMALGIQKRMPGSEPPLLWRRFSPEVLGLCASTALVWVVMEVLALLLGLYLATVRSDLSTFHLLAYSG

SEQ ID NO: 21148 - DNA, 962 bp, Homo sapiens
atgacgccacggacatggtggccgagaccggcggggtgggggacgtgtcgcgcggccgggtggcctcggtcggtaccctgggcgcggagcagctgcctcattagtattcgtacccacgaggcggcgcagcgggccctcggggacagcgagcgtcgcggccatggcttatcactcgggctacggagcccacggctccaagcacagggcccgggcagccccggatccccctcccctcttcgatgacacaagcggtggttattccagccagcccgggggatacccagccacaggagcagacgtggccttcagtgtcaaccacttgcttggggacccaatggccaatgtggctatggcctatggcagctccatcgcatcccatgggaaggacatggtgcacaaggagctgcaccgttttgtgtctgtgagcaaactcaagtatttttttgctgtggacacagcctacgtggccaagaagctagggctgctggtcttcccctacacacaccagaactgggaagtgcagtacagtcgtgatgctcctctgcccccccggcaagacctcaacgcccctgacctctatatccccagtgagtctccaacctgggctggggaacgtggtggggtggggtcgggggggacttgtgccttgagggatgaatgggaagagaggcgcagctactgagtcagcatctgttcttggtgctttgtgtatgtgtggcagttgcaagacaccaggcaggcagtgcagggtgaccagtaaggagcttcctgaatgcgccttcagtgtccccaggacacccttttgagaccttcctgtttcttgatttggactgtatccctccccagcctggagctctgggtttagacctggctttgcagactccagctatgggatttcaggctggttatttgtacttttcagtaaaacaggactaatgtagtccctaccccaaaggactgtt

SEQ ID NO: 21149 - protein, 173 aa, Homo sapiens [sequence omitted]

SEQ ID NO: 21150 - DNA, 2560 bp, Homo sapiens
gccgcgctcgggctcgagctccgcgcactccctccgcggccgctgagccgagcggacgcccccgggggccgcgtcgcagccctccgtgctcccccctatcatgcccggtgcccaggctggggccgcccaagcagccaggacaccatgcccgaggacggcgctggcgacggcggggaggtgcccgcgctcatcccggacggcgagccgctgcgggaagagcagcggcccctgaaacagtccctgggaagctccctgtgccgcgagtcgcactggaagtgcctgctcctcacgctgctcatccacgcctgcggggccgtggtggcctggtgtcgcctggccacagtgccgcggctggtcctggggcccgaggccgccttggcccggggagccgggggcccgccaccgacctacccggccagcccctgctccgatggctacctgtacatcccgctggccttcgtctccctcctctacctcctctacctggctgagtgctggcactgtcacgtgcggtcctgccaggcgccacgcaccgacgcccacacggtgctggcgctgatccgccggctgcagcaggcgccgccgtgcgtctggtggaaggccaccagctatcactacgtgcggcgcacacgccagatcacgcgctaccgcaacggcgacgcctacaccaccacgcaggtgtaccatgagcgcgctgacagccgcacggcccgcggcgagtttgactactcggcgcacggcgtccgcgacgtctccaaggagctggtggggctggcggagcacgcggccacgcggctgcgcttcaccaagtgcttcagcttcggcagcgcggaggccgaggcctcgtacctcacgcagcgggcgcgcttcttcagcgccaacgagggcctggacgactatctggaggcgcgcgagggcatgcacctgaaggacgtagacttccgcgagtcgctcatggtcttcgccgacccccgcagcccgccctggtacgcgcgcgcctgggtcttctggctcgtgtcggcggccacgctgtcgtggcccctgcgcgtcgtggccgcctatggcacggctcacgtgcactaccaggtggagaagctctttggcgccagctcgcccccgccgggggccgtgcccagcgggcccccgctgtcccgcgtggccacagtggacttcactgagctcgagtggcacatctgctccaaccggcagctggtgcccagctactcggaggccgtggtcatgggcgcgggctcgggcgcctacctcagaggctgccagcgctgccgccgctctgtcagcagcaactcgctgccccccgcccggcccagcgggccccgcctgcccttcagccgcagccgcctctcgctgggcgctggcggccgggccacgccaggggtcttccgcagcctgagcggggggccgctggggcgccgtggagaggacacggaacccctggagagcccgccctgctatgaggacgccctctacttcccggtgctcattgtccacggagacagcggctgccagggggatgggcagggtgctctctgagaccccccacggcccccagagtggccccctccccaccattccaccatgggcttagatgcccgagtgattgttgtccaaaacaggcgggaaaacagaccagccacacacaaggggcaggggtgagggtgggggtgggggtccttaaacagactaaaatgcagttacctgtggtcattttggaggaagtggaagcctaagaatcgcccccagcatggcttcatcccccaagatggccgatgatctggcctgaaggcctctcacaaagggcaggagaagaagcttccagaaaggctgggatggaggaggagtcctgcggccagctgttgcctgcagcagaggctgcctgtggacacttccctaccggggctgaggccatgctgggagcccccccagtgacgcagaagcacaaattggaggcttggggccatgcccagccaggttggcttccctggggctgaagagctggctgtggtggcaccatggccttggccctgctactcacccaacattcccatcctcccctgataggcccctcctccttgcctgccctctctcccgctgctcagggccagtcactccccccacatgcagctacccctacaacctggggttccttctcagggcctcacctggtccccacatcccctggcctctgctcctgcctcccaaagtccatgtctgcctccatcagccacacacacgcagggacgcccgttccttgccctcccggacttatctactcttcactttcctgatgatccatggggcccaggcctagagggcatccgaggggctgggccttggccacagcctcttggatgatgtccttgctccaccacgcaggcccttgcttctcccatcaacgagtcttggcccaggggacactgaccctcccccagggaggagagaggagttccttccctttcaacgagggcttccacgccctctaaggggtggcggggaagggaggaggctgagaagatgcagattaaataaaggtatggaatgg

SEQ ID NO: 21151 - protein, 468 aa, Homo sapiens; identical to SEQ ID NO: 2699

SEQ ID NO: 21152 - DNA, 2848 bp, Homo sapiens
gccgcgctcgggctcgagctccgcgcactccctccgcggccgctgagccgagcggacgcccccgggggccgcgtcgcagccctccgtgctcccccctatcatgcccggtgcccaggctggggccgcccaagcagccaggacaccatgcccgaggacggcgctggcgacggcggggaggtgcccgcgctcatcccggacggcgagccgctgcgggaagagcagcggcccctgaaacagtccctgggaagctccctgtgccgcgagtcgcactggaagtgcctgctcctcacgctgctcatccacgcctgcggggccgtggtggcctggtgtcgcctggccacagtgccgcggctggtcctggggcccgaggccgccttggcccggggagccgggggcccgccaccgacctacccggccagcccctgctccgatggctacctgtacatcccgctggccttcgtctccctcctctacctcctctacctggctgagtgctggcactgtcacgtgcggtcctgccaggcgccacgcaccgacgcccacacggtgctggcgctgatccgccggctgcagcaggcgccgccgtgcgtctggtggaaggccaccagctatcactacgtgcggcgcacacgccagatcacgcgctaccgcaacggcgacgcctacaccaccacgcaggtgtaccatgagcgcgctgacagccgcacggcccgcggcgagtttgactactcggcgcacggcgtccgcgacgtctccaaggagctggtggggctggcggagcacgcggccacgcggctgcgcttcaccaagtgcttcagcttcggcagcgcggaggccgaggcctcgtacctcacgcagcgggcgcgcttcttcagcgccaacgagggcctggacgactatctggaggcgcgcgagggcatgcacctgaaggacgtagacttccgcgagtcgctcatggtcttcgccgacccccgcagcccgccctggtacgcgcgcgcctgggtcttctggctcgtgtcggcggccacgctgtcgtggcccctgcgcgtcgtggccgcctatggcacggctcacgtgcactaccaggtggagaagctctttggcgccagctcgcccccgccgggggccgtgcccagcgggcccccgctgtcccgcgtggccacagtggacttcactgagctcgagtggcacatctgctccaaccggcagctggtgcccagctactcggaggccgtggtcatgggcgcgggctcgggcgcctacctcagaggctgccagcgctgccgccgctctgtcagcagcaactcgctgccccccgcccggcccagcgggccccgcctgcccttcagccgcagccgcctctcgctgggcgctggcggccgggccacgccaggggtcttccgcagcctgagcggggggccgctggggcgccgtggagaggacacggaacccctggagagcccgccctgctatgaggacgccctctacttcccggtgctcattgtccacggagacagcggctgccagggggatgggcagggtgctctctgagaccccccacggcccccagagtggccccctccccaccattccaccatgggcttagatgcccgagtgattgttgtccaaaacaggcgggaaaacagaccagccacacacaaggggcaggggtgagggtgggggtgggggtccttaaacagactaaaatgcagttacctgtggtcattttggaggaagtggaagcctaagaatcgcccccagcatggcttcatcccccaagatggccgatgatctggcctgaaggcctctcacaaagggcaggagaagaagcttccagaaaggctgggatggaggaggagtcctgcggccagctgttgcctgcagcagaggctgcctgtggacacttccctaccggggctgaggccatgctgggagcccccccagtgacgcagaagcacaaattggaggcttggggccatgcccagccaggttggcttccctggggctgaagagctggctgtggtggcaccatggccttggccctgctactcacccaacattcccatcctcccctgataggcccctcctccttgcctgccctctctcccgctgctcagggccagtcactccccccacatgcagctacccctacaacctggggttccttctcagggcctcacctggtccccacatcccctggcctctgctcctgcctcccaaagtccatgtctgcctccatcagccacacacacgcagggacgcccgttccttgccctcccggacttatctactcttcactttcctgatgatccatggggcccaggcctagagggcatccgaggggctgggccttggccacagcctcttggatgatgtccttgctccaccacgcaggcccttgcttctcccatcaacgagtcttggcccaggggacactgaccctcccccagggaggagagaggagttccttccctttcaacgagggcttccacgccctctaaggggtggcggggaagggaggaggctgagaagatgcagattaaataaaggtatggaatggaaggcctgtgcattcctgggtcatgggtctaaggcctccactgcaagcattatgggcccccatggttcagggcacgatgaggggttctgggaagggactcagaattgggctccagtgttcccaggaaccaagtaagcagaggagaggaaacctcccctgcctagcctggggcctctgagactcaagtgtgaggcgctctgagcacctggctcccctgactccggtatctgggcctgggtcactgctaaggcattgtcaaggtggcccttgttccagctcagtgggaca

SEQ ID NO: 21153 - protein, 468 aa, Homo sapiens; identical to SEQ ID NO: 2699

SEQ ID NO: 21154 - DNA, 861 bp, Homo sapiens
cgcgcgcagattggcggaactattagtctcggcttctaggaggtatgaacttcgccccgagtttacacattctcttcacgcggcgctacaggccccgcccaacacaactgcaagcttcgcctcacagagccctggacactgcagggaatccctcagaggtcttaactctgttgggggatgatgtaaactccgccctccagggaaacgtgtgaagttcccctcaacctcctcttcaggctccgtccccagctacaagctccgccccctctcaagctcacaaaagtggaagaactgcgccctcgtaggactgtcacacctcacacatcgagcggaggtagcggttcacctacacggagccccgcccccggggccgcccacgaaagatgcaagccacgcccctgggggccctggagtcccgcccacccagagcgccctggctgcggcgtagcgcacaaatacggctctgcgaagagcgctaccgagcgagcctcttatcgcacgccccgcccacactcaggctcaccctcttggcgcaagcaccgcccactccacccctgggtcccttaccaccttcgcgatatgcccagatccaccagtcctccgaacccctcatctctcaccacgatgcccttgaacctggccctggagccctcttcttcctccacctacggtttccgtttgtccagatttcgggttctctgggcgagcccggagactgggcccggacagccgggcagatggcgtcgatgggcctttggcgccacctggcctcggccccacggacttacagccaccgcgaggcctcggtagggcctctctctcaaagcgtactaattgctcagtaaatagaaatagctgctt

SEQ ID NO: 21155 - protein, 153 aa, Homo sapiens [sequence omitted]

SEQ ID NO: 21156 - DNA, 3013 bp, Homo sapiens
gcgtctgtggggcaagaaaggagtgggcatgagggtgttcccgtgcatggcgagcagctgggctgagactgctcccgggtgtgatggggctgctgtgtccagatttgggtctctgagtctctgggaagcgacctcaccccacagccccgagccccaacttgagggtcacagagctcggcaggcaggcttttcccaccccctgactctcagccccatggggcctggggcagccgtcaactgcgccttctcccctcctccgcccccaaccttagagccccccaccccactgcttcctgctctagcggcccccggggaagagggagcagggagctggcagccgccccagcccactccttacaaggcctgagcccggccccaggcccgcccccggcccgcccgcaggaggccccaggccctccccctgtcaagagctgccgccagcccggggccggaccagtccgggggcatcgcgatgctgctgcgcctgttgctggcctgggcggccgcagggcccacactgggccaggacccctgggctgctgagccccgtgccgcctgcggccccagcagctgctacgctctcttcccacggcgccgcaccttcctggaggcctggcgggcctgccgcgagctggggggcgacctggccactcctcggacccccgaggaggcccagcgtgtggacagcctggtgggtgcgggcccagccagccggctgctgtggatcgggctgcagcggcaggcccggcaatgccagctgcagcgcccactgcgcggcttcacgtggaccacaggggaccaggacacggctttcaccaactgggcccagccagcctctggaggcccctgcccggcccagcgctgtgtggccctggaggcaagtggcgagcaccgctggctggagggctcgtgcacgctggctgtcgacggctacctgtgccagtttggcttcgagggcgcctgcccggcgctgcaagatgaggcgggccaggccggcccagccgtgtataccacgcccttccacctggtctccacagagtttgagtggctgcccttcggctctgtggccgctgtgcagtgccaggctggcaggggagcctctctgctctgcgtgaagcagcctgagggaggtgtgggctggtcacgggctgggcccctgtgcctggggactggctgcagccctgacaacgggggctgcgaacacgaatgtgtggaggaggtggatggtcacgtgtcctgccgctgcactgagggcttccggctggcagcagacgggcgcagttgcgaggacccctgtgcccaggctccgtgcgagcagcagtgtgagcccggtgggccacaaggctacagctgccactgtcgcctgggtttccggccagcggaggatgatccgcaccgctgtgtggacacagatgagtgccagattgccggtgtgtgccagcagatgtgtgtcaactacgttggtggcttcgagtgttattgtagcgagggacatgagctggaggctgatggcatcagctgcagccctgcaggggccatgggtgcccaggcttcccaggacctcggagatgagttgctggatgacggggaggatgaggaagatgaagacgaggcctggaaggccttcaacggtggctggacggagatgcctgggatcctgtggatggagcctacgcagccgcctgactttgccctggcctatagaccgagcttcccagaggacagagagccacagataccctacccggagcccacctggccacccccgctcagtgcccccagggtcccctaccactcctcagtgctctccgtcacccggcctgtggtggtctctgccacgcatcccacactgccttctgcccaccagcctcctgtgatccctgccacacacccagctttgtcccgtgaccaccagatccccgtgatcgcagccaactatccagatctgccttctgcctaccaacccggtattctctctgtctctcattcagcacagcctcctgcccaccagccccctatgatctcaaccaaatatccggagctcttccctgcccaccagtcccccatgtttccagacacccgggtcgctggcacccagaccaccactcatttgcctggaatcccacctaaccatgcccctctggtcaccaccctcggtgcccagctaccccctcaagccccagatgcccttgtcctcagaacccaggccacccagcttcccattatcccaactgcccagccctctctgaccaccacctccaggtcccctgtgtctcctgcccatcaaatctctgtgcctgctgccacccagcccgcagccctccccaccctcctgccctctcagagccccactaaccagacctcacccatcagccctacacatccccattccaaagccccccaaatcccaagggaagatggccccagtcccaagttggccctgtggctgccctcaccagctcccacagcagccccaacagccctgggggaggctggtcttgccgagcacagccagagggatgaccggtggctgctggtggcactcctggtgccaacgtgtgtctttttggtggtcctgcttgcactgggcatcgtgtactgcacccgctgtggcccccatgcacccaacaagcgcatcactgactgctatcgctgggtcatccatgctgggagcaagagcccaacagaacccatgccccccaggggcagcctcacaggggtgcagacctgcagaaccagcgtgtgatggggtgcagacccccctcatggagtatggggcgctggacacatggccggggctgcaccagggacccatgggggctgcccagctggacagatggcttcctgctccccaggcccagccagggtcctctctcaaccactagacttggctctcaggaactctgcttcctggcccagcgctcgtgaccaaggatacaccaaagcccttaagacctcagggggcgggtgctggggtcttctccaataaatggggtgtcaaccttacccaagg

SEQ ID NO: 21157 - protein, 757 aa, Homo sapiens; identical to SEQ ID NO: 2701

SEQ ID NO: 21158 - DNA, 1190 bp, Homo sapiens
ctgcagcgcccactgcgcggcttcacgtggaccacaggggaccaggacacggctttcaccaactgggcccagccagcctctggaggcccctgcccggcccagcgctgtgtggccctggaggcaagtggcgagcaccgctggctggagggctcgtgcacgctggctgtcgacggctacctgtgccagtttggcttcgagggcgcctgcccggcgctgcaagatgaggcgggccaggccggcccagccgtgtataccacgcccttccacctggtctccacagagtttgagtggctgcccttcggctctgtggccgctgtgcagtgccaggctggcaggggagcctctctgctctgcgtgaagcagcctgagggaggtgtgggctggtcacgggctgggcccctgtgcctggggactggctgcagccctgacaacgggggctgcgaacacgaatgtgtggaggaggtggatggtcacgtgtcctgccgctgcactgagggcttccggctggcagcagacgggcgcagttgcgaggacccctgtgcccaggctccgtgcgagcagcagtgtgagcccggtgggccacaaggctacagctgccactgtcgcctgggtttccggccagcggaggatgatccgcaccgctgtgtggacacagatgagtgccagattgccggtgtgtgccagcagatgtgtgtcaactacgttggtggcttcgagtgttattgtagcgagggacatgagctggaggctgatggcatcagctgcagccctgcaggggccatgggtgcccaggcttcccaggacctcggagatgagttgctggatgacggggaggatgaggaagatgaagacgaggcctggaaggccttcaacggtggctggacggagatgcctgggatcctgtggatggagcctacgcagccgcctgactttgccctggcctatagaccgagcttcccagaggacagagagccacagataccctacccggagcccacctggccacccccgtgcccagctggacagatggcttcctgctccccaggcccagccagggtcctctctcaaccactagacttggctctcaggaactctgcttcctggcccagcgctcgtgaccaaggatacaccaaagcccttaagacctcagggggcgggtgctggggtcttctccaataaatggggtgtca

SEQ ID NO: 21159 - protein, 202 aa, Homo sapiens
MVTCPAAALRASGWQQTGAVARTPVPRLRASSSVSPVGHKATAATVAWVSGQRRMIRTAVWTQMSARLPVCASRCVSTTLVASSVIVARDMSWRLMASAAALQGPWVPRLPRTSEMSCWMTGRMRKMKTRPGRPSTVAGRRCLGSCGWSLRSRLTLPWPIDRASQRTESHRYPTRSPPGHPRAQLDRWLPAPQAQPGSSLNH

SEQ ID NO: 21160 - DNA, 2693 bp, Homo sapiens
gtggacacacaagagttaactggcgggtgtgacaggcggaccgccctcaggaagtgttactcactggggatgtgcgtgccttgccttgggactggattctcttcctgaagcgaaggagctcccagccatggaaagccctggagagtcaggcgcgggctctcctggagcccccagcccgtccagcttcactactgggcacctggcgagagaaaagccagcccaggacccactgtatgacgtgcccaatgccagcggcgggcaggcaggcgggccgcagcggccggggcgcgttgtgagcctgcgggagcgcctgctgctcacccggcccgtgtggctgcagctgcaagccaacgcagcggccgcactgcacatgctgaggaccgagcccccggggacgttcctcgtgcggaaatctaacacccgccagtgccaggccctgtgcatgcggttgcctgaagccagtggcccctccttcgtctccagccactacatcctggagagccctggcggcgtctccttggagggctcggagctcatgttcccagacctagtccagctcatctgtgcctactgccacacccgggacatccttctcctcccgctgcagctccccagagccatccaccacgcagccactcacaaagagctggaggccatctcccatctgggcattgagttctggagctcctccctcaacatcaaggctcagcggggcccggctggaggcccagtgttgccccagctgaaggcccggtcccctcaagagctggaccagggcaccggagccgccttgtgcttcttcaaccccctgttcccgggggacctagggcccaccaagcgggagaaattcaagagaagcttcaaagtgcgcgtgtccacagagacctccagccccctgtctccacctgccgtgccacctccccccgtccccgtgctgccaggggcagtccccagccagacagagcggctgcccccttgccagctgctacggagggagagctcagtggggtaccgcgtgccagcaggcagtggccctagccttccgcctatgccctccctccaagaggtggactgcggctcccccagcagctccgaggaggagggggtgccagggtcccgggggagcccagcgacctcaccccacctgggccgccgacgacctctgcttcggtccatgagcgccgccttctgctccctactggcaccggagcggcaggtgggccgggctgcggcagcactgatgcaggaccgacacacagccgcgggccagctggtgcaggacctactgacccaggtgcgggctgggcccgagccccaggagctgcagggcatccgtcaggcgctgagccgggcccgggccatgctgagtgcggagctgggccctgagaagctgctgtcgcctaagaggctggaacatgtcctggagaagtcattgcattgctctgtgctcaagcctctccggcccatcctggcagcccgcctgcggcgccggcttgccgcagacggctccctgggccgcctagctgagggcctccgcctggcccgggcccagggccccggagccttcgggtcccacctgagcctgccctccccagtagagttggagcaagtgcgccagaagctgctgcagctgctccgcacctactcacccagcgcccaggtcaagcggctcctgcaggcctgcaagctgctctacatggccctgaggacccaggaaggggagggcgcgggtgccgacgagttcctgcctctgctgagcctcgtcttggcccactgtgaccttcctgagctgctgctggaggccgagtacatgtcggagctgctggagcccagcctgcttactggagagggtggctactacctgaccagcctctctgccagcctggccctgctgagtggcctgggtcaggcccacaccctcccactgagccccgtgcaggagctacggcgctccctcagcctctgggagcagcgccgcctgcctgccacccactgcttccagcacctcctccgagtagcctatcaggatcccagcagtggctgcacctccaagaccctggccgtgcccccagaagcctcgattgccaccctgaaccagctctgtgccaccaagttccgagtgacccagcccaacacttttggcctcttcctgtacaaggagcagggctaccaccgcctgccccctggggccctggcccacaggctgcccaccactggctacctcgtctaccgccgggcggagtggcctgagacccagggggctgtgacagaggaggagggcagtgggcagtcagaggcaagaagcagaggggaggagcaagggtgccagggagatggggatgctggggtcaaagccagccccagggacattcgggaacagtctgagacaactgctgaagggggccagggtcaagcccaggaaggccctgctcagccaggggaaccagaggcagagggaagccgggcagcagaggagtagcttgaagtggccagaagggtcattcggggcgggagaccctgagcctgctgagaaatccttttagcgccagcaagccccacccagggccctgtcctgtgtctgccaccacctttgtctgatacttgtttccagggaagctgggggaactgccacatctgaggaactggaataaagatgagggggcttcgggggcccccagactgtgtgcccaagg

SEQ ID NO: 21161 - protein, 783 aa, Homo sapiens; identical to SEQ ID NO: 2703

SEQ ID NO: 21162 - DNA, 1464 bp, Homo sapiens
ccgacgagttcctgcctctgctgagcctcgtcttggcccactgtgaccttcctgagctgctgctggaggccgagtacatgtcggagctgctggagcccagcctgcttactggagagggtggctactacctgaccagcctctctgccagcctggccctgctgagtggcctgggtcaggcccacaccctcccactgagccccgtgcaggagctacggcgctccctcagcctctgggagcagcgccgcctgcctgccacccactgcttccaggtaacaggccctccaccgtgtcctcagagccagacgccatccccgcctttcaccttcctgtccttggtgaagagtccagactctgtagacagatcctgggttctaatcctggctctgccactgggttgtggggacttgggcgagttacttaactacttcgtgcctcagttttctcatcagtaaaatggggtaataggacctacctcctggggttgaggtgaagattaaatgagttaatgcaggagagtgcttggggcacaaattactcactatcaaatcttcatctcaggcttgtgagcgccccactgggctgtccttgcacctgcggctgtggcccacaagccgacccctggagcacatagagcttttgccgcttggttctcccactggatctccacctacccaccctgtccctgcacagcccagaaagctgatgtctcagctttggagccagatgcatgccagccggggctgagtacttgtttttgcttctcctcctgcatagcacctcctccgagtagcctatcaggatcccagcagtggctgcacctccaagaccctggccgtgcccccagaagcctcgattgccaccctgaaccagctctgtgccaccaagttccgagtgacccagcccaacacttttggcctcttcctgtacaaggagcagggctaccaccgcctgccccctggggccctggcccacaggctgcccaccactggctacctcgtctaccgccgggcggagtggcctgagacccagggggctgtgacagaggaggagggcagtgggcagtcagaggcaagaagcagaggggaggagcaagggtgccagggagatggggatgctggggtcaaagccagccccagggacattcgggaacagtctgagacaactgctgaagggggccagggtcaagcccaggaaggccctgctcagccaggggaaccagaggcagagggaagccgggcagcagaggagtagcttgaagtggccagaagggtcattcggggcgggagaccctgagcctgctgagaaatccttttagcgccagcaagccccacccagggccctgtcctgtgtctgccaccacctttgtctgatacttgtttccagggaagctgggggaactgccacatctgaggaactggaataaagatgagggggcttcgggggcccccagactgtgtgcccaag

SEQ ID NO: 21163 - protein, 124 aa, Homo sapiens
MSELLEPSLLTGEGGYYLTSLSASLALLSGLGQAHTLPLSPVQELRRSLSLWEQRRLPATHCFQVTGPPPCPQSQTPSPPFTFLSLVKSPDSVDRSWVLILALPLGCGDLGELLNYFVPQFSHQ

SEQ ID NO: 21164 - DNA, 516 bp, Homo sapiens
atggagagacggagcctcacccagcctcttaggcgacagcagcttctcagggcccagctccgcactcagcatggcccgggcccggctcagcgcctgacggatgccctgcagctcctggggctcgggcccagcccgcacctgggtcagtaggtcctgcaccagctggcccgcggctgtgtgtcggtcctgcatcagtgctgccgcagcccggcccacctgccgctccggtgccagtagggagcagaaggcggcgctcatggaccgaagcagaggtcgtcggcggcccaggtgcccagtagtgaagctggacgggctgggggctccaggagagcccgcgcctgactctccagggctttccatggctgggagctccttcgcttcaggaagagaatccagtcccaaggcaaggcacgcacatccccaagatgggtttcaccatgttgcccaagctggtctcgaaaagaactcctgggcccgagcaatctacccgccttggcctcccaaagtgctgggact

SEQ ID NO: 21165 - protein, 137 aa, Homo sapiens
MPCSSWGSGPARTWVSRSCTSWPAAVCRSCISAAAARPTCRSGASREQKAALMDRSRGRRRPRCPVVKLDGLGAPGEPAPDSPGLSMAGSSFASGRESSPKARHAHPQDGFHHVAQAGLEKNSWARAIYPPWPPKVL

SEQ ID NO: 21166 - DNA, 343 bp, Homo sapiens
gacccacaggcccctcagggtctgcccagccaggctcctgtggtgctgctgggccctcccatcctgaagatccatctcttggggctcccctgacagagaagacagccgaagtcaaagccacatcctcttgctgatgttggatgcaggctgtccggcctcagggccagggagccagtttccactgtgcgggaactctgagtcagacgtgattatctgggggtctgtccaccctggctggatctggaggcaagatgccaggccccccaggtgttctcagggcagttcttggtgtctgcttctcagattccaaggactggaattaaaacctttcctgggactctgg

SEQ ID NO: 21167 - protein, 69 aa, Homo sapiens
MLDAGCPASGPGSQFPLCGNSESDVIIWGSVHPGWIWRQDARPPRCSQGSSWCLLLRFQGLELKPFLGL

SEQ ID NO: 21168 - DNA, 1237 bp, Homo sapiens
gcaccgataggctctgcctcccgaagaaaagggagccgcgcagcgcctacgggagtccggcggcagcagccggtaccggcaaccacgggcagctctcagggaatctccgtcgtgaggccagaggctccagtccccgcgagtccagatgcctgtccagcctccaagcaaagacacagaagagatggaagcagagggtgattctgctgctgagatgaatggggaggaggaagagagtgaggaggagcggagcggcagccagacagagtcagaagaggagagctccgagatggatgatgaggactatgagcgacgccgcagcgagtgtgtcagtgagatgctggacctagagaagcagttctcggagctaaaggagaagttgttcagggaacgactgagtcagctgcggttgcggctggaggaagtgggggctgagagagcccctgaatacacggagccccttggggggctgcagcggagcctcaagattcgcattcaggtggcagggatctacaagggcttctgtctggatgtgatcaggaataagtacgaatgtgagctgcagggagccaaacagcacctggagagtgagaagctgctgctctatgacacgctgcagggggagctgcaggagcggatccagaggctggaggaggaccgccagagcctggacctcagctctggaccttgaccctgctgttcacagccagggggaccctcagagcagctggcactgcacccaggattctcgtcttcctcctgcagacaggcggacccacaggcccctcagggtctgcccagccaggctcctgtggtgctgctgggccctcccactccatctggcactggcctggactcctcctctgccctcctcgaggcctgcacagctgtggccgtggagctgacctgaccaggcaaggctgctgtctccatccctgagccgcctgccacctcccactcctgaagatccatctcttggggctcccctgacagagaagacagccgaagtcaaagccacatcctcttgctgatgttggatgcaggctgtccggcctcagggccagggagccagtttccactgtgcgggaactctgagtcagacgtgattatctgggggtctgtccaccctggctggatctggaggcaagatgccaggccccccaggtgttctcagggcagttcttggtgtctgcttctcagattccaaggactggaattaaaacctttcctgggactctgg

SEQ ID NO: 21169 - protein, 180 aa, Homo sapiens
MPVQPPSKDTEEMEAEGDSAAEMNGEEEESEEERSGSQTESEEESSEMDDEDYERRRSECVSEMLDLEKQFSELKEKLFRERLSQLRLRLEEVGAERAPEYTEPLGGLQRSLKIRIQVAGIYKGFCLDVIRNKYECELQGAKQHLESEKLLLYDTLQGELQERIQRLEEDRQSLDLSSGP

SEQ ID NO: 21170 - DNA, 1435 bp, Homo sapiens
gcaccgataggctctgcctcccgaagaaaagggagccgcgcagcgcctacgggagtccggcggcagcagccggtaccggcaaccacgggcagctctcagggaatctccgtcgtgaggccagaggctccagtccccgcgagtccagatgcctgtccagcctccaagcaaagacacagaagagatggaagcagagggtgattctgctgctgagatgaatggggaggaggaagagagtgaggaggagcggagcggcagccagacagagtcagaagaggagagctccgagatggatgatgaggactatgagcgacgccgcagcgagtgtgtcagtgagatgctggacctagagaagcagttctcggagctaaaggagaagttgttcagggaacgactgagtcagctgcggttgcggctggaggaagtgggggctgagagagcccctgaatacacggagccccttggggggctgcagcggagcctcaagattcgcattcaggtggcagggatctacaagggcttctgtctggatgtgatcaggaataagtacgaatgtgagctgcagggagccaaacagcacctggagagtgagaagctgctgctctatgacacgctgcagggggagctgcaggagcggatccagaggctggaggaggaccgccagagcctggacctcagctctgaatggtgggatgacaaactgcacgccagaggcagctccaggtcttgggactccctgccgcccagcaagaggaagaaggcacctctggtttctggcccatacatcgtgtacatgcttcaagagatcgacatcctggaggactggacagccatcaaaaaggctagggcagctgtgtcccctcagaagagaaaatcggatggaccttgaccctgctgttcacagccagggggaccctcagagcagctggcactgcacccaggattctcgtcttcctcctgcagacaggcggacccacaggcccctcagggtctgcccagccaggctcctgtggtgctgctgggccctcccactccatctggcactggcctggactcctcctctgccctcctcgaggcctgcacagctgtggccgtggagctgacctgaccaggcaaggctgctgtctccatccctgagccgcctgccacctcccactcctgaagatccatctcttggggctcccctgacagagaagacagccgaagtcaaagccacatcctcttgctgatgttggatgcaggctgtccggcctcagggccagggagccagtttccactgtgcgggaactctgagtcagacgtgattatctgggggtctgtccaccctggctggatctggaggcaagatgccaggccccccaggtgttctcagggcagttcttggtgtctgcttctcagattccaaggactggaattaaaacctttcctgggactctgg

SEQ ID NO: 21171 - protein, 246 aa, Homo sapiens; identical to SEQ ID NO: 2709

SEQ ID NO: 21172 - DNA, 545 bp, Homo sapiens
acacggaagcaccgataggctctgcctcccgaagaaaagggagccgcgcagcgcctacgggagtccggcggcagcagccggtaccggcaaccacgggcagctctcagggaatctccgtcgtgaggccagaggctccagtccccgcgagtccagatgcctgtccagcctccaagcaaagacacagaagagatggaagcagagggtgattctgctgctgagatgaatggggaggaggaagagagtgaggaggagcggagcggcagccagacagagtcagaagaggagagctccgagatggatgatgaggactatgagcgacgccgcagcgagtgtgtcagtgagatgctggacctagagaagcagttctcggagctaaaggagaagttgttcagggaacgactgagtcagctgcggttgcggctggaggaagtgggggctgagagagcccctgaatacacggagccccccaggtgttctcagggcagttcttggtgtctgcttctcagattccaaggactggaattaaaacctttcctgggactctg

SEQ ID NO: 21173 - protein, 129 aa, Homo sapiens
MPVQPPSKDTEEMEAEGDSAAEMNGEEEESEEERSGSQTESEEESSEMDDEDYERRRSECVSEMLDLEKQFSELKEKLFRERLSQLRLRLEEVGAERAPEYTEPPRCSQGSSWCLLLRFQGLELKPFLG

SEQ ID NO: 21174 - DNA, 923 bp, Homo sapiens
gataggctctgcctcccgaagaaaagggagccgcgcagcgcctacgggagtccggcggcagcagccggtaccggcaaccacgggcagctctcagggaatctccgtcgtgaggccagaggctccagtccccgcgagtccagatgcctgtccagcctccaagcaaagacacagaagagatggaagcagagggtgattctgctgctgagatgaatggggaggaggaagagagtgaggaggagcggagcggcagccagacagagtcagaagaggagagctccgagatggatgatgaggactatgagcgacgccgcagcgagtgtgtcagtgagatgctggacctagagaagcagttctcggagctaaaggagaagttgttcagggaacgactgagtcagctgcggttgcggctggaggaagtgggggctgagagagcccctgaatacacggagccccttggggggctgcagcggagcctcaagattcgcattcaggtggcaggtctgtgggtggttctgtaccctcttcccctcccagaacccgtggcaccctgtccccttcctctctcgttcctgcccggccttgccctttgctctcagccctcctatgtgggcaccgggctccccagccaagcagggaccctcctccctttctctgcagggatctacaagggcttctgtctggatgtgatcaggaataagtacgaatgtgagctgcagggagccaaacagcacctggaggtgggcctgattgggcacactgggggtgaggcagggcacaaagcctgaagtggcctcaccccatccgtcctgctgagctattgccccctcttccagagtgagaagctgctgctctatgacacgctgcagggggagctgcaggagcggatccagaggctggaggaggaccgccagagcctggacctc

SEQ ID NO: 21175 - protein, 214 aa, Homo sapiens
MPVQPPSKDTEEMEAEGDSAAEMNGEEEESEEERSGSQTESEEESSEMDDEDYERRRSECVSEMLDLEKQFSELKEKLFRERLSQLRLRLEEVGAERAPEYTEPLGGLQRSLKIRIQVAGLWVVLYPLPLPEPVAPCPLPLSFLPGLALCSQPSYVGTGLPSQAGTLLPFSAGIYKGFCLDVIRNKYECELQGAKQHLEVGLIGHTGGEAGHKA

SEQ ID NO: 21176 - DNA, 1652 bp, Homo sapiens
gcggcgctcggggctcggctggcctcggctcgcctcggctgcgctcggcaggctgcggtaaatccgggcttgcggccgctggcgtagtctgtggccgggtggtcgttgctgcgcgccccgagccccgagagccatgcagatgtcctacgccatccggtgcgccttctaccagctgctgctggccgcgctcatgctggtggcgatgctgcagctgctctacctgtcgctgctgtccggactgcacgggcaggaggagcaagaccaatattttgagttctttcccccgtccccacggtccgtggaccaggtcaaggcgcagctccgcaccgcgctggcctctggaggcgtcctggacgctagcggcgattaccgcgtctacaggggcctgctgaagaccaccatggaccccaacgatgtgatcctggccacgcacgccagcgtggacaacctgctgcacctgtcgggtctgctggagcgctgggagggcccgctgtccgtgtcggtgttcgcggccaccaaggaggaggcgcagctggccacggtgctggcctacgcgctgagcagccactgccccgacatgcgcgccagggtcgccatgcacctcgtgtgcccctcgcgttacgaggcagccgtgcccgacccccgggagccgggggagtttgccctgctgcggtcctgccaggaggtctttgacaagctagccagggtggcccagcccgggattaattatgcgctgggcaccaatgtctcctaccccaataacctgctgaggaatctggctcgtgagggggccaactatgccctggtgatcgatgtggacatggtgcccagcgaggggctgtggagaggcctgcgggaaatgctggatcagagcaaccagtggggaggcaccgcgctggtggtgcctgccttcgaaatccgaagagcccgccgcatgcccatgaacaaaaacgagctggtgcagctctaccaggttggcgaggtgcggcccttctattatgggttgtgcaccccctgccaggcacccaccaactattcccgctgggtcaacctgccggaagagagcttgctgcggcccgcctacgtggtaccttggcaggacccctgggagccattctacgtggcaggaggcaaggtgcccaccttcgacgagcgctttcggcagtacggcttcaaccgaatcagccaggcctgcgagctgcatgtggcggggtttgattttgaggtcctgaacgaaggtttcttggttcataagggcttcaaagaagcgttgaagttccatccccaaaaggaggctgaaaatcagcacaataagatcctatatcgccagttcaaacaggagttgaaggccaagtaccccaactctccccgacgctgctgagcccttccctcccctaatctgagaatctgaatacttaatgaaatggactttttggaaagaaatcagatgaaggcataaaatttagttcttagctcttgaacagaagcctaaaattcctggttctctcagggcttcgccttcaagggttctggaggagggaagggtctgcaggttccatgggtgacagcctgagatctgtcccttcaacgggctgggctgggtatgtgcctaccgatgacaatgtgtaaataaatgcgtgttcacacccaca

SEQ ID NO: 21177 - protein, 415 aa, Homo sapiens; identical to SEQ ID NO: 2711

SEQ ID NO: 21178 - DNA, 2058 bp, Homo sapiens
gcggcgctcggggctcggctggcctcggctcgcctcggctgcgctcggcaggctgcggtaaatccgggcttgcggccgctggcgtagtctgtggccgggtggtcgttgctgcgcgccccgagccccgagagccatgcagatgtcctacgccatccggtgcgccttctaccagctgctgctggccgcgctcatgctggtggcgatgctgcagctgctctacctgtcgctgctgtccggactgcacgggcaggaggagcaagaccaatattttgagttctttcccccgtccccacggtccgtggaccaggtcaaggcgcagctccgcaccgcgctggcctctggaggcgtcctggacgctagcggcgattaccgcgtctacaggggcctgctgaagaccaccatggaccccaacgatgtgatcctggccacgcacgccagcgtggacaacctgctgcacctgtcgggtctgctggagcgctgggagggcccgctgtccgtgtcggtgttcgcggccaccaaggaggaggcgcagctggccacggtgctggcctacgcgctgagcagccactgccccgacatgcgcgccagggtcgccatgcacctcgtgtgcccctcgcgttacgaggcagccgtgcccgacccccgggagccgggggagtttgccctgctgcggtcctgccaggaggtctttgacaagctagccagggtggcccagcccgggattaattatgcgctgggcaccaatgtctcctaccccaataacctgctgaggaatctggctcgtgagggggccaactatgccctggtgatcgatgtggacatggtgcccagcgaggggctgtggagaggcctgcgggaaatgctggatcagagcaaccagtggggaggcaccgcgctggtggtgcctgccttcgaaatccgaagagcccgccgcatgcccatgaacaaaaacgagctggtgcagctctaccaggttggcgaggtgcggcccttctattatgggttgtgcaccccctgccaggcacccaccaactattcccgctgggtcaacctgccggaagagagcttgctgcggcccgcctacgtggtaccttggcaggacccctgggagccattctacgtggcaggaggcaaggtgcccaccttcgacgagcgctttcggcagtacggcttcaaccgaatcagccaggcctgcgagctgcatgtggcggggtttgattttgaggtcctgaacgaaggtttcttggttcataagggcttcaaagaagcgttgaagttccatccccaaaaggaggctgaaaatcagcacaataagatcctatatcgccagttcaaacaggagttgaaggccaagtaccccaactctccccgacgctgctgagcccttccctcccctaatctgagaagtcagcctcttggctcctcaggccaccatttaggcctgactggggtaagaaatgtcgctccactttacagaggtagctgtggtgttgaaacactggacttggatatggggtgctgggatcgattcctagctttaccactaactagctgtgtggccttgagtaaatcccgttacctctctgagcctcggttaccctgtctgtaaaaagggaggtgagaatacctacctcacggaactgttgggaggctcagatgagatgctatatgtgaaaacattctgtaagcttcgtacaaatgtgaagtattaatattatcgcagtattattgttgttattattattgttattattaacaatcttgggtgggtagtaggagagcaaaaagtatgaatgggatggagctaagaagtctgaatacttaatgaaatggactttttggaaagaaatcagatgaaggcataaaatttagttcttagctcttgaacagaagcctaaaattcctggttctctcagggcttcgccttcaagggttctggaggagggaagggtctgcaggttccatgggtgacagcctgagatctgtcccttcaacgggctgggctgggtatgtgcctaccgatgacaatgtgtaaataaatgcgtgttcacacccaca

SEQ ID NO: 21179 - protein, 415 aa, Homo sapiens; identical to SEQ ID NO: 2711

SEQ ID NO: 21180 - DNA, 1951 bp, Homo sapiens
gcggcgctcggggctcggctggcctcggctcgcctcggctgcgctcggcaggctgcggtaaatccgggcttgcggccgctggcgtagtctgtggccgggtggtcgttgctgcgcgccccgagccccgagagccatgcagatgtcctacgccatccggtgcgccttctaccagctgctgctggccgcgctcatgctggtggcgatgctgcagctgctctacctgtcgctgctgtccggactgcacgggcaggaggagcaagaccaatattttgagttctttcccccgtccccacggtccgtggaccaggtcaaggcgcagctccgcaccgcgctggcctctggaggcgtcctggacgctagcggcgattaccgcgtctacaggggcctgctgaagaccaccatggaccccaacgatgtgatcctggccacgcacgccagcgtggacaacctgctgcacctgtcgggtctgctggagcgctgggagggcccgctgtccgtgtcggtgttcgcggccaccaaggaggaggcgcagctggccacggtgctggcctacgcgctgagcagccactgccccgacatgcgcgccagggtcgccatgcacctcgtgtgcccctcgcgttacgaggcagccgtgcccgacccccgggagccgggggagtttgccctgctgcggtcctgccaggaggtctttgacaagctagccagggtggcccagcccgggattaattatgcgctgggcaccaatgtctcctaccccaataacctgctgaggaatctggctcgtgagggggccaactatgccctggtgatcgatgtggacatggtgcccagcgaggggctgtggagaggcctgcgggaaatgctggatcagagcaaccagtggggaggcaccgcgctggtggtgcctgccttcgaaatccgaagagcccgccgcatgcccatgaacaaaaacgagctggtgcagctctaccaggttggcgaggtgcggcccttctattatgggttgtgcaccccctgccaggcacccaccaactattcccgctgggtcaacctgccggaagagagcttgctgcggcccgcctacgtggtaccttggcaggacccctgggagccattctacgtggcaggaggcaaggtgcccaccttcgacgagcgctttcggcagtacggcttcaaccgaatcagccaggcctgcgagctgcatgtggcggggtttgattttgaggtcctgaacgaaggtttcttggttcataagggcttcaaagaagcgttgaacccttccctcccctaatctgagaagtcagcctcttggctcctcaggccaccatttaggcctgactggggtaagaaatgtcgctccactttacagaggtagctgtggtgttgaaacactggacttggatatggggtgctgggatcgattcctagctttaccactaactagctgtgtggccttgagtaaatcccgttacctctctgagcctcggttaccctgtctgtaaaaagggaggtgagaatacctacctcacggaactgttgggaggctcagatgagatgctatatgtgaaaacattctgtaagcttcgtacaaatgtgaagtattaatattatcgcagtattattgttgttattattattgttattattaacaatcttgggtgggtagtaggagagcaaaaagtatgaatgggatggagctaagaagtctgaatacttaatgaaatggactttttggaaagaaatcagatgaaggcataaaatttagttcttagctcttgaacagaagcctaaaattcctggttctctcagggcttcgccttcaagggttctggaggagggaagggtctgcaggttccatgggtgacagcctgagatctgtcccttcaacgggctgggctgggtatgtgcctaccgatgacaatgtgtaaataaatgcgtgttcacacccaca

SEQ ID NO: 21181 - protein, 385 aa, Homo sapiens
MQMSYAIRCAFYQLLLAALMLVAMLQLLYLSLLSGLHGQEEQDQYFEFFPPSPRSVDQVKAQLRTALASGGVLDASGDYRVYRGLLKTTMDPNDVILATHASVDNLLHLSGLLERWEGPLSVSVFAATKEEAQLATVLAYALSSHCPDMRARVAMHLVCPSRYEAAVPDPREPGEFALLRSCQEVFDKLARVAQPGINYALGTNVSYPNNLLRNLAREGANYALVIDVDMVPSEGLWRGLREMLDQSNQWGGTALVVPAFEIRRARRMPMNKNELVQLYQVGEVRPFYYGLCTPCQAPTNYSRWVNLPEESLLRPAYVVPWQDPWEPFYVAGGKVPTFDERFRQYGFNRISQACELHVAGFDFEVLNEGFLVHKGFKEALNPSLP

SEQ ID NO: 21182 - DNA, 584 bp, Homo sapiens
cgctcccttccttccgcggcttcttctttccctgtgtccgaagaggtctgcgttgcgacttacgtggtagtgcttggaagcactccaagtggatgaagagcagctcctgcccgctgctggcagcctcaggcccaggggcctccaccccgcagaggcctgagccaagctcgccattcgccctgggctggatctcagctccggaaggagacgtcgagaagaggctgccaaagagcctggaggggccacttcagagcagcgccttgaagaggaaggagagggaggctccacaggaaagtcccagggccaggaagaaggtcatgagggcgccggccacctccctctcgtgtggcagcacctgcctagaacacccgggaacaggagctcttagaaaatgctgggtctaaatctggacccagctccactgccctctgcccatccagtctgggctctgacccaacccctctgtcaccataactggccccttctttccgggcctcagtttcctggtctgtaaatgaggctgctggataaggatgtctctcagggcctctgagtctaacatgatgggattccagattccacag

SEQ ID NO: 21183 - protein, 103 aa, Homo sapiens
MKSSSCPLLAASGPGASTPQRPEPSSPFALGWISAPEGDVEKRLPKSLEGPLQSSALKRKEREAPQESPRARKKVMRAPATSLSCGSTCLEHPGTGALRKCWV

SEQ ID NO: 21184 - DNA, 727 bp, Homo sapiens
gaggttgggggggaagcatctacattttcacatcctgcctatttggagcagcaagctggaggtgcgagggcccagagcaaaaacacacactgagtacctggtctctgccaggaactgtgttaggcacgagggatgggccttggaggagacacaggtattgtccttgagagtttccactggtgaccttggctgtaaagaggagaaaatgcagaagttcatttcttgccaaattgctctagctagaacttctagtacaatgttgaggagatgaaacggtgaaaccacgtatccttctcttgttcctgatctttgggggaaggctttaggtctttcgccattaagtatgatgttatttgtggatttttcataaatgccctttatcagactgaagtatagcagtgcagtcacaacttgctgcaggcttgaactcctggcctcaaatgattatcctgcctcagccttccaagtacctaagactacagatggagtctcgctctgttgcccaggctggagtgcagtggccctgatctcagctcactgcaacctccacctcctgggttcaagaaatcctcctgcttcagcctcctgagtagctgggactataggcgcctgccaccaccatgcccagataatttttatatttttagtagagccaggtttcatcatgttggccaggctggtctcgaacttctgacctcgagtgttccacctgcctcagcctcccaaa

SEQ ID NO: 21185 - protein, 72 aa, Homo sapiens
MPFIRLKYSSAVTTCCRLELLASNDYPASAFQVPKTTDGVSLCCPGWSAVALISAHCNLHLLGSRNPPASAS

SEQ ID NO: 21186 - DNA, 2723 bp, Homo sapiens
cgccccagcgcaggtgcaggtgcggcttctctgcccctttcaccccaggcgcatccgccgcggcggccatggcgcgaggagacgccccgcgggacagctaccacctggtcgggatcagcttcttcatcctggggctgggcaccctccttccctggaacttcttcatcaccgccatcccgtacttccaggcgcgactggccggggccggcaacagcacagccaggatcctgagcaccaaccacacgggtcccgaggatgccttcaacttcaacaattgggtgacgctgctgtcccagctgcccctgctgctcttcaccctcctcaactccttcctgtaccagtgcgctggtcaaggtggacatgagccccggacccttcttctccatcaccatggcctccgtctgcttcatcaactccttcagtgcagtcctacagggcagcctcttcgggcagctgggcaccatgccctccacctacagcaccctcttcctcagcggccagggcctggctgggatctttgctgcccttgccatgctcctgtccatggccagtggcgtggacgccgagacctctgccctggggtactttatcacgccctgtgtgggcatcctcatgtccatcgtgtgttacctgagcctgcctcacctgaagtttgcccgctactacctggccaataaatcatcccaggcccaagctcaggagctggagaccaaagctgagctcctccagtctgatgagaacgggattcccagtagtccccagaaagtagctctgaccctggatcttgacctggagaaggagccggaatcagagccagatgagccccagaagccaggaaaaccttcagtcttcactgtcttccagaagatctggctgacagcgctgtgccttgtgttggtcttcacagtcaccctgtccgtcttccccgccatcacagccatggtgaccagctccaccagtcctgggaagtggagtcagttcttcaaccccatctgctgcttcctcctcttcaacatcatggactggctgggacggagcctgacctcttacttcctgtggccagacgaggacagccggctgctgcccctgctggtctgcctgcggttcctgttcgtgcccctcttcatgctgtgccacgtgccccagaggtcccggctgcccatcctcttcccacaggatgcctacttcatcaccttcatgctgctctttgccgtttctaatggctacctggtgtccctcaccatgtgcctggcgcccaggcaggtgctgccacacgagagggaggtggccggcgccctcatgaccttcttcctggccctgggactttcctgtggagcctccctctccttcctcttcaaggcgctgctctgaagtggcccctccaggctctttggcagcctcttctcgacgtctccttccggagctgagatccagcccagggcgaatggcgagcttggctcaggcctctgcggggtggaggcccctgggcctgaggctgccagcagcgggcaggagctgctcttcatccacttggagtgctgtggggaagaaatcaccaccggtcattctaaccctcacccaggaatgggggtgactcgcacaagacctcatggaaagggtgatgactagggaaaagagggtgcagggcacggctgctccccaccaccaggtctgcatttgttcatcatcatcaggagcagaggtgaccagagggttcagagtgggaggcggggccagcccaggccaggagcgcctcatcttcccaggcctcagccacccagggtaaaaggtgccagggaagttgtgggcacctgagaggaggaacagatgtggaggacctgagggtgctcaaagggccaggctcagcctcaagcagtgttttcattgccaacacttactgtacccactccgcagagcccagctgggcctgggccccagggccacagctagcctgcatgtgtgtactgcactttacagtttgcaaagctcttccatacccactctctcaccgaagcctaattgaggctcttggaaggagtcaggcaaggattgtgcttcccccattatacaggtgacaaaactgagtcctggggaaagtgactggtccgtggtagagccgggacccaatcccctctctctcctccctgttggtgctgttcttcctgcccaacacctgtttctcttttcctcaaggggtttggggcaggagcctgggcacttactccccgtttttgctgtttctccttctgaccctgctcttgggtctaataaccccatttatttgtatgatgcgttcaccaagtctttatttccgaagtgctgttggctctattggcctcagtgaactgggtggggtcggaaagattgtacccccttgacaggtgggatgactgaggccctgagaggggtagggattggtgggcatctctgtgctgggtcctctggaccacatgatagctggggggtactgacctgcaaggaatcctgagctcctgggcagagcacctagttggatggacaactattgctctcccactccatgagcccctgggctctcaccagcatcctctgcctccccaggatagctcctccttggaaatctggccttagagaggcagtcagtgtgggcagggctttggcgaccccaccaattctacacacggatggaggaaaggcctgcttcaccacacacctatactaccctgcccgtcccagagaaaagc

SEQ ID NO: 21187 - protein, 336 aa, Homo sapiens [sequence omitted]

SEQ ID NO: 21188 - DNA, 1839 bp, Homo sapiens
ggctacctgtgcgactccagccgccctgcaccggaatctggggagacccgccccccgccccaccggtctgcggccctccgccccagcgcaggtgcaggtgcggcttctctgcccctttcaccccaggcgcatccgccgcggcggccatggcgcgaggagacgccccgcgggacagccagacgaggacagccggctgctgcccctgctggtctgcctgcggttcctgttcgtgcccctcttcatgctgtgccacgtgccccagaggtcccggctgcccatcctcttcccacaggatgcctacttcatcaccttcatgctgctctttgccgtttctaatggctacctggtgtccctcaccatgtgcctggcgcccaggcaggtgctgccacacgagagggaggtggccggcgccctcatgaccttcttcctggccctgggactttcctgtggagcctccctctccttcctcttcaaggcgctgctctgaagtggcccctccaggctctttggcagcctcttctcgacgtctccttccggagctgagatccagcccagggcgaatggcgagcttggctcaggcctctgcggggtggaggcccctgggcctgaggctgccagcagcgggcaggagctgctcttcatccacttggagtgctgtggggaagaaatcaccaccggtcattctaaccctcacccaggaatgggggtgactcgcacaagacctcatggaaagggtgatgactagggaaaagagggtgcagggcacggctgctccccaccaccaggtctgcatttgttcatcatcatcaggagcagaggtgaccagagggttcagagtgggaggcggggccagcccaggccaggagcgcctcatcttcccaggcctcagccacccagggtaaaaggtgccagggaagttgtgggcacctgagaggaggaacagatgtggaggacctgagggtgctcaaagggccaggctcagcctcaagcagtgttttcattgccaacacttactgtacccactccgcagagcccagctgggcctgggccccagggccacagctagcctgcatgtgtgtactgcactttacagtttgcaaagctcttccatacccactctctcaccgaagcctaattgaggctcttggaaggagtcaggcaaggattgtgcttcccccattatacaggtgacaaaactgagtcctggggaaagtgactggtccgtggtagagccgggacccaatcccctctctctcctccctgttggtgctgttcttcctgcccaacacctgtttctcttttcctcaaggggtttggggcaggagcctgggcacttactccccgtttttgctgtttctccttctgaccctgctcttgggtctaataaccccatttatttgtatgatgcgttcaccaagtctttatttccgaagtgctgttggctctattggcctcagtgaactgggtggggtcggaaagattgtacccccttgacaggtgggatgactgaggccctgagaggggtagggattggtgggcatctctgtgctgggtcctctggaccacatgatagctggggggtactgacctgcaaggaatcctgagctcctgggcagagcacctagttggatggacaactattgctctcccactccatgagcccctgggctctcaccagcatcctctgcctccccaggatagctcctccttggaaatctggccttagagaggcagtcagtgtgggcagggctttggcgaccccaccaattctacacacggatggaggaaaggcctgcttcaccacacacctatactaccctgcccgtcccagagaaaagc

SEQ ID NO: 21189 - protein, 90 aa, Homo sapiens
MARGDAPRDSQTRTAGCCPCWSACGSCSCPSSCCATCPRGPGCPSSSHRMPTSSPSCCSLPFLMATWCPSPCAWRPGRCCHTRGRWPAPS

SEQ ID NO: 21190 - DNA, 2912 bp, Homo sapiens
ggtggcgcgaccctctgtccccgcctcggggcggagcccaggtcccagcctgcggagcgcgagacacgccgaaatccgcccgaggctacctgtgcgactccagccgccctgcaccggaatctggggagacccgccccccgccccaccggtctgcggccctccgccccagcgcaggtgcaggtgcggcttctctgcccctttcaccccaggcgcatccgccgcggcggccatggcgcgaggagacgccccgcgggacagctaccacctggtcgggatcagcttcttcatcctggggctgggcaccctccttccctggaacttcttcatcaccgccatcccgtacttccaggcgcgactggccggggccggcaacagcacagccaggatcctgagcaccaaccacacgggtcccgaggatgccttcaacttcaacaattgggtgacgctgctgtcccagctgcccctgctgctcttcaccctcctcaactccttcctgtaccagtgcgtcccggagacggtgcgcattctgggcagcctgctggccatactgctgctctttgccctgacagcagcgctggtcaaggtggacatgagccccggacccttcttctccatcaccatggcctccgtctgcttcatcaactccttcagtgcagtcctacagggcagcctcttcgggcagctgggcaccatgccctccacctacagcaccctcttcctcagcggccagggcctggctgggatctttgctgcccttgccatgctcctgtccatggccagtggcgtggacgccgagacctctgccctggggtactttatcacgccctgtgtgggcatcctcatgtccatcgtgtgttacctgagcctgcctcacctgaagtttgcccgctactacctggccaataaatcatcccaggcccaagctcaggagctggagaccaaagctgagctcctccagtctgatgagaacgggattcccagtagtccccagaaagtagctctgaccctggatcttgacctggagaaggagccggaatcagagccagatgagccccagaagccaggaaaaccttcagtcttcactgtcttccagaagtcaccctgtccgtcttccccgccatcacagccatggtgaccagctccaccagtcctgggaagtggagtcagttcttcaaccccatctgctgcttcctcctcttcaacatcatggactggctgggacggagcctgacctcttacttcctgtggccagacgaggacagccggctgctgcccctgctggtctgcctgcggttcctgttcgtgcccctcttcatgctgtgccacgtgccccagaggtcccggctgcccatcctcttcccacaggatgcctacttcatcaccttcatgctgctctttgccgtttctaatggctacctggtgtccctcaccatgtgcctggcgcccaggcaggtgctgccacacgagagggaggtggccggcgccctcatgaccttcttcctggccctgggactttcctgtggagcctccctctccttcctcttcaaggcgctgctctgaagtggcccctccaggctctttggcagcctcttctcgacgtctccttccggagctgagatccagcccagggcgaatggcgagcttggctcaggcctctgcggggtggaggcccctgggcctgaggctgccagcagcgggcaggagctgctcttcatccacttggagtgctgtggggaagaaatcaccaccggtcattctaaccctcacccaggaatgggggtgactcgcacaagacctcatggaaagggtgatgactagggaaaagagggtgcagggcacggctgctccccaccaccaggtctgcatttgttcatcatcatcaggagcagaggtgaccagagggttcagagtgggaggcggggccagcccaggccaggagcgcctcatcttcccaggcctcagccacccagggtaaaaggtgccagggaagttgtgggcacctgagaggaggaacagatgtggaggacctgagggtgctcaaagggccaggctcagcctcaagcagtgttttcattgccaacacttactgtacccactccgcagagcccagctgggcctgggccccagggccacagctagcctgcatgtgtgtactgcactttacagtttgcaaagctcttccatacccactctctcaccgaagcctaattgaggctcttggaaggagtcaggcaaggattgtgcttcccccattatacaggtgacaaaactgagtcctggggaaagtgactggtccgtggtagagccgggacccaatcccctctctctcctccctgttggtgctgttcttcctgcccaacacctgtttctcttttcctcaaggggtttggggcaggagcctgggcacttactccccgtttttgctgtttctccttctgaccctgctcttgggtctaataaccccatttatttgtatgatgcgttcaccaagtctttatttccgaagtgctgttggctctattggcctcagtgaactgggtggggtcggaaagattgtacccccttgacaggtgggatgactgaggccctgagaggggtagggattggtgggcatctctgtgctgggtcctctggaccacatgatagctggggggtactgacctgcaaggaatcctgagctcctgggcagagcacctagttggatggacaactattgctctcccactccatgagcccctgggctctcaccagcatcctctgcctccccaggatagctcctccttggaaatctggccttagagaggcagtcagtgtgggcagggctttggcgaccccaccaattctacacacggatggaggaaaggcctgcttcaccacacacctatactaccctgcccgtcccagagaaaagc

SEQ ID NO: 21191 - protein, 301 aa, Homo sapiens
MARGDAPRDSYHLVGISFFILGLGTLLPWNFFITAIPYFQARLAGAGNSTARILSTNHTGPEDAFNFNNWVTLLSQLPLLLFTLLNSFLYQCVPETVRILGSLLAILLLFALTAALVKVDMSPGPFFSITMASVCFINSFSAVLQGSLFGQLGTMPSTYSTLFLSGQGLAGIFAALAMLLSMASGVDAETSALGYFITPCVGILMSIVCYLSLPHLKFARYYLANKSSQAQAQELETKAELLQSDENGIPSSPQKVALTLDLDLEKEPESEPDEPQKPGKPSVFTVFQKSPCPSSPPSQPW

SEQ ID NO: 21192 - DNA, 2952 bp, Homo sapiens
ggtggcgcgaccctctgtccccgcctcggggcggagcccaggtcccagcctgcggagcgcgagacacgccgaaatccgcccgaggctacctgtgcgactccagccgccctgcaccggaatctggggagacccgccccccgccccaccggtctgcggccctccgccccagcgcaggtgcaggtgcggcttctctgcccctttcaccccaggcgcatccgccgcggcggccatggcgcgaggagacgccccgcgggacagctaccacctggtcgggatcagcttcttcatcctggggctgggcaccctccttccctggaacttcttcatcaccgccatcccgtacttccaggcgcgactggccggggccggcaacagcacagccaggatcctgagcaccaaccacacgggtcccgaggatgccttcaacttcaacaattgggtgacgctgctgtcccagctgcccctgctgctcttcaccctcctcaactccttcctgtaccagtgcgtcccggagacggtgcgcattctgggcagcctgctggccatactgctgctctttgccctgacagcagcgctggtcaaggtggacatgagccccggacccttcttctccatcaccatggcctccgtctgcttcatcaactccttcagtgcagtcctacagggcagcctcttcgggcagctgggcaccatgccctccacctacagcaccctcttcctcagcggccagggcctggctgggatctttgctgcccttgccatgctcctgtccatggccagtggcgtggacgccgagacctctgccctggggtactttatcacgccctgtgtgggcatcctcatgtccatcgtgtgttacctgagcctgcctcacctgaagtttgcccgctactacctggccaataaatcatcccaggcccaagctcaggagctggagaccaaagctgagctcctccagtctgatgagaacgggattcccagtagtccccagaaagtagctctgaccctggatcttgacctggagaaggagccggaatcagagccagatgagccccagaagccaggaaaaccttcagtcttcactgtcttccagaagatctggctgacagcgctgtgccttgtgttggtcttcacagtcaccctgtccgtcttccccgccatcacagccatggtgaccagctccaccagtcctgggaagtggagtcagttcttcaaccccatctgctgcttcctcctcttcaacatcatggactggctgggacggagcctgacctcttacttcctgtggccagacgaggacagccggctgctgcccctgctggtctgcctgcggttcctgttcgtgcccctcttcatgctgtgccacgtgccccagaggtcccggctgcccatcctcttcccacaggatgcctacttcatcaccttcatgctgctctttgccgtttctaatggctacctggtgtccctcaccatgtgcctggcgcccaggcaggtgctgccacacgagagggaggtggccggcgccctcatgaccttcttcctggccctgggactttcctgtggagcctccctctccttcctcttcaaggcgctgctctgaagtggcccctccaggctctttggcagcctcttctcgacgtctccttccggagctgagatccagcccagggcgaatggcgagcttggctcaggcctctgcggggtggaggcccctgggcctgaggctgccagcagcgggcaggagctgctcttcatccacttggagtgctgtggggaagaaatcaccaccggtcattctaaccctcacccaggaatgggggtgactcgcacaagacctcatggaaagggtgatgactagggaaaagagggtgcagggcacggctgctccccaccaccaggtctgcatttgttcatcatcatcaggagcagaggtgaccagagggttcagagtgggaggcggggccagcccaggccaggagcgcctcatcttcccaggcctcagccacccagggtaaaaggtgccagggaagttgtgggcacctgagaggaggaacagatgtggaggacctgagggtgctcaaagggccaggctcagcctcaagcagtgttttcattgccaacacttactgtacccactccgcagagcccagctgggcctgggccccagggccacagctagcctgcatgtgtgtactgcactttacagtttgcaaagctcttccatacccactctctcaccgaagcctaattgaggctcttggaaggagtcaggcaaggattgtgcttcccccattatacaggtgacaaaactgagtcctggggaaagtgactggtccgtggtagagccgggacccaatcccctctctctcctccctgttggtgctgttcttcctgcccaacacctgtttctcttttcctcaaggggtttggggcaggagcctgggcacttactccccgtttttgctgtttctccttctgaccctgctcttgggtctaataaccccatttatttgtatgatgcgttcaccaagtctttatttccgaagtgctgttggctctattggcctcagtgaactgggtggggtcggaaagattgtacccccttgacaggtgggatgactgaggccctgagaggggtagggattggtgggcatctctgtgctgggtcctctggaccacatgatagctggggggtactgacctgcaaggaatcctgagctcctgggcagagcacctagttggatggacaactattgctctcccactccatgagcccctgggctctcaccagcatcctctgcctccccaggatagctcctccttggaaatctggccttagagaggcagtcagtgtgggcagggctttggcgaccccaccaattctacacacggatggaggaaaggcctgcttcaccacacacctatactaccctgcccgtcccagagaaaagc

SEQ ID NO: 21193 - protein, 456 aa, Homo sapiens; identical to SEQ ID NO: 2713

SEQ ID NO: 21194 - DNA, 2943 bp, Homo sapiens
acgctctgggcggggactccgcagcggctccctagttagggggcgccccggtgggttccagctttaggggtcgcaggagcggctctggcatcacctcggagctgacgaagcgggaagagccccgcaccagtgctgcccctacagagctctcggcggggggtggaggtgcaggtgcggcttctctgcccctttcaccccaggcgcatccgccgcggcggccatggcgcgaggagacgccccgcgggacagctaccacctggtcgggatcagcttcttcatcctggggctgggcaccctccttccctggaacttcttcatcaccgccatcccgtacttccaggcgcgactggccggggccggcaacagcacagccaggatcctgagcaccaaccacacgggtcccgaggatgccttcaacttcaacaattgggtgacgctgctgtcccagctgcccctgctgctcttcaccctcctcaactccttcctgtaccagtgcgtcccggagacggtgcgcattctgggcagcctgctggccatactgctgctctttgccctgacagcagcgctggtcaaggtggacatgagccccggacccttcttctccatcaccatggcctccgtctgcttcatcaactccttcagtgcagtcctacagggcagcctcttcgggcagctgggcaccatgccctccacctacagcaccctcttcctcagcggccagggcctggctgggatctttgctgcccttgccatgctcctgtccatggccagtggcgtggacgccgagacctctgccctggggtactttatcacgccctgtgtgggcatcctcatgtccatcgtgtgttacctgagcctgcctcacctgaagtttgcccgctactacctggccaataaatcatcccaggcccaagctcaggagctggagaccaaagctgagctcctccagtctgatgagaacgggattcccagtagtccccagaaagtagctctgaccctggatcttgacctggagaaggagccggaatcagagccagatgagccccagaagccaggaaaaccttcagtcttcactgtcttccagaagatctggctgacagcgctgtgccttgtgttggtcttcacagtcaccctgtccgtcttccccgccatcacagccatggtgaccagctccaccagtcctgggaagtggagtcagttcttcaaccccatctgctgcttcctcctcttcaacatcatggactggctgggacggagcctgacctcttacttcctgtggccagacgaggacagccggctgctgcccctgctggtctgcctgcggttcctgttcgtgcccctcttcatgctgtgccacgtgccccagaggtcccggctgcccatcctcttcccacaggatgcctacttcatcaccttcatgctgctctttgccgtttctaatggctacctggtgtccctcaccatgtgcctggcgcccaggcaggtgctgccacacgagagggaggtggccggcgccctcatgaccttcttcctggccctgggactttcctgtggagcctccctctccttcctcttcaaggcgctgctctgaagtggcccctccaggctctttggcagcctcttctcgacgtctccttccggagctgagatccagcccagggcgaatggcgagcttggctcaggcctctgcggggtggaggcccctgggcctgaggctgccagcagcgggcaggagctgctcttcatccacttggagtgctgtggggaagaaatcaccaccggtcattctaaccctcacccaggaatgggggtgactcgcacaagacctcatggaaagggtgatgactagggaaaagagggtgcagggcacggctgctccccaccaccaggtctgcatttgttcatcatcatcaggagcagaggtgaccagagggttcagagtgggaggcggggccagcccaggccaggagcgcctcatcttcccaggcctcagccacccagggtaaaaggtgccagggaagttgtgggcacctgagaggaggaacagatgtggaggacctgagggtgctcaaagggccaggctcagcctcaagcagtgttttcattgccaacacttactgtacccactccgcagagcccagctgggcctgggccccagggccacagctagcctgcatgtgtgtactgcactttacagtttgcaaagctcttccatacccactctctcaccgaagcctaattgaggctcttggaaggagtcaggcaaggattgtgcttcccccattatacaggtgacaaaactgagtcctggggaaagtgactggtccgtggtagagccgggacccaatcccctctctctcctccctgttggtgctgttcttcctgcccaacacctgtttctcttttcctcaaggggtttggggcaggagcctgggcacttactccccgtttttgctgtttctccttctgaccctgctcttgggtctaataaccccatttatttgtatgatgcgttcaccaagtctttatttccgaagtgctgttggctctattggcctcagtgaactgggtggggtcggaaagattgtacccccttgacaggtgggatgactgaggccctgagaggggtagggattggtgggcatctctgtgctgggtcctctggaccacatgatagctggggggtactgacctgcaaggaatcctgagctcctgggcagagcacctagttggatggacaactattgctctcccactccatgagcccctgggctctcaccagcatcctctgcctccccaggatagctcctccttggaaatctggccttagagaggcagtcagtgtgggcagggctttggcgaccccaccaattctacacacggatggaggaaaggcctgcttcaccacacacctatactaccctgcccgtcccagagaaaagc

SEQ ID NO: 21195 - protein, 456 aa, Homo sapiens; identical to SEQ ID NO: 2713

SEQ ID NO: 21196 - DNA, 2314 bp, Homo sapiens
cgccccagcgcaggtgcaggtgcggcttctctgcccctttcaccccaggcgcatccgccgcggcggccatggcgcgaggagacgccccgcgggacagctaccacctggtcgggatcagcttcttcatcctggggctgggcaccctccttccctggaacttcttcatcaccgccatcccgtacttccaggcgcgactggccggggccggcaacagcacagccaggatcctgagcaccaaccacacgggtcccgaggatgccttcaacttcaacaattgggtgacgctgctgtcccagctgcccctgctgctcttcaccctcctcaactccttcctgtaccagtgcgctggtcaaggtggacatgagccccggacccttcttctccatcaccatggcctccgtctgcttcatcaactccttcagtgcagtcctacagggcagcctcttcgggcagctgggcaccatgccctccacctacagcaccctcttcctcagcggccagggcctggctgggatctttgctgcccttgccatgctcctgtccatggccagtggcgtggacgccgagacctctgccctggggtactttatcacgccctgtgtgggcatcctcatgtccatcgtgtgttacctgagcctgcctcacctgaagtttgcccgctactacctggccaataaatcatcccaggcccaagctcaggagctggagaccaaagctgagctcctccagtctgatgagaacgggattcccagtagtccccagaaagtagctctgaccctggatcttgacctggagaaggagccggaatcagagccagatgagccccagaagccaggaaaaccttcagtcttcactgtcttccagaagatctggctgacagcgctgtgccttgtgttggtcttcacagtcaccctgtccgtcttccccgccatcacagccatggtgaccagctccaccagtcctgggaagtggagtcagttcttcaaccccatctgctgcttcctcctcttcaacatcatggactggctgggacggagcctgacctcttacttcctgtggccagacgaggacagccggctgctgcccctgctggtctgcctgcggttcctgttcgtgcccctcttcatgctgtgccacgtgccccagaggtcccggctgcccatcctcttcccacaggatgcctacttcatcaccttcatgctgctctttgccgtttctaatggctacctggtgtccctcaccatgtgcctggcgcccaggcaggtgctgccacacgagagggaggtggccggcgccctcatgaccttcttcctggccctgggactttcctgtggagcctccctctccttcctcttcaaggcgctgctctgaagtggcccctccaggctctttggcagcctcttctcgacgtctccttccggagctgagatccagcccagggcgaatggcgagcttggctcaggcctctgcggggtggaggcccctgggcctgaggctgccagcagcgggcaggagctgctcttcatccacttggagtgctgtggggaagaaatcaccaccggtcattctaaccctcacccaggaatgggggtgactcgcacaagacctcatggaaagggtgatgactagggaaaagagggtgcagggcacggctgctccccaccaccaggtctgcatttgttcatcatcatcaggagcagaggtgaccagagggttcagagtgggaggcggggccagcccaggccaggagcgcctcatcttcccaggcctcagccacccagggtaaaaggtgccagggaagttgtgggcacctgagaggaggaacagatgtggaggacctgagggtgctcaaagggccaggctcagcctcaagcagtgttttcattgccaacacttactgtacccactccgcagagcccagctgggcctgggccccagggccacagctagcctgcatgtgtgtactgcactttacagtttgcaaagctcttccatacccactctctcaccgaagcctaattgaggctcttggaaggagtcaggcaaggattgtgcttcccccattatacaggtgacaaaactgagtcctggggaaagtgactggtccgtggtagagccgggacccaatcccctctctctcctccctgttggtgctgttcttcctgcccaacacctgtttctcttttcctcaaggggtttggggcaggagcctgggcacttactccccgtttttgctgtttctccttctgaccctgctcttgggtctaataaccccatttatttgtatgatgcgttcaccaagtctttatttccg

SEQ ID NO: 21197 - protein, 336 aa, Homo sapiens [sequence omitted]

SEQ ID NO: 21198 - DNA, 1430 bp, Homo sapiens
ggctacctgtgcgactccagccgccctgcaccggaatctggggagacccgccccccgccccaccggtctgcggccctccgccccagcgcaggtgcaggtgcggcttctctgcccctttcaccccaggcgcatccgccgcggcggccatggcgcgaggagacgccccgcgggacagccagacgaggacagccggctgctgcccctgctggtctgcctgcggttcctgttcgtgcccctcttcatgctgtgccacgtgccccagaggtcccggctgcccatcctcttcccacaggatgcctacttcatcaccttcatgctgctctttgccgtttctaatggctacctggtgtccctcaccatgtgcctggcgcccaggcaggtgctgccacacgagagggaggtggccggcgccctcatgaccttcttcctggccctgggactttcctgtggagcctccctctccttcctcttcaaggcgctgctctgaagtggcccctccaggctctttggcagcctcttctcgacgtctccttccggagctgagatccagcccagggcgaatggcgagcttggctcaggcctctgcggggtggaggcccctgggcctgaggctgccagcagcgggcaggagctgctcttcatccacttggagtgctgtggggaagaaatcaccaccggtcattctaaccctcacccaggaatgggggtgactcgcacaagacctcatggaaagggtgatgactagggaaaagagggtgcagggcacggctgctccccaccaccaggtctgcatttgttcatcatcatcaggagcagaggtgaccagagggttcagagtgggaggcggggccagcccaggccaggagcgcctcatcttcccaggcctcagccacccagggtaaaaggtgccagggaagttgtgggcacctgagaggaggaacagatgtggaggacctgagggtgctcaaagggccaggctcagcctcaagcagtgttttcattgccaacacttactgtacccactccgcagagcccagctgggcctgggccccagggccacagctagcctgcatgtgtgtactgcactttacagtttgcaaagctcttccatacccactctctcaccgaagcctaattgaggctcttggaaggagtcaggcaaggattgtgcttcccccattatacaggtgacaaaactgagtcctggggaaagtgactggtccgtggtagagccgggacccaatcccctctctctcctccctgttggtgctgttcttcctgcccaacacctgtttctcttttcctcaaggggtttggggcaggagcctgggcacttactccccgtttttgctgtttctccttctgaccctgctcttgggtctaataaccccatttatttgtatgatgcgttcaccaagtctttatttccg

SEQ ID NO: 21199 - protein, 90 aa, Homo sapiens; identical to SEQ ID NO: 21189

SEQ ID NO: 21200 - DNA, 2503 bp, Homo sapiens
ggtggcgcgaccctctgtccccgcctcggggcggagcccaggtcccagcctgcggagcgcgagacacgccgaaatccgcccgaggctacctgtgcgactccagccgccctgcaccggaatctggggagacccgccccccgccccaccggtctgcggccctccgccccagcgcaggtgcaggtgcggcttctctgcccctttcaccccaggcgcatccgccgcggcggccatggcgcgaggagacgccccgcgggacagctaccacctggtcgggatcagcttcttcatcctggggctgggcaccctccttccctggaacttcttcatcaccgccatcccgtacttccaggcgcgactggccggggccggcaacagcacagccaggatcctgagcaccaaccacacgggtcccgaggatgccttcaacttcaacaattgggtgacgctgctgtcccagctgcccctgctgctcttcaccctcctcaactccttcctgtaccagtgcgtcccggagacggtgcgcattctgggcagcctgctggccatactgctgctctttgccctgacagcagcgctggtcaaggtggacatgagccccggacccttcttctccatcaccatggcctccgtctgcttcatcaactccttcagtgcagtcctacagggcagcctcttcgggcagctgggcaccatgccctccacctacagcaccctcttcctcagcggccagggcctggctgggatctttgctgcccttgccatgctcctgtccatggccagtggcgtggacgccgagacctctgccctggggtactttatcacgccctgtgtgggcatcctcatgtccatcgtgtgttacctgagcctgcctcacctgaagtttgcccgctactacctggccaataaatcatcccaggcccaagctcaggagctggagaccaaagctgagctcctccagtctgatgagaacgggattcccagtagtccccagaaagtagctctgaccctggatcttgacctggagaaggagccggaatcagagccagatgagccccagaagccaggaaaaccttcagtcttcactgtcttccagaagtcaccctgtccgtcttccccgccatcacagccatggtgaccagctccaccagtcctgggaagtggagtcagttcttcaaccccatctgctgcttcctcctcttcaacatcatggactggctgggacggagcctgacctcttacttcctgtggccagacgaggacagccggctgctgcccctgctggtctgcctgcggttcctgttcgtgcccctcttcatgctgtgccacgtgccccagaggtcccggctgcccatcctcttcccacaggatgcctacttcatcaccttcatgctgctctttgccgtttctaatggctacctggtgtccctcaccatgtgcctggcgcccaggcaggtgctgccacacgagagggaggtggccggcgccctcatgaccttcttcctggccctgggactttcctgtggagcctccctctccttcctcttcaaggcgctgctctgaagtggcccctccaggctctttggcagcctcttctcgacgtctccttccggagctgagatccagcccagggcgaatggcgagcttggctcaggcctctgcggggtggaggcccctgggcctgaggctgccagcagcgggcaggagctgctcttcatccacttggagtgctgtggggaagaaatcaccaccggtcattctaaccctcacccaggaatgggggtgactcgcacaagacctcatggaaagggtgatgactagggaaaagagggtgcagggcacggctgctccccaccaccaggtctgcatttgttcatcatcatcaggagcagaggtgaccagagggttcagagtgggaggcggggccagcccaggccaggagcgcctcatcttcccaggcctcagccacccagggtaaaaggtgccagggaagttgtgggcacctgagaggaggaacagatgtggaggacctgagggtgctcaaagggccaggctcagcctcaagcagtgttttcattgccaacacttactgtacccactccgcagagcccagctgggcctgggccccagggccacagctagcctgcatgtgtgtactgcactttacagtttgcaaagctcttccatacccactctctcaccgaagcctaattgaggctcttggaaggagtcaggcaaggattgtgcttcccccattatacaggtgacaaaactgagtcctggggaaagtgactggtccgtggtagagccgggacccaatcccctctctctcctccctgttggtgctgttcttcctgcccaacacctgtttctcttttcctcaaggggtttggggcaggagcctgggcacttactccccgtttttgctgtttctccttctgaccctgctcttgggtctaataaccccatttatttgtatgatgcgttcaccaagtctttatttccg

SEQ ID NO: 21201 - protein, 301 aa, Homo sapiens; identical to SEQ ID NO: 21191

SEQ ID NO: 21202 - DNA, 2543 bp, Homo sapiens
ggtggcgcgaccctctgtccccgcctcggggcggagcccaggtcccagcctgcggagcgcgagacacgccgaaatccgcccgaggctacctgtgcgactccagccgccctgcaccggaatctggggagacccgccccccgccccaccggtctgcggccctccgccccagcgcaggtgcaggtgcggcttctctgcccctttcaccccaggcgcatccgccgcggcggccatggcgcgaggagacgccccgcgggacagctaccacctggtcgggatcagcttcttcatcctggggctgggcaccctccttccctggaacttcttcatcaccgccatcccgtacttccaggcgcgactggccggggccggcaacagcacagccaggatcctgagcaccaaccacacgggtcccgaggatgccttcaacttcaacaattgggtgacgctgctgtcccagctgcccctgctgctcttcaccctcctcaactccttcctgtaccagtgcgtcccggagacggtgcgcattctgggcagcctgctggccatactgctgctctttgccctgacagcagcgctggtcaaggtggacatgagccccggacccttcttctccatcaccatggcctccgtctgcttcatcaactccttcagtgcagtcctacagggcagcctcttcgggcagctgggcaccatgccctccacctacagcaccctcttcctcagcggccagggcctggctgggatctttgctgcccttgccatgctcctgtccatggccagtggcgtggacgccgagacctctgccctggggtactttatcacgccctgtgtgggcatcctcatgtccatcgtgtgttacctgagcctgcctcacctgaagtttgcccgctactacctggccaataaatcatcccaggcccaagctcaggagctggagaccaaagctgagctcctccagtctgatgagaacgggattcccagtagtccccagaaagtagctctgaccctggatcttgacctggagaaggagccggaatcagagccagatgagccccagaagccaggaaaaccttcagtcttcactgtcttccagaagatctggctgacagcgctgtgccttgtgttggtcttcacagtcaccctgtccgtcttccccgccatcacagccatggtgaccagctccaccagtcctgggaagtggagtcagttcttcaaccccatctgctgcttcctcctcttcaacatcatggactggctgggacggagcctgacctcttacttcctgtggccagacgaggacagccggctgctgcccctgctggtctgcctgcggttcctgttcgtgcccctcttcatgctgtgccacgtgccccagaggtcccggctgcccatcctcttcccacaggatgcctacttcatcaccttcatgctgctctttgccgtttctaatggctacctggtgtccctcaccatgtgcctggcgcccaggcaggtgctgccacacgagagggaggtggccggcgccctcatgaccttcttcctggccctgggactttcctgtggagcctccctctccttcctcttcaaggcgctgctctgaagtggcccctccaggctctttggcagcctcttctcgacgtctccttccggagctgagatccagcccagggcgaatggcgagcttggctcaggcctctgcggggtggaggcccctgggcctgaggctgccagcagcgggcaggagctgctcttcatccacttggagtgctgtggggaagaaatcaccaccggtcattctaaccctcacccaggaatgggggtgactcgcacaagacctcatggaaagggtgatgactagggaaaagagggtgcagggcacggctgctccccaccaccaggtctgcatttgttcatcatcatcaggagcagaggtgaccagagggttcagagtgggaggcggggccagcccaggccaggagcgcctcatcttcccaggcctcagccacccagggtaaaaggtgccagggaagttgtgggcacctgagaggaggaacagatgtggaggacctgagggtgctcaaagggccaggctcagcctcaagcagtgttttcattgccaacacttactgtacccactccgcagagcccagctgggcctgggccccagggccacagctagcctgcatgtgtgtactgcactttacagtttgcaaagctcttccatacccactctctcaccgaagcctaattgaggctcttggaaggagtcaggcaaggattgtgcttcccccattatacaggtgacaaaactgagtcctggggaaagtgactggtccgtggtagagccgggacccaatcccctctctctcctccctgttggtgctgttcttcctgcccaacacctgtttctcttttcctcaaggggtttggggcaggagcctgggcacttactccccgtttttgctgtttctccttctgaccctgctcttgggtctaataaccccatttatttgtatgatgcgttcaccaagtctttatttccg

SEQ ID NO: 21203 - protein, 456 aa, Homo sapiens; identical to SEQ ID NO: 2713

SEQ ID NO: 21204 - DNA, 2290 bp, Homo sapiens
ggagcggctctggcatcacctcggagctgacgaagcgggaagagccccgcaccagtgctgcccctacagagctctcggcggggggtggaggcgcatccgccgcggcggccatggcgcgaggagacgccccgcgggacagctaccacctggtcgggatcagcttcttcatcctggggctgggcaccctccttccctggaacttcttcatcaccgccatcccgtacttccaggcgcgactggccggggccggcaacagcacagccaggatcctgagcaccaaccacacgggtcccgaggatgccttcaacttcaacaattgggtgacgctgctgtcccagctgcccctgctgctcttcaccctcctcaactccttcctgtaccagtgcgtcccggagacggtgcgcattctgggcagcctgctggccatactgctgctctttgccctgacagcagcgctggtcaaggtggacatgagccccggacccttcttctccatcaccatggcctccgtctgcttcatcaactccttcagtgcagtcctacagggcagcctcttcgggcagctgggcaccatgccctccacctacagcaccctcttcctcagcggccagggcctggctgggatctttgctgcccttgccatgctcctgtccatggccagtggcgtggacgccgagacctctgccctggggtactttatcacgccctgtgtgggcatcctcatgtccatcgtgtgttacctgagcctgcctcacctgaagtttgcccgctactacctggccaataaatcatcccaggcccaagctcaggagctggagaccaaagctgagctcctccagtctgatctggctgacagcgctgtgccttgtgttggtcttcacagtcaccctgtccgtcttccccgccatcacagccatggtgaccagctccaccagtcctgggaagtggagtcagttcttcaaccccatctgctgcttcctcctcttcaacatcatggactggctgggacggagcctgacctcttacttcctgtggccagacgaggacagccggctgctgcccctgctggtctgcctgcggttcctgttcgtgcccctcttcatgctgtgccacgtgccccagaggtcccggctgcccatcctcttcccacaggatgcctacttcatcaccttcatgctgctctttgccgtttctaatggctacctggtgtccctcaccatgtgcctggcgcccaggcaggtgctgccacacgagagggaggtggccggcgccctcatgaccttcttcctggccctgggactttcctgtggagcctccctctccttcctcttcaaggcgctgctctgaagtggcccctccaggctctttggcagcctcttctcgacgtctccttccggagctgagatccagcccagggcgaatggcgagcttggctcaggcctctgcggggtggaggcccctgggcctgaggctgccagcagcgggcaggagctgctcttcatccacttggagtgctgtggggaagaaatcaccaccggtcattctaaccctcacccaggaatgggggtgactcgcacaagacctcatggaaagggtgatgactagggaaaagagggtgcagggcacggctgctccccaccaccaggtctgcatttgttcatcatcatcaggagcagaggtgaccagagggttcagagtgggaggcggggccagcccaggccaggagcgcctcatcttcccaggcctcagccacccagggtaaaaggtgccagggaagttgtgggcacctgagaggaggaacagatgtggaggacctgagggtgctcaaagggccaggctcagcctcaagcagtgttttcattgccaacacttactgtacccactccgcagagcccagctgggcctgggccccagggccacagctagcctgcatgtgtgtactgcactttacagtttgcaaagctcttccatacccactctctcaccgaagcctaattgaggctcttggaaggagtcaggcaaggattgtgcttcccccattatacaggtgacaaaactgagtcctggggaaagtgactggtccgtggtagagccgggacccaatcccctctctctcctccctgttggtgctgttcttcctgcccaacacctgtttctcttttcctcaaggggtttggggcaggagcctgggcacttactccccgtttttgctgtttctccttctgaccctgctcttgggtctaataaccccatttatttgtatgatgcgttcaccaagtctttatttccg

SEQ ID NO: 21205 - protein, 361 aa, Homo sapiens
MARGDAPRDSYHLVGISFFILGLGTLLPWNFFITAIPYFQARLAGAGNSTARILSTNHTGPEDAFNFNNWVTLLSQLPLLLFTLLNSFLYQCVPETVRILGSLLAILLLFALTAALVKVDMSPGPFFSITMASVCFINSFSAVLQGSLFGQLGTMPSTYSTLFLSGQGLAGIFAALAMLLSMASGVDAETSALGYFITPCVGILMSIVCYLSLPHLKFARYYLANKSSQAQAQELETKAELLQSDLADSAVPCVGLHSHPVRLPRHHSHGDQLHQSWEVESVLQPHLLLPPLQHHGLAGTEPDLLLPVARRGQPAAAPAGLPAVPVRAPLHAVPRAPEVPAAHPLPTGCLLHHLHAALCRF

SEQ ID NO: 21206 - DNA, 2534 bp, Homo sapiens
acgctctgggcggggactccgcagcggctccctagttagggggcgccccggtgggttccagctttaggggtcgcaggagcggctctggcatcacctcggagctgacgaagcgggaagagccccgcaccagtgctgcccctacagagctctcggcggggggtggaggtgcaggtgcggcttctctgcccctttcaccccaggcgcatccgccgcggcggccatggcgcgaggagacgccccgcgggacagctaccacctggtcgggatcagcttcttcatcctggggctgggcaccctccttccctggaacttcttcatcaccgccatcccgtacttccaggcgcgactggccggggccggcaacagcacagccaggatcctgagcaccaaccacacgggtcccgaggatgccttcaacttcaacaattgggtgacgctgctgtcccagctgcccctgctgctcttcaccctcctcaactccttcctgtaccagtgcgtcccggagacggtgcgcattctgggcagcctgctggccatactgctgctctttgccctgacagcagcgctggtcaaggtggacatgagccccggacccttcttctccatcaccatggcctccgtctgcttcatcaactccttcagtgcagtcctacagggcagcctcttcgggcagctgggcaccatgccctccacctacagcaccctcttcctcagcggccagggcctggctgggatctttgctgcccttgccatgctcctgtccatggccagtggcgtggacgccgagacctctgccctggggtactttatcacgccctgtgtgggcatcctcatgtccatcgtgtgttacctgagcctgcctcacctgaagtttgcccgctactacctggccaataaatcatcccaggcccaagctcaggagctggagaccaaagctgagctcctccagtctgatgagaacgggattcccagtagtccccagaaagtagctctgaccctggatcttgacctggagaaggagccggaatcagagccagatgagccccagaagccaggaaaaccttcagtcttcactgtcttccagaagatctggctgacagcgctgtgccttgtgttggtcttcacagtcaccctgtccgtcttccccgccatcacagccatggtgaccagctccaccagtcctgggaagtggagtcagttcttcaaccccatctgctgcttcctcctcttcaacatcatggactggctgggacggagcctgacctcttacttcctgtggccagacgaggacagccggctgctgcccctgctggtctgcctgcggttcctgttcgtgcccctcttcatgctgtgccacgtgccccagaggtcccggctgcccatcctcttcccacaggatgcctacttcatcaccttcatgctgctctttgccgtttctaatggctacctggtgtccctcaccatgtgcctggcgcccaggcaggtgctgccacacgagagggaggtggccggcgccctcatgaccttcttcctggccctgggactttcctgtggagcctccctctccttcctcttcaaggcgctgctctgaagtggcccctccaggctctttggcagcctcttctcgacgtctccttccggagctgagatccagcccagggcgaatggcgagcttggctcaggcctctgcggggtggaggcccctgggcctgaggctgccagcagcgggcaggagctgctcttcatccacttggagtgctgtggggaagaaatcaccaccggtcattctaaccctcacccaggaatgggggtgactcgcacaagacctcatggaaagggtgatgactagggaaaagagggtgcagggcacggctgctccccaccaccaggtctgcatttgttcatcatcatcaggagcagaggtgaccagagggttcagagtgggaggcggggccagcccaggccaggagcgcctcatcttcccaggcctcagccacccagggtaaaaggtgccagggaagttgtgggcacctgagaggaggaacagatgtggaggacctgagggtgctcaaagggccaggctcagcctcaagcagtgttttcattgccaacacttactgtacccactccgcagagcccagctgggcctgggccccagggccacagctagcctgcatgtgtgtactgcactttacagtttgcaaagctcttccatacccactctctcaccgaagcctaattgaggctcttggaaggagtcaggcaaggattgtgcttcccccattatacaggtgacaaaactgagtcctggggaaagtgactggtccgtggtagagccgggacccaatcccctctctctcctccctgttggtgctgttcttcctgcccaacacctgtttctcttttcctcaaggggtttggggcaggagcctgggcacttactccccgtttttgctgtttctccttctgaccctgctcttgggtctaataaccccatttatttgtatgatgcgttcaccaagtctttatttccg

SEQ ID NO: 21207 - protein, 456 aa, Homo sapiens; identical to SEQ ID NO: 2713

SEQ ID NO: 21208 - DNA, 685 bp, Homo sapiens
ctggcccacccataggatagacccatctgtcaccccctgacctcctctgacctgacctaccttgtgagccagtgagggaggacccagcactggggcctgggccaagtccacccagaaatcagggactggcctggggctcacctctgcctctcccaggctccagcttgtgctctccaccgcatctacagtttacgtactcggttcctcagagcacccactggtggttccacagacccccttgggggcagatggggtttctgagtgggattggaagctgtagatcagctcctgtcctgacttggatgagaccagctcctctttcacctgcgttatgtattgtctctttggaagatttcatttaaagatacagtaccatggctaaaaccaaccccaaaactaagactcttgctcagtccctcacctggtgcaggaacctccatgtaacattctctgagcagcaaaggctggatgctggggacacagaggtcagctggacatgatttttgctttcagggagctcacagtgcaagccctggcctgcacgcgcctgtaatcccaacattttggaaggccgaggcgggcatattgcttgagcccaggagttcgagaccagcctgggcaacatggtgaatccccatttctacaaaaataaaaaaattagccgggcatggcagcctgcacctat

SEQ ID NO: 21209 - protein, 53 aa, Homo sapiens
MLGTQRSAGHDFCFQGAHSASPGLHAPVIPTFWKAEAGILLEPRSSRPAWATW

SEQ ID NO: 21210 - DNA, 846 bp, Homo sapiens
ctccgccccagcgcaggtgcaggtgcggcttctctgcccctttcaccccaggcgcatccgccgcggcggccatggcgcgaggagacgccccgcgggacagctaccacctggtcgggatcagcttcttcatcctggggctgggcaccctccttccctggaacttcttcatcaccgccatcccgtacttccaggcgcgactggccggggccggcaacagcacagccaggatcctgagcaccaaccacacgggtcccgaggatgccttcaacttcaacaattgggtgacgctgctgtcccagctgcccctgctgctcttcaccctcctcaactccttcctgtaccagtgcgtcccggagacggtgcgcattctgggcagcctgctggccatactgctgctctttgccctgacagcagcgctggtcaaggtggacatgagccccggacccttcttctccatcaccatggcctccgtctgcttcatcaactccttcagtgcagtcctacagggcagcctcttcgggcagctgggcaccatgccctccacctacagcaccctcttcctcagcggccagggcctggctgggatctttgctgcccttgccatgctcctgtccatggccagtggcgtggacgccgagacctctgccctggggtactttatcacgccctgtgtgggcatcctcatgtccatcgtgtgttacctgagcctgcctcacctgaagtttgcccgctactacctggccaataaatcatcccaggcccaagctcaggagctggagaccaaagctgagctcctccagtctgtcaccctgtccgtcttccccgccatcacagccatggtgacca

SEQ ID NO: 21211 - protein, 257 aa, Homo sapiens
MARGDAPRDSYHLVGISFFILGLGTLLPWNFFITAIPYFQARLAGAGNSTARILSTNHTGPEDAFNFNNWVTLLSQLPLLLFTLLNSFLYQCVPETVRILGSLLAILLLFALTAALVKVDMSPGPFFSITMASVCFINSFSAVLQGSLFGQLGTMPSTYSTLFLSGQGLAGIFAALAMLLSMASGVDAETSALGYFITPCVGILMSIVCYLSLPHLKFARYYLANKSSQAQAQELETKAELLQSVTLSVFPAITAMV

SEQ ID NO: 21212 - DNA, 967 bp, Homo sapiens
cttgtccggtgacctaggagcaggcctcctggtcaacagccccacagaccaatggctgcacctcagaagaggactgaatagcgggtgttgcccccgagtgctcagagtccctagggaagctcacacctgcgcaaccttgtccagagtcccctgtgtatcctgccggcacctcctccagggagcctctgagtcttgcctagttgagcagcagcccccatccctgtcctccacagccttcagtgcagtcctacagggcagcctcttcgggcagctgggcaccatgccctccacctacagcaccctcttcctcagcggccagggcctggctgggatctttgctgcccttgccatgctcctgtccatggccagtggcgtggacgccgagacctctgccctggggtactttatcacgccctgtgtgggcatcctcatgtccatcgtgtgttacctgagcctgcctcacctgaagtttgcccgctactacctggccaataaatcatcccaggcccaagctcaggagctggagaccaaagctgagctcctccagtctggtaagccctgagaccctcctggggaggtgggagatgcagaggaagctagagccacctcccctgggaagctgttccatctgttcccagccagagcccacccctagtagccttgtgcaaacaggaagatcatgaagggaagttggtaggattaaagtcatccctgctgttgtttgggcctcagtttccacctctataaaatggggaggcgacagaggttccatgcatgcaaactttggatccgaagacctctgaattggaatactagtttcacaacatcccagctgtgtggcctgagacaaaccacttagccactgcacccctctgaacctcaatgtgtcatttgtaaagcaatggtaatgagataatccatctaaggtgcttcgctcatcacccgacccatgcacgcgcttcctggt

SEQ ID NO: 21213 - protein, 93 aa, Homo sapiens
MPSTYSTLFLSGQGLAGIFAALAMLLSMASGVDAETSALGYFITPCVGILMSIVCYLSLPHLKFARYYLANKSSQAQAQELETKAELLQSGKP

SEQ ID NO: 21214 - DNA, 751 bp, Homo sapiens
ccctgaggcgggtgggggaaggagagacgggtggcgcgaccctctgtccccgcctcggggcggagcccaggtcccagcctgcggagcgcgagacacgccgaaatccgcccgaggctacctgtgcgactccagccgccctgcaccggaatctggggagacccgccccccgccccaccggtctgcggccctccgccccagcgcaggtgcaggtgcggcttctctgcccctttcaccccaggcgcatccgccgcggcggccatggcgcgaggagacgccccgcgggacagctaccacctggtcgggatcagcttcttcatcctggggctgggcaccctccttccctggaacttcttcatcaccgccatcccgtacttccaggcgcgactggccggggccggcaacagcacagccaggatcctgagcaccaaccacacgggtcccgaggatgccttcaacttcaacaattgggtgacgctgctgtcccagctgcccctgctgctcttcaccctcctcaactccttcctgtaccagtggtgagaggcctgccctggctcctgcgccctctgccgaggcagcttcattgaggccctcccctgcgccccctgccccccagccctactgcccagccccaggtgtcgagcctccttccccagccccctctggcctgggccccactgatgcactctgcctgcttctgagcagcgtcccggagacggtgcgcattctgggcagcctgctggccatactgctg

SEQ ID NO: 21215 - protein, 92 aa, Homo sapiens [sequence omitted]

SEQ ID NO: 21216 - DNA, 478 bp, Homo sapiens
gtacaggaaggagttgaggagggtgaagagcagcaggggcagctgggacagcagcgtcacccaattgttgaagttgaaggcatcacccctccacatgcactttgcctaccctactcccaatttacaaatctcctcttccatgaagcagaaggaactttctccctcccctggggacccactgcactctgctgcaagcctggaatgtcacgcatcatgttacattattaatagctctttggccccctcttgctctcaagcccaggggctgattcatctctgggtttccagggcccagcacagagccagtacccaagaagcatttgcaaagttgttgcagtgaatacagatgaataacccggtcccaaagacaatgcaaaccccacatttctgccttccctgaagagcctccctgctgtttcctcctgtgtccccagtgcctgctccacagtagatgcacattaaaagtttgttgaatgag

SEQ ID NO: 21217 - protein, 81 aa, Homo sapiens
MHFAYPTPNLQISSSMKQKELSPSPGDPLHSAASLECHASCYIINSSLAPSCSQAQGLIHLWVSRAQHRASTQEAFAKLLQ

SEQ ID NO: 21218 - DNA, 1101 bp, Homo sapiens
atggaaagctgtggcctgcaggacccagacgccagagggcgacatagacggcgggactccagccgccaagcacgcccgccgcagccccacaatcggccacgcggtggcgctaagccacacaatgcttggtttgccgcaggctttggggagcagagggctgaccgggggagagcggagaccgggggagacttctgtccaaaccttggaaagaaacgagatgccaggcctagcgccttcggggatcctctctggacaaggccacagggtgaaaacaccagtctggacctgggcggactttttggaaaagcttctggatgccacggactccacgaccaaccaactaggttgctgctgcttgcaaacatcgcctccattgaaggattcctgcagccaccagctctggaactttctggaaccaaacatttccccagactgcctacaaggaccaattggcctctggatgtagaagtgcctgaccattctcaaggagctgcgtggattccagacatctctgggctggtctctggaccgggatgggggacccagaggtggagccgaacacacaagcagcacttgagggctccgagggtggcaaggagagaagttcctgctctggtacagccctgggaccttgaaagactgaagctaagaagtgctggagacagcagttgctttagccacaggctgtgtagaccacctgaggatgacctgggggtctgttttgtgcaccttggaacccatcggatccctccaatgacacatttgtccagagcaagacaagatcacactttgacagccctctgtcaagatccttgctccaaatctccagactagcagccaggagtctccatgctgttctgaagaagcagattcctcacccacccttcaactccttcccaggaggtaatcctcctccaaatctctggaaaagatacacctcctcttctctgataaaggctggggggtgatgcccctcccccagtttcccaataaagctatgcaagacaggagcaagggatctcacggcctgtttttgctacaaaaaccctttttcggaaaaaataataaagaaaggaatcagccaatccctcctcgatgcca

SEQ ID NO: 21219 - protein, 277 aa, Homo sapiens [sequence omitted]

SEQ ID NO: 21220 - DNA, 637 bp, Homo sapiens
cgtgtgtcactggggtcactccactctctgcattaggtctcagtcatccaagaccatctttcaagggccgtcactccaattatgagtctgggattttctgaaattgagcattttggccaggctgtggggtccctctatgactgcctgtaagacactgccaaggggactttcttcctttcaccagactgaagctaagaagtgctggagacagcagttgctttagccacaggctgtgtagaccacctgaggatgacctgggggtctgttttgtgcaccttggaacccatcggatccctccaatgacacatttgtccagagcaagacaagatcacactttgacagccctctgtcaagatccttgctccaaatctccagactagcagccaggagtctccatgctgttctgaagaagcagattcctcacccacccttcaactccttcccaggaggtaatcctcctccaaatctctggaaaagatacacctcctcttctctgataaaggctggggggtgatgcccctcccccagtttcccaataaagctatgcaagacaggagcaagggatctcacggcctgtttttgctacaaaaaccctttttcggaaaaaataataaagaaaggaatcagccaatccctc

SEQ ID NO: 21221 - protein, 40 aa, Homo sapiens
MPLPQFPNKAMQDRSKGSHGLFLLQKPFFGKNNKERNQPI

SEQ ID NO: 21222 - DNA, 3302 bp, Homo sapiens
gctatataaggcggcgtgaggcaggcgaggggggcagcgcagccgagcggagcccaggagagcagagagcgagcctgagcgagagacggggaagcacggaggaggaagccgccggtgcgtcgggacgggagcgcaggtgctcgggcacccgagctggagctccgcagccgccggtcatgtaccgctccaccaagggcgcctccaaggcgcgccgggaccagatcaacgccgagatccggaacctcaaggagctgctgccgctggccgaagcggacaaggtccggctgtcctacctgcacatcatgagcctcgcctgcatctacactcgcaagggcgtcttcttcgctggtggcactcctctggcgggccccacggggcttctctcagctcaagagcttgaggacatcgtagcggcactacccggctttctgcttgtgttcacagccgaggggaaattgctctacctgtctgagagtgtgagcgagcatctgggccactccatggtggacctggttgcccagggtgacagcatctacgacatcattgacccagctgaccacctcactgtgcgccagcaactcaccctgccctctgccctggacactgatcgcctcttccgctgccgcttcaacacctccaagtccctcaggcgccagagtgcaggcaacaaactcgtgcttattcgaggccgattccatgctcacccacctggagcctactgggcaggaaatcccgtgttcacagctttctgtgcccctctggagccgagaccccgcccaggtcctggccctggccctggccctgcctcgctcttcctggccatgttccagagccgccatgctaaagacctggctctactggacatctccgagagtgtcctaatctacctgggctttgagcgcagtgaactgctttgtaaatcatggtatggactgctgcaccccgaggacctggcccacgcttctgctcaacactaccgcctgttggctgagagtggagatattcaggcagagatggtggtgaggctacaggccaagactggaggctgggcatggatttactgcctgttatactcagaaggtccagagggacccattactgccaataactacccaatcagtgacatggaagcctggagcctccgccagcagttgaactctgaagacacccaggcagcttatgtcctgggcactccgaccatgctgccctcattccctgaaaacattctttcccaggaagagtgctccagcactaacccactcttcaccgcagcactgggggctcccagaagcaccagcttccccagtgctcctgaactgagtgttgtctctgcatcagaagagcttccccgaccctccaaagaactggacttcagttacctgacattcccttctgggcctgagccttctctccaagcagaactaagcaaggatcttgtgtgcactccaccttacacgccccatcagccaggaggctgtgccttcctcttcagcctccatgagcccttccagacccatttgcccaccccatccagcactcttcaagaacagctgactccaagcactgcgaccttctctgatcagttgacgcccagcagtgcaaccttcccagatccactaactagcccactgcaaggccagttgactgaaacctcggtcagaagctatgaagaccagttgactccctgcacctccaccttcccagaccagctgcttcccagcacagccaccttcccagagcctctgggcagccctgcccatgaacagctgactcctcccagcacagcattccaagcacacctggacagccccagccaaaccttcccagagcaactgagccccaaccctaccaagacttactttgcccaggagggatgcagttttctctatgagaagttgcccccaagtcctagcagccctggtaatggggactgcacgctcttggccctagcccagctccggggccccctctctgtggatgtccccctggtgcccgaaggcctgctcacacctgaggcctctccagtcaagcagagtttcttccactactctgaaaaggagcagaatgagatagaccgtctcatccagcagattagccaattggctcagggcatggacagacccttctcagctgaggctggcactggcggactagagccacttggaggactggagcccctggactccaacctgtccctgtcaggggcaggcccccctgtgctcagcctggacctgaaaccctggaaatgccaggagctggacttcctggctgaccctgataacatgttcctggaagagacgcccgtggaagacatcttcatggatctctctaccccagatcccagtgaggaatggggctcaggggatcctgaggcagagggcccaggaggggccccatcgccttgcaacaacctgtccccagaagaccacagcttcctggaggacctggccacatatgaaaccgcctttgagacaggtgtctcagcattcccctatgatgggtttactgatgagttgcatcaactccagagccaagttcaagacagcttccatgaagatggaagtggaggggaaccaacgttttgaataagtctgtgacttaacgtcgtcaagtatggcatattgtcatcaagacgtggagccgctctccacccccccgggactgttggggggattctgagggccagagggggatatatatgattccccaggccctgcaggattttggggggggggaggtgggagggcaagggaggggagcttctttttaaaatcaagagacttcgagcgatcccagtttccatttcaatctgtattcactcgtagtgagtttccttgaatgggatttcaagcggagaatgggggagtctcacttccccgccgccttgccccattggcctgggccagttctccactcctaggggccaagccacccctagccttggtgggggaaaggcagggcccacccgggccagcccgtgccctgaggggctcttgacacccacgtagaattctctacacaccagtaacgggatttcaattccgatggactctgccgccctggcggcccttcctgtgacttttgcgccccgcgcctggggtggggggtgcgaagagacgctacgttcctttccgatggaggaaggcagacctgccgtcacacgtgtgcttgcacgagtgcgtgtacctggtgcgggactcacccggccgccagactgcctgggcctgcccagatggccacctcgtggtgctgcggtgactttgtagccaactttataataaagtccagtttgcctttttggt

SEQ ID NO: 21223 - protein, 802 aa, Homo sapiens
MYRSTKGASKARRDQINAEIRNLKELLPLAEADKVRLSYLHIMSLACIYTRKGVFFAGGTPLAGPTGLLSAQELEDIVAALPGFLLVFTAEGKLLYLSESVSEHLGHSMVDLVAQGDSIYDIIDPADHLTVRQQLTLPSALDTDRLFRCRFNTSKSLRRQSAGNKLVLIRGRFHAHPPGAYWAGNPVFTAFCAPLEPRPRPGPGPGPGPASLFLAMFQSRHAKDLALLDISESVLIYLGFERSELLCKSWYGLLHPEDLAHASAQHYRLLAESGDIQAEMVVRLQAKTGGWAWIYCLLYSEGPEGPITANNYPISDMEAWSLRQQLNSEDTQAAYVLGTPTMLPSFPENILSQEECSSTNPLFTAALGAPRSTSFPSAPELSVVSASEELPRPSKELDFSYLTFPSGPEPSLQAELSKDLVCTPPYTPHQPGGCAFLFSLHEPFQTHLPTPSSTLQEQLTPSTATFSDQLTPSSATFPDPLTSPLQGQLTETSVRSYEDQLTPCTSTFPDQLLPSTATFPEPLGSPAHEQLTPPSTAFQAHLDSPSQTFPEQLSPNPTKTYFAQEGCSFLYEKLPPSPSSPGNGDCTLLALAQLRGPLSVDVPLVPEGLLTPEASPVKQSFFHYSEKEQNEIDRLIQQISQLAQGMDRPFSAEAGTGGLEPLGGLEPLDSNLSLSGAGPPVLSLDLKPWKCQELDFLADPDNMFLEETPVEDIFMDLSTPDPSEEWGSGDPEAEGPGGAPSPCNNLSPEDHSFLEDLATYETAFETGVSAFPYDGFTDELHQLQSQVQDSFHEDGSGGEPTF

SEQ ID NO: 21224 - DNA, 325 bp, Homo sapiens
cctggccatgttccagagccgccatgctaaagacctggctctactggacatctccgagagtggctgagagtggagatattcaggcagagatggtggtgaggctacaggccaagactggaggctgggcatggatttactgcctgttatactcagaaggtccagagggacccattactgccaataactacccaatcaggtaagccacaagccaggggactagggggcagctgaggtcgtcatggaggagacacaaatcagggaactgctctggatatggacgtcggacccttaccagctgcctcttctctcctctccagtgacatgg

SEQ ID NO: 21225 - protein, 58 aa, Homo sapiens
MLKTWLYWTSPRVAESGDIQAEMVVRLQAKTGGWAWIYCLLYSEGPEGPITANNYPIR

SEQ ID NO: 21226 - DNA, 1431 bp, Homo sapiens
aagatggtggcgcccagagcttcgctcttgctgctcccctgagagaggcgtttccatcaaccagttttgcaaggagttcaatgagaggacaaaggacatcaaggaaggcattcctctgcctaccaagattttagtgaagcctgacaggacatttgaaattaagattggacagcccactgtttcctacttcctgaaggcagcagctgggattgaaaagggggcccggcaaacagggaaagaggtggcaggcctggtgaccttgaagcatgtgtatgagattgcccgcatcaaagctcaggatgaggcatttgccctgcaggatgtacccctgtcgtctgttgtccgctccatcatcgggtctgcccgttctctgggcattcgcgtggtgaaggacctcagttcagaagagcttgcagctttccagaaggaacgagccatcttcctggctgctcagaaggaggcagatttggctgcccaagaagaagctgccaagaagtgacccttgccccaccaactcccagatttcaaaggaggtagttgcaaaagctgtgcccaaggggaggaaggaggtcacaccaatatgatgatggttttcatgactttgaatgatatatttttgtacatctagctgtatcgaggcatcaggcctgaataaacatcctttcttacccactgtcatcttctatcttgggacctcagggaagggaaccagtactggtggtagccaatatgggcagacattaggaaattggggtcttcatactgcttctcagatgtgcaaactgaggttcagccaagcaaagtaacttgcccaggtccttttttttcttttttaagttataattttgttttattgcccaggttctgaattggtgccagaggtaggaatagaacccaggccttctcatttgaaatcctgtgttcttcccctccccagggtgggaactatggttgctagggctgaggtgtattgcttacttcttccatcaaaaatctcttttatctctgaacaacttgccacctctgcagaaacaagtccctgtggagatctcagttcagccccaggcagggttactacatggagtacccagatcccaggggctacttcaggcccttctactaagctcctgaccctggctctgggtcagatgttggctgaacatgaactattgtagggctgacagctacagaccacagaaagagcaaagcttcagtaggttcctgcctgatggagaagtcctcgggaagcccttggccttctatttcctcattgtcctttcagagaagagagcaggagttgggggagaaaggagattcgcatttactgaccatctgttatgtgctagacacttcattttacactgagaaaatatggaaagcatagataaacacctaaaagaaaataaaaacctcatgttatcccaccaccca

SEQ ID NO: 21227 - protein, 75 aa, Homo sapiens [sequence omitted]

SEQ ID NO: 21228 - DNA, 1704 bp, Homo sapiens
cttgacctctggcccaagatggtggcgcccagagcttcgctcttgctgctcccctgaggtgaactgaagccagcagccccgcatcatgtcaaagctcggccgggccgcccggggcctcaggaagcccgaggtcggcggtgtgatccgggcgatcgtgcgggcaggcctggccatgcccgggcccccactaggcccagtgctgggtcagagaggcgtttccatcaaccagttttgcaaggagttcaatgagaggacaaaggacatcaaggaaggcattcctctgcctaccaagattttagtgaagcctgacaggacatttgaaattaagattggacagcccactgtttcctacttcctgaaggcagcagctgggattgaaaagggggcccggcaaacagggaaagaggtggcaggcctggtgaccttgaagcatgtgtatgagattgcccgcatcaaagctcaggatgaggcatttgccctgcaggatgtacccctgtcgtctgttgtccgctccatcatcgggtctgcccgttctctgggcattcgcgtggtgaaggaacgttgttctgcaaatgttctaagaaatggaaagatctccatgaaggatccaagtgggagaagttcagtgtgacctgggtctgtcgtcctagaggcaagtggagaatgcctcagttcagaagagcttgcagctttccagaaggaacgagccatcttcctggctgctcagaaggaggcagatttggctgcccaagaagaagctgccaagaagtgacccttgccccaccaactcccagatttcaaaggaggtagttgcaaaagctgtgcccaaggggaggaaggaggtcacaccaatatgatgatggttttcatgactttgaatgatatatttttgtacatctagctgtatcgaggcatcaggcctgaataaacatcctttcttacccactgtcatcttctatcttgggacctcagggaagggaaccagtactggtggtagccaatatgggcagacattaggaaattggggtcttcatactgcttctcagatgtgcaaactgaggttcagccaagcaaagtaacttgcccaggtccttttttttcttttttaagttataattttgttttattgcccaggttctgaattggtgccagaggtaggaatagaacccaggccttctcatttgaaatcctgtgttcttcccctccccagggtgggaactatggttgctagggctgaggtgtattgcttacttcttccatcaaaaatctcttttatctctgaacaacttgccacctctgcagaaacaagtccctgtggagatctcagttcagccccaggcagggttactacatggagtacccagatcccaggggctacttcaggcccttctactaagctcctgaccctggctctgggtcagatgttggctgaacatgaactattgtagggctgacagctacagaccacagaaagagcaaagcttcagtaggttcctgcctgatggagaagtcctcgggaagcccttggccttctatttcctcattgtcctttcagagaagagagcaggagttgggggagaaaggagattcgcatttactgaccatctgttatgtgctagacacttcattttacactgagaaaatatggaaagcatagataaacacctaaaagaaaataaaaacctcatgttatcccaccaccca

SEQ ID NO: 21229 - protein, 181 aa, Homo sapiens; identical to SEQ ID NO: 2721

SEQ ID NO: 21230 - DNA, 1527 bp, Homo sapiens
gtgaggacccttgacctctggcccaagatggtggcgcccagagcttcgctcttgctgctcccctgaggtgaactgaagccagcagccccgcatcatgtcaaagctcggccgggccgcccggggcctcaggaagcccgagagaggcgtttccatcaaccagttttgcaaggagttcaatgagaggacaaaggacatcaaggaaggcattcctctgcctaccaagattttagtgaagcctgacaggacatttgaaattaagattggacagcccactgtttcctacttcctgaaggcagcagctgggattgaaaagggggcccggcaaacagggaaagaggtggcaggcctggtgaccttgaagcatgtgtatgagattgcccgcatcaaagctcaggatgaggcatttgccctgcaggatgtacccctgtcgtctgttgtccgctccatcatcgggtctgcccgttctctgggcattcgcgtggtgaaggacctcagttcagaagagcttgcagctttccagaaggaacgagccatcttcctggctgctcagaaggaggcagatttggctgcccaagaagaagctgccaagaagtgacccttgccccaccaactcccagatttcaaaggaggtagttgcaaaagctgtgcccaaggggaggaaggaggtcacaccaatatgatgatggttttcatgactttgaatgatatatttttgtacatctagctgtatcgaggcatcaggcctgaataaacatcctttcttacccactgtcatcttctatcttgggacctcagggaagggaaccagtactggtggtagccaatatgggcagacattaggaaattggggtcttcatactgcttctcagatgtgcaaactgaggttcagccaagcaaagtaacttgcccaggtccttttttttcttttttaagttataattttgttttattgcccaggttctgaattggtgccagaggtaggaatagaacccaggccttctcatttgaaatcctgtgttcttcccctccccagggtgggaactatggttgctagggctgaggtgtattgcttacttcttccatcaaaaatctcttttatctctgaacaacttgccacctctgcagaaacaagtccctgtggagatctcagttcagccccaggcagggttactacatggagtacccagatcccaggggctacttcaggcccttctactaagctcctgaccctggctctgggtcagatgttggctgaacatgaactattgtagggctgacagctacagaccacagaaagagcaaagcttcagtaggttcctgcctgatggagaagtcctcgggaagcccttggccttctatttcctcattgtcctttcagagaagagagcaggagttgggggagaaaggagattcgcatttactgaccatctgttatgtgctagacacttcattttacactgagaaaatatggaaagcatagataaacacctaaaagaaaataaaaacctcatgttatcccaccaccca

SEQ ID NO: 21231 - protein, 166 aa, Homo sapiens; identical to SEQ ID NO: 2719

SEQ ID NO: 21232 - DNA, 1417 bp, Homo sapiens
gtgaggacccttgacctctggcccaagatggtggcgcccagagcttcgctcttgctgctcccctgaggtgaactgaagccagcagccccgcatcatgtcaaagctcggccgggccgcccggggcctcaggaagcccgagagaggcgtttccatcaaccagttttgcaaggagttcaatgagaggacaaaggacatcaaggaaggcattcctctgcctaccaagattttagtgaagcctgacaggacatttgaaattaagattggacagcccactgtttcctacttcctgaaggcagcagctgggattgaaaagggggcccggcaaacagggaaagaggtggcaggcctggtgacctctgggcattcgcgtggtgaaggacctcagttcagaagagcttgcagctttccagaaggaacgagccatcttcctggctgctcagaaggaggcagatttggctgcccaagaagaagctgccaagaagtgacccttgccccaccaactcccagatttcaaaggaggtagttgcaaaagctgtgcccaaggggaggaaggaggtcacaccaatatgatgatggttttcatgactttgaatgatatatttttgtacatctagctgtatcgaggcatcaggcctgaataaacatcctttcttacccactgtcatcttctatcttgggacctcagggaagggaaccagtactggtggtagccaatatgggcagacattaggaaattggggtcttcatactgcttctcagatgtgcaaactgaggttcagccaagcaaagtaacttgcccaggtccttttttttcttttttaagttataattttgttttattgcccaggttctgaattggtgccagaggtaggaatagaacccaggccttctcatttgaaatcctgtgttcttcccctccccagggtgggaactatggttgctagggctgaggtgtattgcttacttcttccatcaaaaatctcttttatctctgaacaacttgccacctctgcagaaacaagtccctgtggagatctcagttcagccccaggcagggttactacatggagtacccagatcccaggggctacttcaggcccttctactaagctcctgaccctggctctgggtcagatgttggctgaacatgaactattgtagggctgacagctacagaccacagaaagagcaaagcttcagtaggttcctgcctgatggagaagtcctcgggaagcccttggccttctatttcctcattgtcctttcagagaagagagcaggagttgggggagaaaggagattcgcatttactgaccatctgttatgtgctagacacttcattttacactgagaaaatatggaaagcatagataaacacctaaaagaaaataaaaacctcatgttatcccaccaccca

SEQ ID NO: 21233 - protein, 142 aa, Homo sapiens
MSKLGRAARGLRKPERGVSINQFCKEFNERTKDIKEGIPLPTKILVKPDRTFEIKIGQPTVSYFLKAAAGIEKGARQTGKEVAGLVTSGHSRGEGPQFRRACSFPEGTSHLPGCSEGGRFGCPRRSCQEVTLAPPTPRFQRR

SEQ ID NO: 21234 - DNA, 1605 bp, Homo sapiens
gtgaggacccttgacctctggcccaagatggtggcgcccagagcttcgctcttgctgctcccctgaggtgaactgaagccagcagccccgcatcatgtcaaagctcggccgggccgcccggggcctcaggaagcccgaggtcggcggtgtgatccgggcgatcgtgcgggcaggcctggccatgcccgggcccccactaggcccagtgctgggtcagagaggcgtttccatcaaccagttttgcaaggagttcaatgagaggacaaaggacatcaaggaaggcattcctctgcctaccaagattttagtgaagcctgacaggacatttgaaattaagattggacagcccactgtttcctacttcctgaaggcagcagctgggattgaaaagggggcccggcaaacagggaaagaggtggcaggcctggtgaccttgaagcatgtgtatgagattgcccgcatcaaagctcaggatgaggcatttgccctgcaggatgtacccctgtcgtctgttgtccgctccatcatcgggtctgcccgttctctgggcattcgcgtggtgaaggacctcagttcagaagagcttgcagctttccagaaggaacgagccatcttcctggctgctcagaaggaggcagatttggctgcccaagaagaagctgccaagaagtgacccttgccccaccaactcccagatttcaaaggaggtagttgcaaaagctgtgcccaaggggaggaaggaggtcacaccaatatgatgatggttttcatgactttgaatgatatatttttgtacatctagctgtatcgaggcatcaggcctgaataaacatcctttcttacccactgtcatcttctatcttgggacctcagggaagggaaccagtactggtggtagccaatatgggcagacattaggaaattggggtcttcatactgcttctcagatgtgcaaactgaggttcagccaagcaaagtaacttgcccaggtccttttttttcttttttaagttataattttgttttattgcccaggttctgaattggtgccagaggtaggaatagaacccaggccttctcatttgaaatcctgtgttcttcccctccccagggtgggaactatggttgctagggctgaggtgtattgcttacttcttccatcaaaaatctcttttatctctgaacaacttgccacctctgcagaaacaagtccctgtggagatctcagttcagccccaggcagggttactacatggagtacccagatcccaggggctacttcaggcccttctactaagctcctgaccctggctctgggtcagatgttggctgaacatgaactattgtagggctgacagctacagaccacagaaagagcaaagcttcagtaggttcctgcctgatggagaagtcctcgggaagcccttggccttctatttcctcattgtcctttcagagaagagagcaggagttgggggagaaaggagattcgcatttactgaccatctgttatgtgctagacacttcattttacactgagaaaatatggaaagcatagataaacacctaaaagaaaataaaaacctcatgttatcccaccaccca

SEQ ID NO: 21235 - protein, 192 aa, Homo sapiens [sequence omitted]

SEQ ID NO: 21236 - DNA, 2214 bp, Homo sapiens
gaccacgcccttcccctggtaccgccctctgaccagggaagccccgctctccactccgtctgagggactcccttgcccctcctagccggctcaggactcccccgtagtctacacgacccctcccccatttcagactccccaaactccgcctccatttccggggactccggggttctcccagagacatgggcgcccctccccactgtcggtcagggccctcacacggcgctggaggccccttccctagccttaggcccgggactacgcacccccagctccgacaccccgcctaccatctggggacgccacgcaattagaggagaggaggaaaatgctaaaggcaaagggggtgtgcggcagcggtggaggccggggaaagcagctgcagttgaccagagtcgcagacctgtcttccagcccagctcgggcaccccccattcccctcccctcagtcccctcccctccgccaggatgcacacaccccccgctgtgctgcaaaggaaagagagttttgggggagcaccgccccttctgggcctggggcttgcgagagatctatcagtctacgttaggcgctgtgcgctgtgctttgagcaaattaaaccctttactttaatcctgggaggcaggcacgatagttgcccattttacagatgaggaaatagatttacaaaagtgacttgcttgttgtagtttgctagaaacgggccaagagagaatctcagctgtatgagtggcttcagtctcaactcctaacttcgtaccttgtcgttctgactagggatggagcctcagaggtgcagaagagaaaccttgtctgcatcagagaggcgtttccatcaaccagttttgcaaggagttcaatgagaggacaaaggacatcaaggaaggcattcctctgcctaccaagattttagtgaagcctgacaggacatttgaaattaagattggacagcccactgtttcctacttcctgaaggcagcagctgggattgaaaagggggcccggcaaacagggaaagaggtggcaggcctggtgaccttgaagcatgtgtatgagattgcccgcatcaaagctcaggatgaggcatttgccctgcaggatgtacccctgtcgtctgttgtccgctccatcatcgggtctgcccgttctctgggcattcgcgtggtgaaggacctcagttcagaagagcttgcagctttccagaaggaacgagccatcttcctggctgctcagaaggaggcagatttggctgcccaagaagaagctgccaagaagtgacccttgccccaccaactcccagatttcaaaggaggtagttgcaaaagctgtgcccaaggggaggaaggaggtcacaccaatatgatgatggttttcatgactttgaatgatatatttttgtacatctagctgtatcgaggcatcaggcctgaataaacatcctttcttacccactgtcatcttctatcttgggacctcagggaagggaaccagtactggtggtagccaatatgggcagacattaggaaattggggtcttcatactgcttctcagatgtgcaaactgaggttcagccaagcaaagtaacttgcccaggtccttttttttcttttttaagttataattttgttttattgcccaggttctgaattggtgccagaggtaggaatagaacccaggccttctcatttgaaatcctgtgttcttcccctccccagggtgggaactatggttgctagggctgaggtgtattgcttacttcttccatcaaaaatctcttttatctctgaacaacttgccacctctgcagaaacaagtccctgtggagatctcagttcagccccaggcagggttactacatggagtacccagatcccaggggctacttcaggcccttctactaagctcctgaccctggctctgggtcagatgttggctgaacatgaactattgtagggctgacagctacagaccacagaaagagcaaagcttcagtaggttcctgcctgatggagaagtcctcgggaagcccttggccttctatttcctcattgtcctttcagagaagagagcaggagttgggggagaaaggagattcgcatttactgaccatctgttatgtgctagacacttcattttacactgagaaaatatggaaagcatagataaacacctaaaagaaaataaaaacctcatgttatcccaccaccca

SEQ ID NO: 21237 - protein, 94 aa, Homo sapiens [sequence omitted]

SEQ ID NO: 21238 - DNA, 673 bp, Homo sapiens
aagatggtggcgcccagagcttcgctcttgctgctcccctgagagaggcgtttccatcaaccagttttgcaaggagttcaatgagaggacaaaggacatcaaggaaggcattcctctgcctaccaagattttagtgaagcctgacaggacatttgaaattaagattggacagcccactgtttcctacttcctgaaggcagcagctgggattgaaaagggggcccggcaaacagggaaagaggtggcaggcctggtgaccttgaagcatgtgtatgagattgcccgcatcaaagctcaggatgaggcatttgccctgcaggatgtacccctgtcgtctgttgtccgctccatcatcgggtctgcccgttctctgggcattcgcgtggtgaaggacctcagttcagaagagcttgcagctttccagaaggaacgagccatcttcctggctgctcagaaggaggcagatttggctgcccaagaagaagctgccaagaagtgacccttgccccaccaactcccagatttcaaaggaggtagttgcaaaagctgtgcccaaggggaggaaggaggtcacaccaatatgatgatggttttcatgactttgaatgatatatttttgtacatctagctgtatcgaggcatcaggcctgaataaacatcctttcttacccac

SEQ ID NO: 21239 - protein, 40 aa, Homo sapiens
MCMRLPASKLRMRHLPCRMYPCRLLSAPSSGLPVLWAFAW

SEQ ID NO: 21240 - DNA, 946 bp, Homo sapiens
cttgacctctggcccaagatggtggcgcccagagcttcgctcttgctgctcccctgaggtgaactgaagccagcagccccgcatcatgtcaaagctcggccgggccgcccggggcctcaggaagcccgaggtcggcggtgtgatccgggcgatcgtgcgggcaggcctggccatgcccgggcccccactaggcccagtgctgggtcagagaggcgtttccatcaaccagttttgcaaggagttcaatgagaggacaaaggacatcaaggaaggcattcctctgcctaccaagattttagtgaagcctgacaggacatttgaaattaagattggacagcccactgtttcctacttcctgaaggcagcagctgggattgaaaagggggcccggcaaacagggaaagaggtggcaggcctggtgaccttgaagcatgtgtatgagattgcccgcatcaaagctcaggatgaggcatttgccctgcaggatgtacccctgtcgtctgttgtccgctccatcatcgggtctgcccgttctctgggcattcgcgtggtgaaggaacgttgttctgcaaatgttctaagaaatggaaagatctccatgaaggatccaagtgggagaagttcagtgtgacctgggtctgtcgtcctagaggcaagtggagaatgcctcagttcagaagagcttgcagctttccagaaggaacgagccatcttcctggctgctcagaaggaggcagatttggctgcccaagaagaagctgccaagaagtgacccttgccccaccaactcccagatttcaaaggaggtagttgcaaaagctgtgcccaaggggaggaaggaggtcacaccaatatgatgatggttttcatgactttgaatgatatatttttgtacatctagctgtatcgaggcatcaggcctgaataaacatcctttcttacccac

SEQ ID NO: 21241 - protein, 181 aa, Homo sapiens; identical to SEQ ID NO: 2721

SEQ ID NO: 21242 - DNA, 659 bp, Homo sapiens
gtgaggacccttgacctctggcccaagatggtggcgcccagagcttcgctcttgctgctcccctgaggtgaactgaagccagcagccccgcatcatgtcaaagctcggccgggccgcccggggcctcaggaagcccgagagaggcgtttccatcaaccagttttgcaaggagttcaatgagaggacaaaggacatcaaggaaggcattcctctgcctaccaagattttagtgaagcctgacaggacatttgaaattaagattggacagcccactgtttcctacttcctgaaggcagcagctgggattgaaaagggggcccggcaaacagggaaagaggtggcaggcctggtgacctctgggcattcgcgtggtgaaggacctcagttcagaagagcttgcagctttccagaaggaacgagccatcttcctggctgctcagaaggaggcagatttggctgcccaagaagaagctgccaagaagtgacccttgccccaccaactcccagatttcaaaggaggtagttgcaaaagctgtgcccaaggggaggaaggaggtcacaccaatatgatgatggttttcatgactttgaatgatatatttttgtacatctagctgtatcgaggcatcaggcctgaataaacatcctttcttacccac

SEQ ID NO: 21243 - protein, 142 aa, Homo sapiens; identical to SEQ ID NO: 21233

SEQ ID NO: 21244 - DNA, 847 bp, Homo sapiens
gtgaggacccttgacctctggcccaagatggtggcgcccagagcttcgctcttgctgctcccctgaggtgaactgaagccagcagccccgcatcatgtcaaagctcggccgggccgcccggggcctcaggaagcccgaggtcggcggtgtgatccgggcgatcgtgcgggcaggcctggccatgcccgggcccccactaggcccagtgctgggtcagagaggcgtttccatcaaccagttttgcaaggagttcaatgagaggacaaaggacatcaaggaaggcattcctctgcctaccaagattttagtgaagcctgacaggacatttgaaattaagattggacagcccactgtttcctacttcctgaaggcagcagctgggattgaaaagggggcccggcaaacagggaaagaggtggcaggcctggtgaccttgaagcatgtgtatgagattgcccgcatcaaagctcaggatgaggcatttgccctgcaggatgtacccctgtcgtctgttgtccgctccatcatcgggtctgcccgttctctgggcattcgcgtggtgaaggacctcagttcagaagagcttgcagctttccagaaggaacgagccatcttcctggctgctcagaaggaggcagatttggctgcccaagaagaagctgccaagaagtgacccttgccccaccaactcccagatttcaaaggaggtagttgcaaaagctgtgcccaaggggaggaaggaggtcacaccaatatgatgatggttttcatgactttgaatgatatatttttgtacatctagctgtatcgaggcatcaggcctgaataaacatcctttcttacccac

SEQ ID NO: 21245 - protein, 192 aa, Homo sapiens [sequence omitted]

SEQ ID NO: 21246 - DNA, 769 bp, Homo sapiens
gtgaggacccttgacctctggcccaagatggtggcgcccagagcttcgctcttgctgctcccctgaggtgaactgaagccagcagccccgcatcatgtcaaagctcggccgggccgcccggggcctcaggaagcccgagagaggcgtttccatcaaccagttttgcaaggagttcaatgagaggacaaaggacatcaaggaaggcattcctctgcctaccaagattttagtgaagcctgacaggacatttgaaattaagattggacagcccactgtttcctacttcctgaaggcagcagctgggattgaaaagggggcccggcaaacagggaaagaggtggcaggcctggtgaccttgaagcatgtgtatgagattgcccgcatcaaagctcaggatgaggcatttgccctgcaggatgtacccctgtcgtctgttgtccgctccatcatcgggtctgcccgttctctgggcattcgcgtggtgaaggacctcagttcagaagagcttgcagctttccagaaggaacgagccatcttcctggctgctcagaaggaggcagatttggctgcccaagaagaagctgccaagaagtgacccttgccccaccaactcccagatttcaaaggaggtagttgcaaaagctgtgcccaaggggaggaaggaggtcacaccaatatgatgatggttttcatgactttgaatgatatatttttgtacatctagctgtatcgaggcatcaggcctgaataaacatcctttcttacccac

SEQ ID NO: 21247 - protein, 166 aa, Homo sapiens; identical to SEQ ID NO: 2719

SEQ ID NO: 21248 - DNA, 417 bp, Homo sapiens
cttgacctctggcccaagatggtggcgcccagagcttcgctcttgctgctcccctgaggtgaactgaagccagcagccccgcatcatgtcaaagctcggccgggccgcccggggcctcaggaagcccgaggtcggcggtgtgatccgggcgatcgtgcgggcaggcctggccatgcccgggcccccactaggcccagtgctgggtcagagaggcgtttccatcaaccagttttgcaaggagttcaatgagaggacaaaggacatcaaggaaggcattcctctgcctaccaagattttagtgaagcctgacaggacatttgaaattaagattggacagcccactgtttcctacttcctgaaggcagcagctgggattgaaaagggggcccggcaaacagggaaagaggtggcaggcct

SEQ ID NO: 21249 - protein, 109 aa, Homo sapiens
MSKLGRAARGLRKPEVGGVIRAIVRAGLAMPGPPLGPVLGQRGVSINQFCKEFNERTKDIKEGIPLPTKILVKPDRTFEIKIGQPTVSYFLKAAAGIEKGARQTGKEVA

SEQ ID NO: 21250 - DNA, 2511 bp, Homo sapiens
agacaggtctgcgactctggtcaactgcagctgctttccccggcctccaccgctgccgcacaccccctttgcctttagcattttcctcctctcctctaattgcgtggcgtccccagatgaatggtgctggaaggaaaccctgaagtggggtccccccgaacctcagacctccagcaccgggggaacaagggctcttgcgttctctcctctcccggtgaagatgcgcagccaggcgaggagcccatcaagtatggtgaactcatcctccacgccgctcgtctccaaggcactgagtaaccgtggtcagcacagcatctcgtatacactgtcccggagccactcggtcatagtggagtatacacatgatagcgacacagacatgttccagattggccgctccacagagaacatgattgacttcgtggtaacagacacgtcccctggaggaggggctgccgagggcccttctgcccagagcaccatctcccgctatgcctgccgcatcctctgtgaccgccggccaccctatactgcccgcatctatgccgctggcttcgatgcctctagcaacatcttccttggagagcgagcggccaaatggcggaccccagatggcctgatggatggactgaccaccaatggagtcctggtgatgcacccggcaggcggcttctccgaggactcagccccgggtgtctggcgggagatctcggtctgtgggaatgtgtacacattgcgggacagccgctcagcccagcagcggggcaagctggtggaaaacgagtccaacgtgctgcaggacggctctctcatcgacctgtgtggggccacactgctgtggcgcacaccggcggggctgctgcgggctcccacactgaagcaactggaggcccagcggcaggaggcaaatgcagcgcggccccagtgccccgtgggcctcagcactctggccttccccagcccagcccgtggccgcacagcgcccgacaaacagcagccctgggtctacgtccgctgcgggcacgtccatggctaccacggctggggctgccggcgggagcggggcccccaggagcgcgaatgtcctctctgccgccttgtggggccttatgtgcctctatggcttggccaggaggccggcctctgcctggaccctgggccgcctagccatgcctttgcaccttgcggccacgtctgctctgagaagactgcccgctactgggcccagacaccactgccccacggcacccatgctttccatgccgcctgccccttttgcggggcctggcttaccggcgagcatggctgcgtccgcctcattttccagggcccgctggattaggctccctggggccccctgctgctgtgcccacctgcccacccaggtccccacctcctgcagcccagagggagctctgcatgtgggacactccctgctggcacagccacaccagatggacatgttggatgggctgtgcccttccccccaactgtggccccccaaggaggtccccaagatctccaccccagtcatgctgatggggccttcagcaccagctctgtcctgggtcgatggaggaaagcccagccccatggccttgcccttcctggggcatcccacatcgtgccgccgacactgtgtgcccctgggggagtgaaggggccaggggcctttgacccccagcttaggctggctatgccctgagcctgccaacccagtttcagacactcatccttcatccttcctgctgccgccctgggttcctctataaacctcgctgctcagctgcccccacaagtcccacatgccccgcatgcgtgcaatgcctccagcccccaagtgagtggtgggtgggtggcaggctgggcctagcacttgctgatagccactatgggctcgactctgtgctaagtggtatctggggacacagaggcaatcagacctggttccccccctggtggagttcacagtctagtggaggacagactgttaacaaatggcaacacggcttcatgcgtgccaggatcagagtacaaatcaggctgtggcaggcctcactggtaatggaaaagtgagggaggcttcacggaggaggtgtcataggagctcagcctcaacggctgctcggaaccctccgagtccacaagatgggaagcaagtccacaagatgggaagcgtgctctatacagaagggagggcctgtgcacaggctcaggtgtcagtaagccagaaatccagggacagagtcaggatggctggagcatggactgcggggggaacagagaagggggtggagcaaaaggttgggaccatgtgaccagggaagatgctggatggaggattctgaacctcatttgtggacggtcaggagtcaacaaagggaggagagaggactcactggtcaagagtgtcggctgtgacacaagggccatcatccctgaatgcccaccatgtgccccgcactgtgctgatgatgataataataactacgtccattgagcactctccag

SEQ ID NO: 21251 - protein, 373 aa, Homo sapiens
MRSQARSPSSMVNSSSTPLVSKALSNRGQHSISYTLSRSHSVIVEYTHDSDTDMFQIGRSTENMIDFVVTDTSPGGGAAEGPSAQSTISRYACRILCDRRPPYTARIYAAGFDASSNIFLGERAAKWRTPDGLMDGLTTNGVLVMHPAGGFSEDSAPGVWREISVCGNVYTLRDSRSAQQRGKLVENESNVLQDGSLIDLCGATLLWRTPAGLLRAPTLKQLEAQRQEANAARPQCPVGLSTLAFPSPARGRTAPDKQQPWVYVRCGHVHGYHGWGCRRERGPQERECPLCRLVGPYVPLWLGQEAGLCLDPGPPSHAFAPCGHVCSEKTARYWAQTPLPHGTHAFHAACPFCGAWLTGEHGCVRLIFQGPLD

SEQ ID NO: 21252 - DNA, 3128 bp, Homo sapiens
agacaggtctgcgactctggtcaactgcagctgctttccccggcctccaccgctgccgcacaccccctttgcctttagcattttcctcctctcctctaattgcgtggcgtccccagatgaatggtgctggaaggaaaccctgaagtggggtccccccgaacctcagacctccagcaccgggggaacaagggctcttgcgttctctcctctcccggtgaagatgcgcagccaggcgaggagcccatcaagtatggtgaactcatcctccacgccgctcgtctccaaggcactgagtaaccgtggtcagcacagcatctcgtatacactgtcccggagccactcggtcatagtggagtatacacatgatagcgacacagacatgttccagattggccgctccacagagaacatgattgacttcgtggtaacagacacgtcccctggaggaggggctgccgagggcccttctgcccagagcaccatctcccgctatgcctgccgcatcctctgtgaccgccggccaccctatactgcccgcatctatgccgctggcttcgatgcctctagcaacatcttccttggagagcgagcggccaaatggcggaccccagatggcctgatggatggactgaccaccaatggagtcctggtgatgcacccggcaggcggcttctccgaggactcagccccgggtgtctggcgggagatctcggtctgtgggaatgtgtacacattgcgggacagccgctcagcccagcagcggggcaagctggtggaaaacgagtccaacgtgctgcaggacggctctctcatcgacctgtgtggggccacactgctgtggcgcacaccggcggggctgctgcgggctcccacactgaagcaactggaggcccagcggcaggaggcaaatgcagcgcggccccagtgccccgtgggcctcagcactctggccttccccagcccagcccgtggccgcacagcgcccgacaaacagcagccctgggtctacgtccgctgcgggcacgtccatggctaccacggctggggctgccggcgggagcggggcccccaggagcgcgaatgtcctctctgccgccttgtggggccttatgtgcctctatggcttggccaggaggccggcctctgcctggaccctgggccgcctagccatgcctttgcaccttgcggccacgtctgctctgagaagactgcccgctactgggcccagacaccactgccccacggcacccatgctttccatgccgcctgccccttttgcggggcctggcttaccggcgagcatggctgcgtccgcctcattttccagggcccgctggattaggctccctggggccccctgctgctgtgcccacctgcccacccaggtccccacctcctgcagcccagagggagctctgcatgtgggacactccctgctggcacagccacaccagatggacatgttggatgggctgtgcccttccccccaactgtggccccccaaggaggtccccaagatctccaccccagtcatgctgatggggccttcagcaccagctctgtcctgggtcgatggaggaaagcccagccccatggccttgcccttcctggggcatcccacatcgtgccgccgacactgtgtgcccctgggggagtgaaggggccaggggcctttgacccccagcttaggctggctatgccctgagcctgccaacccagtttcagacactcatccttcatccttcctgctgccgccctgggttcctctataaacctcgctgctcagctgcccccacaagtcccacatgccccgcatgcgtgcaatgcctccagcccccaagtgagtggtgggtgggtggcaggctgggcctagcacttgctgatagccactatgggctcgactctgtgctaagtggtatctggggacacagaggcaatcagacctggttccccccctggtggagttcacagtctagtggaggacagactgttaacaaatggcaacacggcttcatgcgtgccaggatcagagtacaaatcaggctgtggcaggcctcactggtaatggaaaagtgagggaggcttcacggaggaggtgtcataggagctcagcctcaacggctgctcggaaccctccgagtccacaagatgggaagcaagtccacaagatgggaagcgtgctctatacagaagggagggcctgtgcacaggctcaggtgtcagtaagccagaaatccagggacagagtcaggatggctggagcatggactgcggggggaacagagaagggggtggagcaaaaggttgggaccatgtgaccagggaagatgctggatggaggattctgaacctcatttgtggacggtcaggagtcaacaaagggaggagagaggactcactggtcaagagtgtcggctgtgacacaagggccatcatccctgaatgcccaccatgtgccccgcactgtgctgatgatgataataataactacgtccattgagcactctccagacaccgggctctgcttcttggaggttttgttatttaatcctcatagtaacccaagaagggaggtgttgccatttttgtctctgaggagatgagggcagatgcaccaagtcacacaactagaaagtggccaagccaggatttgaatccacagctgctcctctccatcacagtgttgctttccttcaacagaggtgggggtgaaccaagcagggttttggatactagattggtggacacccacctgcttcgtgcccagccctgcgcagggcccctgcagtgggcaaggccgggcctcttgcagcccatggtctgcagagggacctacccgtgcttgtgttggaagctggcccccacacctgtgctggccacctgtaccccaggccaggatgcagtgggctattagccaggctggaagtgttcagaggagtgagaaccaggggctctagaaggcccagggaggacctggagcctgagccaagtcttgaatggcagagcatctccagaggcagagaggagttgggagggcagcccaggtgaggggaacagcatggtgtggcagggaacatgcctggtgtggaggggggcagcaaaaaggaatggggggtagggaaggttgc

SEQ ID NO: 21253 - protein, 373 aa, Homo sapiens; identical to SEQ ID NO: 21251

SEQ ID NO: 21254 - DNA, 2671 bp, Homo sapiens
cgtggctgttcgcgctcatccccctcccccggccctgggtgtccccgtgacgaggcagcgcggagccgccgcgggccgggcccatcccgccgcagcggcccggggccgagcaggggctaggcggggagggagcggcgcccagcggggcccggagcgtggccagaatggtgctggaaggaaaccctgaagtggggtccccccgaacctcagacctccagcaccgggggaacaagggctcttgcgttctctcctctcccggtgaagatgcgcagccaggcgaggagcccatcaagtatggtgaactcatcgtcctgggctacaatggttgtctggcaagtggggacaagggccgccggcgaagccgcctggcactgagccgccggtcgcacgccaacggggtgaagccagacgtcatgcaccacatctccacgccgctcgtctccaaggcactgagtaaccgtggtcagcacagcatctcgtatacactgtcccggagccactcggtcatagtggagtatacacatgatagcgacacagacatgttccagattggccgctccacagagaacatgattgacttcgtggtaacagacacgtcccctggaggaggggctgccgagggcccttctgcccagagcaccatctcccgctatgcctgccgcatcctctgtgaccgccggccaccctatactgcccgcatctatgccgctggcttcgatgcctctagcaacatcttccttggagagcgagcggccaaatggcggaccccagatggcctgatggatggactgaccaccaatggagtcctggtgatgcacccggcaggcggcttctccgaggactcagccccgggtgtctggcgggagatctcggtctgtgggaatgtgtacacattgcgggacagccgctcagcccagcagcggggcaagctggtggaaaacgagtccaacgtgctgcaggacggctctctcatcgacctgtgtggggccacactgctgtggcgcacaccggcggggctgctgcgggctcccacactgaagcaactggaggcccagcggcaggaggcaaatgcagcgcggccccagtgccccgtgggcctcagcactctggccttccccagcccagcccgtggccgcacagcgcccgacaaacagcagccctgggtctacgtccgctgcgggcacgtccatggctaccacggctggggctgccggcgggagcggggcccccaggagcgcgaatgtcctctctgccgccttgtggggccttatgtgcctctatggcttggccaggaggccggcctctgcctggaccctgggccgcctagccatgcctttgcaccttgcggccacgtctgctctgagaagactgcccgctactgggcccagacaccactgccccacggcacccatgctttccatgccgcctgccccttttgcggggcctggcttaccggcgagcatggctgcgtccgcctcattttccagggcccgctggattaggctccctggggccccctgctgctgtgcccacctgcccacccaggtccccacctcctgcagcccagagggagctctgcatgtgggacactccctgctggcacagccacaccagatggacatgttggatgggctgtgcccttccccccaactgtggccccccaaggaggtccccaagatctccaccccagtcatgctgatggggccttcagcaccagctctgtcctgggtcgatggaggaaagcccagccccatggccttgcccttcctggggcatcccacatcgtgccgccgacactgtgtgcccctgggggagtgaaggggccaggggcctttgacccccagcttaggctggctatgccctgagcctgccaacccagtttcagacactcatccttcatccttcctgctgccgccctgggttcctctataaacctcgctgctcagctgcccccacaagtcccacatgccccgcatgcgtgcaatgcctccagcccccaagtgagtggtgggtgggtggcaggctgggcctagcacttgctgatagccactatgggctcgactctgtgctaagtggtatctggggacacagaggcaatcagacctggttccccccctggtggagttcacagtctagtggaggacagactgttaacaaatggcaacacggcttcatgcgtgccaggatcagagtacaaatcaggctgtggcaggcctcactggtaatggaaaagtgagggaggcttcacggaggaggtgtcataggagctcagcctcaacggctgctcggaaccctccgagtccacaagatgggaagcaagtccacaagatgggaagcgtgctctatacagaagggagggcctgtgcacaggctcaggtgtcagtaagccagaaatccagggacagagtcaggatggctggagcatggactgcggggggaacagagaagggggtggagcaaaaggttgggaccatgtgaccagggaagatgctggatggaggattctgaacctcatttgtggacggtcaggagtcaacaaagggaggagagaggactcactggtcaagagtgtcggctgtgacacaagggccatcatccctgaatgcccaccatgtgccccgcactgtgctgatgatgataataataactacgtccattgagcactctccag

SEQ ID NO: 21255 - protein, 445 aa, Homo sapiens
MVLEGNPEVGSPRTSDLQHRGNKGSCVLSSPGEDAQPGEEPIKYGELIVLGYNGCLASGDKGRRRSRLALSRRSHANGVKPDVMHHISTPLVSKALSNRGQHSISYTLSRSHSVIVEYTHDSDTDMFQIGRSTENMIDFVVTDTSPGGGAAEGPSAQSTISRYACRILCDRRPPYTARIYAAGFDASSNIFLGERAAKWRTPDGLMDGLTTNGVLVMHPAGGFSEDSAPGVWREISVCGNVYTLRDSRSAQQRGKLVENESNVLQDGSLIDLCGATLLWRTPAGLLRAPTLKQLEAQRQEANAARPQCPVGLSTLAFPSPARGRTAPDKQQPWVYVRCGHVHGYHGWGCRRERGPQERECPLCRLVGPYVPLWLGQEAGLCLDPGPPSHAFAPCGHVCSEKTARYWAQTPLPHGTHAFHAACPFCGAWLTGEHGCVRLIFQGPLD

SEQ ID NO: 21256 - DNA, 1716 bp, Homo sapiens
ctcatccccctcccccggccctgggtgtccccgtgacgaggcagcgcggagccgccgcgggccgggcccatcccgccgcagcggcccggggccgagcaggggctaggcggggagggagcggcgcccagcggggcccggagcgtggccagaatggtgctggaaggaaaccctgaagtggggtccccccgaacctcagacctccagcaccgggggaacaagggctcttgcgttctctcctctcccggtgaagatgcgcagccaggcgaggagcccatcaagtatggtgaactcatcgtcctgggatgctgtgaggaaggaggtgaggaaaccgaggctcagagaggggaagtgactggcccaagggcacacagctgctacaatggttgtctggcaagtggggacaagggccgccggcgaagccgcctggcactgagccgccggtcgcacgccaacggggtgaagccagacgtcatgcaccacatctccacgccgctcgtctccaaggcactgagtaaccgtggtcagcacagcatctcgtatacactgtcccggagccactcggtcatagtggagtatacacatgatagcgacacagacatgttccagattggccgctccacagagaacatgattgacttcgtggtaacagacacgtcccctggaggaggggctgccgagggcccttctgcccagagcaccatctcccgctatgcctgccgcatcctctgtgaccgccggccaccctatactgcccgcatctatgccgctggcttcgatgcctctagcaacatcttccttggagagcgagcggccaaatggcggaccccagatggcctgatggatggactgaccaccaatggagtcctggtgatgcacccggcaggcggcttctccgaggactcagccccgggtgtctggcgggagatctcggtctgtgggaatgtgtacacattgcgggacagccgctcagcccagcagcggggcaagctggtaggtggcccgctccattccccacccctatccttgccaggccctcacaagctgcccatccccctgcccaagccaggagatgatctccagtccttctgccccagggagccccaacaggctccatatcagggaatcccaggcccagggggttcttagcatgagccacttgtcccacagacaggcagacagaccagggtccccaagcatagcatgcataccactggaggtccagggggtgatgcgatcaaggcacacacagacatactgtgcagtcccaggtggcttcaaggctgctggcagcttaaaaaaaatcacaccttcttatgagagtgacacttggcccatgtgtgagcagtttatagcctaaagggttggcagtttgtagcatgtctatcacgttcagacaggtttagcactgttctcctctcgcaggaggaaagggtccttacagtagttctgacacaggtgttagtggcagctccttgtggtacagatcagagagctgaggttagggaccgggagtgagtcctagagagaggcaggggctgtccaaggtcacatggccgtgctcctcaaactggccatgcactgctcttctctggcatgagcacattggccaaggagatgcaaaacctcagagaaaagcctggcttttctttccagagcgtcaactctgtggggaggtctggggaagcattgtttgttaaaacaatgcatgtgaatgtt

SEQ ID NO: 21257 - protein, 331 aa, Homo sapiens
MVLEGNPEVGSPRTSDLQHRGNKGSCVLSSPGEDAQPGEEPIKYGELIVLGCCEEGGEETEAQRGEVTGPRAHSCYNGCLASGDKGRRRSRLALSRRSHANGVKPDVMHHISTPLVSKALSNRGQHSISYTLSRSHSVIVEYTHDSDTDMFQIGRSTENMIDFVVTDTSPGGGAAEGPSAQSTISRYACRILCDRRPPYTARIYAAGFDASSNIFLGERAAKWRTPDGLMDGLTTNGVLVMHPAGGFSEDSAPGVWREISVCGNVYTLRDSRSAQQRGKLVGGPLHSPPLSLPGPHKLPIPLPKPGDDLQSFCPREPQQAPYQGIPGPGGS

SEQ ID NO: 21258 - DNA, 2729 bp, Homo sapiens
ctcatccccctcccccggccctgggtgtccccgtgacgaggcagcgcggagccgccgcgggccgggcccatcccgccgcagcggcccggggccgagcaggggctaggcggggagggagcggcgcccagcggggcccggagcgtggccagaatggtgctggaaggaaaccctgaagtggggtccccccgaacctcagacctccagcaccgggggaacaagggctcttgcgttctctcctctcccggtgaagatgcgcagccaggcgaggagcccatcaagtatggtgaactcatcgtcctgggatgctgtgaggaaggaggtgaggaaaccgaggctcagagaggggaagtgactggcccaagggcacacagctgctacaatggttgtctggcaagtggggacaagggccgccggcgaagccgcctggcactgagccgccggtcgcacgccaacggggtgaagccagacgtcatgcaccacatctccacgccgctcgtctccaaggcactgagtaaccgtggtcagcacagcatctcgtatacactgtcccggagccactcggtcatagtggagtatacacatgatagcgacacagacatgttccagattggccgctccacagagaacatgattgacttcgtggtaacagacacgtcccctggaggaggggctgccgagggcccttctgcccagagcaccatctcccgctatgcctgccgcatcctctgtgaccgccggccaccctatactgcccgcatctatgccgctggcttcgatgcctctagcaacatcttccttggagagcgagcggccaaatggcggaccccagatggcctgatggatggactgaccaccaatggagtcctggtgatgcacccggcaggcggcttctccgaggactcagccccgggtgtctggcgggagatctcggtctgtgggaatgtgtacacattgcgggacagccgctcagcccagcagcggggcaagctggtggaaaacgagtccaacgtgctgcaggacggctctctcatcgacctgtgtggggccacactgctgtggcgcacaccggcggggctgctgcgggctcccacactgaagcaactggaggcccagcggcaggaggcaaatgcagcgcggccccagtgccccgtgggcctcagcactctggccttccccagcccagcccgtggccgcacagcgcccgacaaacagcagccctgggtctacgtccgctgcgggcacgtccatggctaccacggctggggctgccggcgggagcggggcccccaggagcgcgaatgtcctctctgccgccttgtggggccttatgtgcctctatggcttggccaggaggccggcctctgcctggaccctgggccgcctagccatgcctttgcaccttgcggccacgtctgctctgagaagactgcccgctactgggcccagacaccactgccccacggcacccatgctttccatgccgcctgccccttttgcggggcctggcttaccggcgagcatggctgcgtccgcctcattttccagggcccgctggattaggctccctggggccccctgctgctgtgcccacctgcccacccaggtccccacctcctgcagcccagagggagctctgcatgtgggacactccctgctggcacagccacaccagatggacatgttggatgggctgtgcccttccccccaactgtggccccccaaggaggtccccaagatctccaccccagtcatgctgatggggccttcagcaccagctctgtcctgggtcgatggaggaaagcccagccccatggccttgcccttcctggggcatcccacatcgtgccgccgacactgtgtgcccctgggggagtgaaggggccaggggcctttgacccccagcttaggctggctatgccctgagcctgccaacccagtttcagacactcatccttcatccttcctgctgccgccctgggttcctctataaacctcgctgctcagctgcccccacaagtcccacatgccccgcatgcgtgcaatgcctccagcccccaagtgagtggtgggtgggtggcaggctgggcctagcacttgctgatagccactatgggctcgactctgtgctaagtggtatctggggacacagaggcaatcagacctggttccccccctggtggagttcacagtctagtggaggacagactgttaacaaatggcaacacggcttcatgcgtgccaggatcagagtacaaatcaggctgtggcaggcctcactggtaatggaaaagtgagggaggcttcacggaggaggtgtcataggagctcagcctcaacggctgctcggaaccctccgagtccacaagatgggaagcaagtccacaagatgggaagcgtgctctatacagaagggagggcctgtgcacaggctcaggtgtcagtaagccagaaatccagggacagagtcaggatggctggagcatggactgcggggggaacagagaagggggtggagcaaaaggttgggaccatgtgaccagggaagatgctggatggaggattctgaacctcatttgtggacggtcaggagtcaacaaagggaggagagaggactcactggtcaagagtgtcggctgtgacacaagggccatcatccctgaatgcccaccatgtgccccgcactgtgctgatgatgataataataactacgtccattgagcactctccag

SEQ ID NO: 21259 - protein, 469 aa, Homo sapiens
MVLEGNPEVGSPRTSDLQHRGNKGSCVLSSPGEDAQPGEEPIKYGELIVLGCCEEGGEETEAQRGEVTGPRAHSCYNGCLASGDKGRRRSRLALSRRSHANGVKPDVMHHISTPLVSKALSNRGQHSISYTLSRSHSVIVEYTHDSDTDMFQIGRSTENMIDFVVTDTSPGGGAAEGPSAQSTISRYACRILCDRRPPYTARIYAAGFDASSNIFLGERAAKWRTPDGLMDGLTTNGVLVMHPAGGFSEDSAPGVWREISVCGNVYTLRDSRSAQQRGKLVENESNVLQDGSLIDLCGATLLWRTPAGLLRAPTLKQLEAQRQEANAARPQCPVGLSTLAFPSPARGRTAPDKQQPWVYVRCGHVHGYHGWGCRRERGPQERECPLCRLVGPYVPLWLGQEAGLCLDPGPPSHAFAPCGHVCSEKTARYWAQTPLPHGTHAFHAACPFCGAWLTGEHGCVRLIFQGPLD

SEQ ID NO: 21260 - DNA, 2457 bp, Homo sapiens
ggagccgccgcgggccgggcccatcccgccgcagcggcccggggccgagcaggggctaggcggggagggagcggcgcccagcggggcccggagcgtggccagctacaatggttgtctggcaagtggggacaagggccgccggcgaagccgcctggcactgagccgccggtcgcacgccaacggggtgaagccagacgtcatgcaccacatctccacgccgctcgtctccaaggcactgagtaaccgtggtcagcacagcatctcgtatacactgtcccggagccactcggtcatagtggagtatacacatgatagcgacacagacatgttccagattggccgctccacagagaacatgattgacttcgtggtaacagacacgtcccctggaggaggggctgccgagggcccttctgcccagagcaccatctcccgctatgcctgccgcatcctctgtgaccgccggccaccctatactgcccgcatctatgccgctggcttcgatgcctctagcaacatcttccttggagagcgagcggccaaatggcggaccccagatggcctgatggatggactgaccaccaatggagtcctggtgatgcacccggcaggcggcttctccgaggactcagccccgggtgtctggcgggagatctcggtctgtgggaatgtgtacacattgcgggacagccgctcagcccagcagcggggcaagctggtggaaaacgagtccaacgtgctgcaggacggctctctcatcgacctgtgtggggccacactgctgtggcgcacaccggcggggctgctgcgggctcccacactgaagcaactggaggcccagcggcaggaggcaaatgcagcgcggccccagtgccccgtgggcctcagcactctggccttccccagcccagcccgtggccgcacagcgcccgacaaacagcagccctgggtctacgtccgctgcgggcacgtccatggctaccacggctggggctgccggcgggagcggggcccccaggagcgcgaatgtcctctctgccgccttgtggggccttatgtgcctctatggcttggccaggaggccggcctctgcctggaccctgggccgcctagccatgcctttgcaccttgcggccacgtctgctctgagaagactgcccgctactgggcccagacaccactgccccacggcacccatgctttccatgccgcctgccccttttgcggggcctggcttaccggcgagcatggctgcgtccgcctcattttccagggcccgctggattaggctccctggggccccctgctgctgtgcccacctgcccacccaggtccccacctcctgcagcccagagggagctctgcatgtgggacactccctgctggcacagccacaccagatggacatgttggatgggctgtgcccttccccccaactgtggccccccaaggaggtccccaagatctccaccccagtcatgctgatggggccttcagcaccagctctgtcctgggtcgatggaggaaagcccagccccatggccttgcccttcctggggcatcccacatcgtgccgccgacactgtgtgcccctgggggagtgaaggggccaggggcctttgacccccagcttaggctggctatgccctgagcctgccaacccagtttcagacactcatccttcatccttcctgctgccgccctgggttcctctataaacctcgctgctcagctgcccccacaagtcccacatgccccgcatgcgtgcaatgcctccagcccccaagtgagtggtgggtgggtggcaggctgggcctagcacttgctgatagccactatgggctcgactctgtgctaagtggtatctggggacacagaggcaatcagacctggttccccccctggtggagttcacagtctagtggaggacagactgttaacaaatggcaacacggcttcatgcgtgccaggatcagagtacaaatcaggctgtggcaggcctcactggtaatggaaaagtgagggaggcttcacggaggaggtgtcataggagctcagcctcaacggctgctcggaaccctccgagtccacaagatgggaagcaagtccacaagatgggaagcgtgctctatacagaagggagggcctgtgcacaggctcaggtgtcagtaagccagaaatccagggacagagtcaggatggctggagcatggactgcggggggaacagagaagggggtggagcaaaaggttgggaccatgtgaccagggaagatgctggatggaggattctgaacctcatttgtggacggtcaggagtcaacaaagggaggagagaggactcactggtcaagagtgtcggctgtgacacaagggccatcatccctgaatgcccaccatgtgccccgcactgtgctgatgatgataataataactacgtccattgagcactctccag

SEQ ID NO: 21261 - protein, 362 aa, Homo sapiens
MHHISTPLVSKALSNRGQHSISYTLSRSHSVIVEYTHDSDTDMFQIGRSTENMIDFVVTDTSPGGGAAEGPSAQSTISRYACRILCDRRPPYTARIYAAGFDASSNIFLGERAAKWRTPDGLMDGLTTNGVLVMHPAGGFSEDSAPGVWREISVCGNVYTLRDSRSAQQRGKLVENESNVLQDGSLIDLCGATLLWRTPAGLLRAPTLKQLEAQRQEANAARPQCPVGLSTLAFPSPARGRTAPDKQQPWVYVRCGHVHGYHGWGCRRERGPQERECPLCRLVGPYVPLWLGQEAGLCLDPGPPSHAFAPCGHVCSEKTARYWAQTPLPHGTHAFHAACPFCGAWLTGEHGCVRLIFQGPLD

SEQ ID NO: 21262 - DNA, 3074 bp, Homo sapiens
ggagccgccgcgggccgggcccatcccgccgcagcggcccggggccgagcaggggctaggcggggagggagcggcgcccagcggggcccggagcgtggccagctacaatggttgtctggcaagtggggacaagggccgccggcgaagccgcctggcactgagccgccggtcgcacgccaacggggtgaagccagacgtcatgcaccacatctccacgccgctcgtctccaaggcactgagtaaccgtggtcagcacagcatctcgtatacactgtcccggagccactcggtcatagtggagtatacacatgatagcgacacagacatgttccagattggccgctccacagagaacatgattgacttcgtggtaacagacacgtcccctggaggaggggctgccgagggcccttctgcccagagcaccatctcccgctatgcctgccgcatcctctgtgaccgccggccaccctatactgcccgcatctatgccgctggcttcgatgcctctagcaacatcttccttggagagcgagcggccaaatggcggaccccagatggcctgatggatggactgaccaccaatggagtcctggtgatgcacccggcaggcggcttctccgaggactcagccccgggtgtctggcgggagatctcggtctgtgggaatgtgtacacattgcgggacagccgctcagcccagcagcggggcaagctggtggaaaacgagtccaacgtgctgcaggacggctctctcatcgacctgtgtggggccacactgctgtggcgcacaccggcggggctgctgcgggctcccacactgaagcaactggaggcccagcggcaggaggcaaatgcagcgcggccccagtgccccgtgggcctcagcactctggccttccccagcccagcccgtggccgcacagcgcccgacaaacagcagccctgggtctacgtccgctgcgggcacgtccatggctaccacggctggggctgccggcgggagcggggcccccaggagcgcgaatgtcctctctgccgccttgtggggccttatgtgcctctatggcttggccaggaggccggcctctgcctggaccctgggccgcctagccatgcctttgcaccttgcggccacgtctgctctgagaagactgcccgctactgggcccagacaccactgccccacggcacccatgctttccatgccgcctgccccttttgcggggcctggcttaccggcgagcatggctgcgtccgcctcattttccagggcccgctggattaggctccctggggccccctgctgctgtgcccacctgcccacccaggtccccacctcctgcagcccagagggagctctgcatgtgggacactccctgctggcacagccacaccagatggacatgttggatgggctgtgcccttccccccaactgtggccccccaaggaggtccccaagatctccaccccagtcatgctgatggggccttcagcaccagctctgtcctgggtcgatggaggaaagcccagccccatggccttgcccttcctggggcatcccacatcgtgccgccgacactgtgtgcccctgggggagtgaaggggccaggggcctttgacccccagcttaggctggctatgccctgagcctgccaacccagtttcagacactcatccttcatccttcctgctgccgccctgggttcctctataaacctcgctgctcagctgcccccacaagtcccacatgccccgcatgcgtgcaatgcctccagcccccaagtgagtggtgggtgggtggcaggctgggcctagcacttgctgatagccactatgggctcgactctgtgctaagtggtatctggggacacagaggcaatcagacctggttccccccctggtggagttcacagtctagtggaggacagactgttaacaaatggcaacacggcttcatgcgtgccaggatcagagtacaaatcaggctgtggcaggcctcactggtaatggaaaagtgagggaggcttcacggaggaggtgtcataggagctcagcctcaacggctgctcggaaccctccgagtccacaagatgggaagcaagtccacaagatgggaagcgtgctctatacagaagggagggcctgtgcacaggctcaggtgtcagtaagccagaaatccagggacagagtcaggatggctggagcatggactgcggggggaacagagaagggggtggagcaaaaggttgggaccatgtgaccagggaagatgctggatggaggattctgaacctcatttgtggacggtcaggagtcaacaaagggaggagagaggactcactggtcaagagtgtcggctgtgacacaagggccatcatccctgaatgcccaccatgtgccccgcactgtgctgatgatgataataataactacgtccattgagcactctccagacaccgggctctgcttcttggaggttttgttatttaatcctcatagtaacccaagaagggaggtgttgccatttttgtctctgaggagatgagggcagatgcaccaagtcacacaactagaaagtggccaagccaggatttgaatccacagctgctcctctccatcacagtgttgctttccttcaacagaggtgggggtgaaccaagcagggttttggatactagattggtggacacccacctgcttcgtgcccagccctgcgcagggcccctgcagtgggcaaggccgggcctcttgcagcccatggtctgcagagggacctacccgtgcttgtgttggaagctggcccccacacctgtgctggccacctgtaccccaggccaggatgcagtgggctattagccaggctggaagtgttcagaggagtgagaaccaggggctctagaaggcccagggaggacctggagcctgagccaagtcttgaatggcagagcatctccagaggcagagaggagttgggagggcagcccaggtgaggggaacagcatggtgtggcagggaacatgcctggtgtggaggggggcagcaaaaaggaatggggggtagggaaggttgc

SEQ ID NO: 21263 - protein, 362 aa, Homo sapiens; identical to SEQ ID NO: 21261

SEQ ID NO: 21264 - DNA, 1615 bp, Homo sapiens
agcggcccggggccgagcaggggctaggcggggagggagcggcgcccagcggggcccggagcgtggccagcccgtggccgcacagcgcccgacaaacagcagccctgggtctacgtccgctgcgggcacgtccatggctaccacggctggggctgccggcgggagcggggcccccaggagcgcgaatgtcctctctgccgccttgtggggccttatgtgcctctatggcttggccaggaggccggcctctgcctggaccctgggccgcctagccatgcctttgcaccttgcggccacgtctgctctgagaagactgcccgctactgggcccagacaccactgccccacggcacccatgctttccatgccgcctgccccttttgcggggcctggcttaccggcgagcatggctgcgtccgcctcattttccagggcccgctggattaggctccctggggccccctgctgctgtgcccacctgcccacccaggtccccacctcctgcagcccagagggagctctgcatgtgggacactccctgctggcacagccacaccagatggacatgttggatgggctgtgcccttccccccaactgtggccccccaaggaggtccccaagatctccaccccagtcatgctgatggggccttcagcaccagctctgtcctgggtcgatggaggaaagcccagccccatggccttgcccttcctggggcatcccacatcgtgccgccgacactgtgtgcccctgggggagtgaaggggccaggggcctttgacccccagcttaggctggctatgccctgagcctgccaacccagtttcagacactcatccttcatccttcctgctgccgccctgggttcctctataaacctcgctgctcagctgcccccacaagtcccacatgccccgcatgcgtgcaatgcctccagcccccaagtgagtggtgggtgggtggcaggctgggcctagcacttgctgatagccactatgggctcgactctgtgctaagtggtatctggggacacagaggcaatcagacctggttccccccctggtggagttcacagtctagtggaggacagactgttaacaaatggcaacacggcttcatgcgtgccaggatcagagtacaaatcaggctgtggcaggcctcactggtaatggaaaagtgagggaggcttcacggaggaggtgtcataggagctcagcctcaacggctgctcggaaccctccgagtccacaagatgggaagcaagtccacaagatgggaagcgtgctctatacagaagggagggcctgtgcacaggctcaggtgtcagtaagccagaaatccagggacagagtcaggatggctggagcatggactgcggggggaacagagaagggggtggagcaaaaggttgggaccatgtgaccagggaagatgctggatggaggattctgaacctcatttgtggacggtcaggagtcaacaaagggaggagagaggactcactggtcaagagtgtcggctgtgacacaagggccatcatccctgaatgcccaccatgtgccccgcactgtgctgatgatgataataataactacgtccattgagcactctcca

SEQ ID NO: 21265 - protein, 209 aa, Homo sapiens
MATTAGAAGGSGAPRSANVLSAALWGLMCLYGLARRPASAWTLGRLAMPLHLAATSALRRLPATGPRHHCPTAPMLSMPPAPFAGPGLPASMAASASFSRARWIRLPGAPCCCAHLPTQVPTSCSPEGALHVGHSLLAQPHQMDMLDGLCPSPQLWPPKEVPKISTPVMLMGPSAPALSWVDGGKPSPMALPFLGHPTSCRRHCVPLGE

SEQ ID NO: 21266 - DNA, 2233 bp, Homo sapiens
agcggcccggggccgagcaggggctaggcggggagggagcggcgcccagcggggcccggagcgtggccagcccgtggccgcacagcgcccgacaaacagcagccctgggtctacgtccgctgcgggcacgtccatggctaccacggctggggctgccggcgggagcggggcccccaggagcgcgaatgtcctctctgccgccttgtggggccttatgtgcctctatggcttggccaggaggccggcctctgcctggaccctgggccgcctagccatgcctttgcaccttgcggccacgtctgctctgagaagactgcccgctactgggcccagacaccactgccccacggcacccatgctttccatgccgcctgccccttttgcggggcctggcttaccggcgagcatggctgcgtccgcctcattttccagggcccgctggattaggctccctggggccccctgctgctgtgcccacctgcccacccaggtccccacctcctgcagcccagagggagctctgcatgtgggacactccctgctggcacagccacaccagatggacatgttggatgggctgtgcccttccccccaactgtggccccccaaggaggtccccaagatctccaccccagtcatgctgatggggccttcagcaccagctctgtcctgggtcgatggaggaaagcccagccccatggccttgcccttcctggggcatcccacatcgtgccgccgacactgtgtgcccctgggggagtgaaggggccaggggcctttgacccccagcttaggctggctatgccctgagcctgccaacccagtttcagacactcatccttcatccttcctgctgccgccctgggttcctctataaacctcgctgctcagctgcccccacaagtcccacatgccccgcatgcgtgcaatgcctccagcccccaagtgagtggtgggtgggtggcaggctgggcctagcacttgctgatagccactatgggctcgactctgtgctaagtggtatctggggacacagaggcaatcagacctggttccccccctggtggagttcacagtctagtggaggacagactgttaacaaatggcaacacggcttcatgcgtgccaggatcagagtacaaatcaggctgtggcaggcctcactggtaatggaaaagtgagggaggcttcacggaggaggtgtcataggagctcagcctcaacggctgctcggaaccctccgagtccacaagatgggaagcaagtccacaagatgggaagcgtgctctatacagaagggagggcctgtgcacaggctcaggtgtcagtaagccagaaatccagggacagagtcaggatggctggagcatggactgcggggggaacagagaagggggtggagcaaaaggttgggaccatgtgaccagggaagatgctggatggaggattctgaacctcatttgtggacggtcaggagtcaacaaagggaggagagaggactcactggtcaagagtgtcggctgtgacacaagggccatcatccctgaatgcccaccatgtgccccgcactgtgctgatgatgataataataactacgtccattgagcactctccagacaccgggctctgcttcttggaggttttgttatttaatcctcatagtaacccaagaagggaggtgttgccatttttgtctctgaggagatgagggcagatgcaccaagtcacacaactagaaagtggccaagccaggatttgaatccacagctgctcctctccatcacagtgttgctttccttcaacagaggtgggggtgaaccaagcagggttttggatactagattggtggacacccacctgcttcgtgcccagccctgcgcagggcccctgcagtgggcaaggccgggcctcttgcagcccatggtctgcagagggacctacccgtgcttgtgttggaagctggcccccacacctgtgctggccacctgtaccccaggccaggatgcagtgggctattagccaggctggaagtgttcagaggagtgagaaccaggggctctagaaggcccagggaggacctggagcctgagccaagtcttgaatggcagagcatctccagaggcagagaggagttgggagggcagcccaggtgaggggaacagcatggtgtggcagggaacatgcctggtgtggaggggggcagcaaaaaggaatggggggtagggaaggttgc

SEQ ID NO: 21267 - protein, 209 aa, Homo sapiens; identical to SEQ ID NO: 21265

SEQ ID NO: 21268 - DNA, 828 bp, Homo sapiens
cgcacacgcgccggaccgggtaccgctgtgcccggcctggccgcggcctagtcccggcagacgggactgacgaggtcaccaagcccaggccgagacggcgcgggtgtcagggacttgggaatccccctcccccagtcccgatcccgctttcctttggggtttcacctcagaggacccgacagcactcttgcagtttcctcatcctcaagatggactgcaccttctggcatctcaagtggttcttgtgaagattaaatgaatccatcaggccgggtgcggtggctcacgcctgtaatcccagcactttgggaggccgagacgagcgcatcacctgaggtcaggagttccagaccagcctggccaacaagctgccagcagccttgaagccacctgggactgcacagtatgtctgtgtgtgccttgatcgcatcaccccctggacctccagtgaccgagatctcccgccagacacccggggctgagtcctcggagaagccgcctgccgggtgcatcaccaggactccattggtggtcagtccatccatcaggccatctggggtccgccatttggccgctcgctcctgggaccacatgagggatcagatcacatcccccaggggccccccagcaggccatgtgccagaggcactgcccccgctaccttcaagttcagaggcggcccagagaggactggcattgaagctgcatgacttgagcgtctctctgggcctcactttgctcatcagttaggtggggttgctaactgccaggaccaccatttggattactgtgggctggttcatcacctcaagatgctgcacctcccaa

SEQ ID NO: 21269 - protein, 114 aa, Homo sapiens
MSVCALIASPPGPPVTEISRQTPGAESSEKPPAGCITRTPLVVSPSIRPSGVRHLAARSWDHMRDQITSPRGPPAGHVPEALPPLPSSSEAAQRGLALKLHDLSVSLGLTLLIS

SEQ ID NO: 21270 - DNA, 1192 bp, Homo sapiens
ctgtgcccggcctggccgcggcctagtcccggcagacgggactgacgaggtcaccaagcccaggccgagacggcgcgggtgtcagggacttgggaatccccctcccccagtcccgatcccgctttcctttggggtttcacctcagaggacccgacagcactcttgcagtttcctcatcctcaagatggactgcaccttctggcatctcaagtggttcttgtgaagattaaatgaatccatcaggccgggtgcggtggctcacgcctgtaatcccagcactttgggaggccgagacgagcgcatcacctgaggtcaggagttccagaccagcctggccaacaaggtgaaaccccatctctactaaaaatacaaaaagttagccaggtgtggtggctcatgcttgtagtcccagctacgtgggaggctgaggcaggcgaatcacttgaacccaggaggcggaggttgcagtgagccaagattgtgccattgcactccagcctgggggatagagtgagactccatctcaaaaaaaataaataaataaataaataaatggatcaatcagtttaaaaacttagaacagtgcgtggcaaatagtgctcaagaagagtaggcttgtgaaacattcacatgcattgttttaacaaacaatgcttccccagacctccccacagagttgacgctctggaaagaaaagccaggcttttctctgaggttttgcatctccttggccaatgtgctcatgccagagaagagcagtgcatggccagtttgaggagcacggccatgtgaccttggacagcccctgcctctctctaggactcactcccggtccctaacctcagctctctgatctgtaccacaaggagctgccactaacacctgtgtcagaactactgtaaggaccctttcctcctgcgagaggagaacagtgctaaacctgtctgaacgtgatagacatgctacaaactgccaaccctttaggctataaactgctcacacatgggccaagtgtcactctcataagaaggtgtgattttttttaagctgccagcagccttgaagccacctgggactgcacagtatgtctgtgtgtgccttgatcgcatcaccccctggacctccagtggtatgcatgctatgcttggggaccctggtctgtctgcctgtctgtgggacaagtggctcatgc

SEQ ID NO: 21271 - protein, 53 aa, Homo sapiens
MHCFNKQCFPRPPHRVDALERKARLFSEVLHLLGQCAHAREEQCMASLRSTAM

SEQ ID NO: 21272 - DNA, 766 bp, Homo sapiens
gccgcggcctagtcccggcagacgggactgacgaggtcaccaagcccaggccgagacggcgcgggtgtcagggacttgggaatccccctcccccagtcccgatcccgctttcctttggggtttcacctcagaggacccgacagcactcttgcagtttcctcatcctcaagatggactgcaccttctggcatctcaagtggttcttgtgaagattaaatgaatccatcaggccgggtgcggtggctcacgcctgtaatcccagcactttgggaggccgagacgagcgcatcacctgaggtcaggagttccagaccagcctggccaacaagacctccccacagagttgacgctctggaaagaaaagccaggcttttctctgaggttttgcatctccttggccaatgtgctcatgccagagaagagcagtgcatggccagtttgaggagcacggccatgtgaccttggacagcccctgcctctctctaggactcactcccggtccctaacctcagctctctgatctgtaccacaaggagctgccactaacacctgtgtcagaactactgtaaggaccctttcctcctgcgagaggagaacagtgctaaacctgtctgaacgtgatagacatgctacaaactgccaaccctttaggctataaactgctcacacatgggccaagtgtcactctcataagaaggtgtgattttttttaagctgccagcagccttgaagccacctgggactgcacagtatgtctgtgtgtgcc

SEQ ID NO: 21273 - protein, 80 aa, Homo sapiens
MNPSGRVRWLTPVIPALWEAETSASPEVRSSRPAWPTRPPHRVDALERKARLFSEVLHLLGQCAHAREEQCMASLRSTAM

SEQ ID NO: 21274 - DNA, 1026 bp, Homo sapiens
ggattaggctccctggggccccctgctgctgtgcccacctgcccacccaggtccccacctcctgcagcccagagggagctctgcatgtgggacactccctgctggcacagccacaccagatggacatgttggatgggctgtgcccttccccccaactgtggccccccaaggaggtccccaagatctccaccccagtcatgctgatggggccttcagcaccagctctgtcctgggtcgatggaggaaagcccagccccatggccttgcccttcctggggcatcccacatcgtgccgccgacactgtgtgcccctgggggagtgaaggggccaggggcctttgacccccagcttaggctggctatgccctgagcctgccaacccagtttcagacattgctgatagccactatgggctcgactctgtgctaagtggtatctggggacacagaggcaatcagacctggttccccccctggtggagttcacagtctagtggaggacagactgttaacaaatggcaacacggcttcatgcgtgccaggatcagagtacaaatcaggctgtggcaggcctcactggtaatggaaaagtgagggaggcttcacggaggaggtgtcataggagctcagcctcaacggctgctcggaaccctccgagtccacaagatgggaagcaagtccacaagatgggaagcgtgctctatacagaagggagggcctgtgcacaggctcaggtgtcagtaagccagaaatccagggacagagtcaggatggctggagcatggactgcggggggaacagagaagggggtggagcaaaaggttgggaccatgtgaccagggaagatgctggatggaggattctgaacctcatttgtggacggtcaggagtcaacaaagggaggagagaggactcactggtcaagagtgtcggctgtgacacaagggccatcatccctgaatgcccaccatgtgccccgcactgtgctgatgatgataataataactacgtccattgagcactctcc

SEQ ID NO: 21275 - protein, 106 aa, Homo sapiens [sequence omitted]

SEQ ID NO: 21276 - DNA, 1645 bp, Homo sapiens
ggattaggctccctggggccccctgctgctgtgcccacctgcccacccaggtccccacctcctgcagcccagagggagctctgcatgtgggacactccctgctggcacagccacaccagatggacatgttggatgggctgtgcccttccccccaactgtggccccccaaggaggtccccaagatctccaccccagtcatgctgatggggccttcagcaccagctctgtcctgggtcgatggaggaaagcccagccccatggccttgcccttcctggggcatcccacatcgtgccgccgacactgtgtgcccctgggggagtgaaggggccaggggcctttgacccccagcttaggctggctatgccctgagcctgccaacccagtttcagacattgctgatagccactatgggctcgactctgtgctaagtggtatctggggacacagaggcaatcagacctggttccccccctggtggagttcacagtctagtggaggacagactgttaacaaatggcaacacggcttcatgcgtgccaggatcagagtacaaatcaggctgtggcaggcctcactggtaatggaaaagtgagggaggcttcacggaggaggtgtcataggagctcagcctcaacggctgctcggaaccctccgagtccacaagatgggaagcaagtccacaagatgggaagcgtgctctatacagaagggagggcctgtgcacaggctcaggtgtcagtaagccagaaatccagggacagagtcaggatggctggagcatggactgcggggggaacagagaagggggtggagcaaaaggttgggaccatgtgaccagggaagatgctggatggaggattctgaacctcatttgtggacggtcaggagtcaacaaagggaggagagaggactcactggtcaagagtgtcggctgtgacacaagggccatcatccctgaatgcccaccatgtgccccgcactgtgctgatgatgataataataactacgtccattgagcactctccagacaccgggctctgcttcttggaggttttgttatttaatcctcatagtaacccaagaagggaggtgttgccatttttgtctctgaggagatgagggcagatgcaccaagtcacacaactagaaagtggccaagccaggatttgaatccacagctgctcctctccatcacagtgttgctttccttcaacagaggtgggggtgaaccaagcagggttttggatactagattggtggacacccacctgcttcgtgcccagccctgcgcagggcccctgcagtgggcaaggccgggcctcttgcagcccatggtctgcagagggacctacccgtgcttgtgttggaagctggcccccacacctgtgctggccacctgtaccccaggccaggatgcagtgggctattagccaggctggaagtgttcagaggagtgagaaccaggggctctagaaggcccagggaggacctggagcctgagccaagtcttgaatggcagagcatctccagaggcagagaggagttgggagggcagcccaggtgaggggaacagcatggtgtggcagggaacatgcctggtgtggaggggggcagcaaaaaggaatggggggtagggaaggttgc

SEQ ID NO: 21277 - protein, 106 aa, Homo sapiens [sequence omitted]

SEQ ID NO: 21278 - DNA, 945 bp, Homo sapiens
gccgcacacgcgccggaccgggtaccgctgtgcccggcctggccgcggcctagtcccggcagacgggactgacgaggtcaccaagcccaggccgagacggcgcgggtgtcagggacttgggaatccccctcccccagtcccgatcccgctttcctttggggtttcacctcagaggacccgacagcactcttgcagaacagccgtctgcctgtcttcctggctcgctccctgcaggaatggtctggggcaaccccagcaacacgcccacctgtggccaggatgaataggaatccagttcaggcttggcttccatggcaatcaaggcccaccaggccccagcaaccttccctaccccccattcctttttgctgcccccctccacaccaggcatgttccctgccacaccatgctgttcccctcacctgggctgccctcccaactcctctctgcctctggagatgctctgccattcaagacttggctcaggctccaggtcctccctgggccttctagagcccctggttctcactcctctgaacacttccagcctggctaatagcccactgcatcctggcctggggtacaggtggccagcacaggtgtgggggccagcttccaacacaagcacgggtaggtccctctgcagaccatgggctgcaagaggcccggccttgcccactgcaggggccctgcgcagggctgggcacgaagcaggtgggtgtccaccaatctagtatccaaaaccctgcttggttcacccccacctctgttgaaggaaagcaacactgtgatggagaggagcagctgtggattcaaatcctggcttggccactttctagttgtgtgacttggtgcatctgccctcatctcctcagagacaaaaatggcaacacctcccttcttgggttactatgaggattaaataacaaaacctccaagaagcag

SEQ ID NO: 21279 - protein, 140 aa, Homo sapiens
MAIKAHQAPATFPTPHSFLLPPSTPGMFPATPCCSPHLGCPPNSSLPLEMLCHSRLGSGSRSSLGLLEPLVLTPLNTSSLANSPLHPGLGYRWPAQVWGPASNTSTGRSLCRPWAARGPALPTAGALRRAGHEAGGCPPI

SEQ ID NO: 21280 - DNA, 1330 bp, Homo sapiens
aatgaatgggggagccggaagcaggaagtgagtttgcgaacggagcagctgctgcagcagggcccatggcggacacccagtacatcctgcccaatgacatcggcgtgtctagcctggactgccgtgaggccttccgcctgctgtcacccacagagcgcctctatgcctaccacctgtcccgtgccgcctggtacggaggcctggctgtgctgcttcagacctcccctgaggccccctacatctatgctctgctcagccgcctcttccgcgcccaggaccccgaccagctgcgccaacatgccctggctgaaggccttaccgaggaggagtatcaggcgttcctggtctatgccgcgggtgtttactccaacatgggcaactacaagtcctttggtgacaccaagtttgttcccaacttgcccaaggaaaagctggaacgggtgatcctagggagtgaggctgctcagcagcacccagaagaagtcaggggcctctggcagacctgcggggagcttatgttctctctggagccaaggcttcgacacctcggactggggaaggagggaatcaccacctatttctctgggaattgtaccatggaagatatgcccgggtccgcctcgaccgcagcaagatccggtctgtgggcaagcctgctctagagcgcttcctgcggagacttcaggtgctgaagtccacaggggatgtggccggagggcgggccctgtacgaggggtatgcaacagtcactgatgcgccccccgagtgcttcctcaccctcagggacacggtgctgctgcgtaaggaatctcggaagctcattgttcagcccaacactcgccttgaaggctcagacgtgcagcttctggaatacgaggcgtcagctgctggcctcatccgatccttctctgagcgtttcccagaggatggacccgagttggaggagatcctcacacagctggccacagccgatgcccgattctggaagggccccagtgaggccccatctggccaagcttgaggaagatgtgtggccttgcccccaattccatcagaccaaggctgcaagtggccctccattcgtcactttccagcctgccaattgcttcccctctgtgatctcatttcatctgcactgccatacgtggagtgagcaagacagggcttaccatcctgtctaccagatgaggaaatggcagttctgagaagtcactggtctagatcccgcaggtggcacgtgacagctagggttcaaaacgttctcaccaaatccaatgctcctcacatattaattttataaccagacaaataaatattagagacaaccacc

SEQ ID NO: 21281 - protein, 218 aa, Homo sapiens
MGEPEAGSEFANGAAAAAGPMADTQYILPNDIGVSSLDCREAFRLLSPTERLYAYHLSRAAWYGGLAVLLQTSPEAPYIYALLSRLFRAQDPDQLRQHALAEGLTEEEYQAFLVYAAGVYSNMGNYKSFGDTKFVPNLPKEKLERVILGSEAAQQHPEEVRGLWQTCGELMFSLEPRLRHLGLGKEGITTYFSGNCTMEDMPGSASTAARSGLWASLL

SEQ ID NO: 21282 - DNA, 2687 bp, Homo sapiens
aatgaatgggggagccggaagcaggaagtgagtttgcgaacggagcagctgctgcagcagggcccatggcggacacccagtacatcctgcccaatgacatcggcgtgtctagcctggactgccgtgaggccttccgcctgctgtcacccacagagcgcctctatgcctaccacctgtcccgtgccgcctggtacggaggcctggctgtgctgcttcagacctcccctgaggccccctacatctatgctctgctcagccgcctcttccgcgcccaggaccccgaccagctgcgccaacatgccctggctgaaggccttaccgaggaggagtatcaggcgttcctggtctatgccgcgggtgtttactccaacatgggcaactacaagtcctttggtgacaccaagtttgttcccaacttgcccaaggaaaagctggaacgggtgatcctagggagtgaggctgctcagcagcacccagaagaagtcaggggcctctggcagacctgcggggagcttatgttctctctggagccaaggcttcgacacctcggactggggaaggagggaatcaccacctatttctctgggaattgtaccatggaagatgccaaattggcccaggactttctggactcacagaacctcagtgcctacaacacccggctcttcaaagaggtcgatggagaagggaagccctactacgaggtgcggctggcttctgtgcttggctcagagccttccctggactctgaggtgacttccaagctgaagagctatgaattccggggaagccctttccaggtgacccggggggactacgcgcccatcctccagaaggtggtggagcagctggagaaagccaaggcctatgcagccaacagccaccaggggcagatgctggcccagtatatagagagcttcacccagggctccatcgaggcccacaagaggggctcccgcttctggatccaggacaaaggccccatcgtggagagttacatcgggttcatcgagagctaccgcgacccctttggttcccgaggagaatttgaaggtttcgtagctgtggtgaacaaggccatgagtgccaagtttgagcggctggtggcgagcgcagagcagctgctgaaggagctgccctggcccccaacctttgagaaggacaagttcctcacccctgacttcacctccctggatgttctcaccttcgctggctccggcatccctgccggcatcaacatccccaactacgatgatctgaggcagacggaaggctttaagaacgtgtcgctggggaatgtgctggctgtggcctacgccacgcagcgggagaagcttacctttctggaggaggatgacaaggacctgtacatcctctggaaggggccctccttcgatgtgcaggtgggcctgcacgagctgctgggccatggcagtggcaagctcttcgtacaggacgaaaaaggagcattcaactttgaccaggaaacagtgatcaacccagagacgggcgagcagattcagagctggtatcggagcggggagacctgggatagcaagttcagcaccatcgcctccagctacgaagagtgccgggctgagagcgtgggtctctacctctgtctccacccgcaagtgctggagatctttggctttgagggggctgatgcggaggacgtgatctacgtgaactggctcaacatggttcgggccgggctgctcgctctggagttctacacacctgaggccttcaactggcgacaggcccatatgcaggcccggtttgtgatcctgagagtcttgctggaggctggcgagggactcgttaccatcactcccaccacaggctccgatgggcgcccagatgcccgggtccgcctcgaccgcagcaagatccggtctgtgggcaagcctgctctagagcgcttcctgcggagacttcaggtgctgaagtccacaggggatgtggccggagggcgggccctgtacgaggggtatgcaacagtcactgatgcgccccccgagtgcttcctcaccctcagggacacggtgctgctgcgtaaggaatctcggaagctcattgttcagcccaacactcgccttgaaggctcagacgtgcagcttctggaatacgaggcgtcagctgctggcctcatccgatccttctctgagcgtttcccagaggatggacccgagttggaggagatcctcacacagctggccacagccgatgcccgattctggaagggccccagtgaggccccatctggccaagcttgaggaagatgtgtggccttgcccccaattccatcagaccaaggctgcaagtggccctccattcgtgtgtgtatttaggggctggggagggggaggggcaggagcttggaccttggtactacctcagctgagggtggtgacacaaccccttccatttgtcagcactttccagcctgccaattgcttcccctctgtgatctcatttcatctgcactgccatacgtggagtgagcaagacagggcttaccatcctgtctaccagatgaggaaatggcagttctgagaagtcactggtctagatcccgcaggtggcacgtgacagctagggttcaaaacgttctcaccaaatccaatgctcctcacatattaattttataaccagacaaataaatattagagacaaccaccatc

SEQ ID NO: 21283 - protein, 757 aa, Homo sapiens
MGEPEAGSEFANGAAAAAGPMADTQYILPNDIGVSSLDCREAFRLLSPTERLYAYHLSRAAWYGGLAVLLQTSPEAPYIYALLSRLFRAQDPDQLRQHALAEGLTEEEYQAFLVYAAGVYSNMGNYKSFGDTKFVPNLPKEKLERVILGSEAAQQHPEEVRGLWQTCGELMFSLEPRLRHLGLGKEGITTYFSGNCTMEDAKLAQDFLDSQNLSAYNTRLFKEVDGEGKPYYEVRLASVLGSEPSLDSEVTSKLKSYEFRGSPFQVTRGDYAPILQKVVEQLEKAKAYAANSHQGQMLAQYIESFTQGSIEAHKRGSRFWIQDKGPIVESYIGFIESYRDPFGSRGEFEGFVAVVNKAMSAKFERLVASAEQLLKELPWPPTFEKDKFLTPDFTSLDVLTFAGSGIPAGINIPNYDDLRQTEGFKNVSLGNVLAVAYATQREKLTFLEEDDKDLYILWKGPSFDVQVGLHELLGHGSGKLFVQDEKGAFNFDQETVINPETGEQIQSWYRSGETWDSKFSTIASSYEECRAESVGLYLCLHPQVLEIFGFEGADAEDVIYVNWLNMVRAGLLALEFYTPEAFNWRQAHMQARFVILRVLLEAGEGLVTITPTTGSDGRPDARVRLDRSKIRSVGKPALERFLRRLQVLKSTGDVAGGRALYEGYATVTDAPPECFLTLRDTVLLRKESRKLIVQPNTRLEGSDVQLLEYEASAAGLIRSFSERFPEDGPELEEILTQLATADARFWKGPSEAPSGQA

SEQ ID NO: 21284 - DNA, 369 bp, Homo sapiens
gggggagccggaagcaggaagtgagtttgcgaacggagcagctgctgcagcagggcccatggcggacacccagtacatcctgcccaatgacatcggcgtgtctagcctggactgccgtgaggctttccagcctgccaattgcttcccctctgtgatctcatttcatctgcactgccatacgtggagtgagcaagacagggcttaccatcctgtctaccagatgaggaaatggcagttctgagaagtcactggtctagatcccgcaggtggcacgtgacagctagggttcaaaacgttctcaccaaatccaatgctcctcacatattaattttataaccagacaaataaatattagagacaaccaccatc

SEQ ID NO: 21285 - protein, 60 aa, Homo sapiens
MADTQYILPNDIGVSSLDCREAFQPANCFPSVISFHLHCHTWSEQDRAYHPVYQMRKWQF

SEQ ID NO: 21286 - DNA, 698 bp, Homo sapiens
ggagcacagggagcgagcaggagaatggagggccaaggaaaaggcatttagagggatgagaatgggacagtttcaagcaaaatcatttattgctgtggatactttccgtccagggcgacttcatctgattagcgcacccacctggtaatattggggttattctctcttttatagaggaggaaacggaggtacagaaaatgctgggattacaggcgtgaaccatcgtgcccagccttggttacagccttttcaatcccatctgtgtattacatacatttatgtgtatatgcatggtgaatcagttccttattttcttttttatagaaatgagataatgttcttttcctgctttgtgtcctgctttttccattgaatgccatgtcttgaagaacttggagaatggggtacatttaaatgtacctcattcttttttattgactgtaaagcattccacagcagtgtacactataatcaatttaatcttcattactggacatttagcttgtcccgtttttcttacaaacagtgccatggtgagcatacttgtgcacacatgtgaggaggatctatttctagaagaactgctgggtcaaaggctctgtacatttacaattgactgattctgttaaatcatcttctaaaaaagcttcactgcattatattcccaccaagaatgtacaagaatatggcctgttttt

SEQ ID NO: 21287 - protein, 61 aa, Homo sapiens
MPCLEELGEWGTFKCTSFFFIDCKAFHSSVHYNQFNLHYWTFSLSRFSYKQCHGEHTCAHM

SEQ ID NO: 21288 - DNA, 3589 bp, Homo sapiens
actattgggcgttacgcgagggcggggccggttgccaggacgacgcctgcgaagatggccgctgcgtcctcatcggattccgacgcctgcggagctgagagcaatgaggccaattcgaagtggttggatgcgcactacgacccaatggccaatatccacaccttttctgcctgcctagctggtggtaggggaccttggccctggtgggcagcagccccgcctgaaggtgctcaaaggaccactggtgatgaccgaaagcccgctacctgctctgccagctgctgctgccaccttcctcatggagcaacatgagccccggaccccagctctggcacttgcttcaggcccttgtgtctatgtgtataagaatctcagaccctacttcaagttcagcctgccccaattgcctccaaatcctctggaacaagacctttggaaccaggccaaagaggaccgaatcgaccccttaaccctgaaggagatgctggagagcatccgggagacggcagaggagcctttgtccatccagtcactcaggtttctgcagctggagctaagtgaaatggaggcatttgtaaaccaacacaagtccaactccatcaagcggcagacagtcatcaccaccatgaccaccttgaagaagaacctggctgacgaggatgctgtgtcttgcctggtgctgggcaccgagaacaaggagctcctggtgcttgaccccgaggccttcaccattttagccaagatgagccttcccagcgtccccgtcttcctagaggtttctggccagtttgatgttgagttccggcttgccgcggcctgccgcaatggaaacatctatattctgagaagagactccaagcaccccaagtactgcatcgagctgagcgcccagcctgtgggacttatccgggtacacaaggtcctagtggtgggcagcacccaagacagcctgcatggcttcacccacaaggggaagaagctgtggacagtgcagatgcccgcagccatcctgaccatgaacctcctggagcagcattcccggggcctgcaggccgtcatggctgggctggccaatggagaggtccgcatttatcgtgacaaggccctgctcaatgtcatccacaccccggatgcagtgaccagcctttgctttggccggtacgggcgggaggacaacaccctcatcatgaccactcgaggtggtggcctgatcatcaagatcctgaagcgtacagcagtgtttgtagagggaggaagtgaggtgggtcccccaccagcccaggccatgaaactcaatgtgccccgaaagacccggctttacgtggatcagacactgcgagagcgggaggctggcaccgccatgcaccgggccttccagacagacctatacctgctgcgcctacgtgctgcccgcgcctacctgcaggccctcgagtccagcctgagccccctgtccacgacagcccgagagccactcaagctgcacgccgtggttcagggccttggccccacctttaagctcacacttcacctgcagaacacctcaacaacccgtcctgtcctggggctgctggtctgcttcctgtacaacgaggcgctctattccctgccccgggccttcttcaaggtacccttgctggtgccagggctcaactaccccctggagacctttgtggagagtctcagtaacaagggcatctcagacatcatcaaggtaggccccgcacttgtaccacgtggaaggtgagcaggaccctggggaggacagtaagggtgagtgccaacaaagaccttagggggctcctgggtgggggtgggggtatctgcacagtggagccctgtggcctgtcattagggccagcgcagaccaggcaaggggtcaggggtgtatgccccctgctgccatggccactcctccataggtgctggtgcttcgagaaggccaaagtgcacccctgctgagtgcccacgtcaacatgcctgggagcgaggggctggcggccgcctgagacctgagctgctgtgaaagcccctgcacaatcagccagggagaactgggcgggtttagtggccccaggcccactcctcatgcagcagtgtgctggggcgacagctcgtctcccctctcttaagcacccgcttcctcaccacccccactgttgggcctatagtagcaggttagtgagtacctagggcggctcaactcctcccacagcaccaacccagcatggtcccactgaagtcctactacgccctcccctccccagccttttccagaaaccatactgggctcagatcagagctccgaagcggtcaaagtgagctgagcaggacaggcccagcctttctccactgccacgtccctcatgcacatcactcatctcctgctgcaggccaaggccaaaattgggctagtcctggccagggaaatcagaagctcttcttgggtgagattgagcctcctgttgctccctggagttccggaggctgggctgcagcccactcagcttgcgggcaaaatacgtgctctcctctctccttgtcagctgagcaaacccagggaatagccctcctctccccaggaaacttctctgaaatcttagacttagccagtcttaggcctacgatgccacacaaaggttgttcagggagaagggggtgcaggaggcagagggtgccccgcagggagctggtggctccagccccactagagctcctaaagatcacacagcagctgctcctgacagggatgctcatgcccagaaagcaagcccaggagaggaaggcagagtgtgacagagcagagccagggccaggcgcaccaggagaggcgtttctggggctccagagaagtgccacgggaggcagaagtccagaactgcccatatagatgcccttctacatcctggagcccaaatcagtcatgtgggtgggaagttcccagggcagtggtcacatcgtgagaattagcaggaaaggcggggcctttcttgtcatagctatttctgaggatgaaatgggagacatatgcccagcacctgatgtaagtttatataatgtaatattatgtacctaccactaagaaatacatgaaccgtgccatgaggacagtaagtgttcataaagcaacatgaagcaagaaacagtgcagggtgcccagtgcacacactagagagaaattgtgaacattaaggacaaggagaattggtgtctttctaaaacatacttatttaaaaacacatacccacttactaatgtggaattacacagtttgtaacaagaaaacagtctctcccattctctagtactgctcccctacccagcagtcacttccagttcattcagctatttttaaaatgtgcttatatgactcttgcttgatatatcaatcttagacattacctgttgactccctgttgtcatacatgaggctttagctctcttttgtcagcaaccctcccccatccctagttattaggttaaaaaatactcagattactatttctattactatgtgaaagttaactgcggagccaagagttggactataattaaattaccttccttgtactttctttttaatggagtt

SEQ ID NO: 21289 - protein, 499 aa, Homo sapiens
MTESPLPALPAAAATFLMEQHEPRTPALALASGPCVYVYKNLRPYFKFSLPQLPPNPLEQDLWNQAKEDRIDPLTLKEMLESIRETAEEPLSIQSLRFLQLELSEMEAFVNQHKSNSIKRQTVITTMTTLKKNLADEDAVSCLVLGTENKELLVLDPEAFTILAKMSLPSVPVFLEVSGQFDVEFRLAAACRNGNIYILRRDSKHPKYCIELSAQPVGLIRVHKVLVVGSTQDSLHGFTHKGKKLWTVQMPAAILTMNLLEQHSRGLQAVMAGLANGEVRIYRDKALLNVIHTPDAVTSLCFGRYGREDNTLIMTTRGGGLIIKILKRTAVFVEGGSEVGPPPAQAMKLNVPRKTRLYVDQTLREREAGTAMHRAFQTDLYLLRLRAARAYLQALESSLSPLSTTAREPLKLHAVVQGLGPTFKLTLHLQNTSTTRPVLGLLVCFLYNEALYSLPRAFFKVPLLVPGLNYPLETFVESLSNKGISDIIKVGPALVPRGR

SEQ ID NO: 21290 - DNA, 3403 bp, Homo sapiens
acgcgagggcggggccggttgccaggacgacgcctgcgaagatggccgctgcgtcctcatcggattccgacgcctgcggagctgagagcaatgaggccaattcgaagtggttggatgcgcactacgacccaatggccaatatccacaccttttctgcctgcctagcgctggcagatttacatggggatggggaatacaagctggtggtaggggaccttggccctggtgggcagcagccccgcctgaaggtgctcaaaggaccactggtgatgaccgaaagcccgctacctgctctgccagctgctgctgccaccttcctcatggagcaacatgagccccggaccccagctctggcacttgcttcaggcccttgtgtctatgtgtataagaatctcagaccctacttcaagttcagcctgccccaattgcctccaaatcctctggaacaagacctttggaaccaggccaaagaggaccgaatcgaccccttaaccctgaaggagatgctggagagcatccgggagacggcagaggagcctttgtccatccagtcactcaggtttctgcagctggagctaagtgaaatggaggcatttgtaaaccaacacaagtccaactccatcaagcggcagacagtcatcaccaccatgaccaccttgaagaagaacctggctgacgaggatgctgtgtcttgcctggtgctgggcaccgagaacaaggagctcctggtgcttgaccccgaggccttcaccattttagccaagatgagccttcccagcgtccccgtcttcctagaggtttctggccagtttgatgttgagttccggcttgccgcggcctgccgcaatggaaacatctatattctgagaagagactccaagcaccccaagtactgcatcgagctgagcgcccagcctgtgggacttatccgggtacacaaggtcctagtggtgggcagcacccaagacagcctgcatggcttcacccacaaggggaagaagctgtggacagtgcagatgcccgcagccatcctgaccatgaacctcctggagcagcattcccggggcctgcaggccgtcatggctgggctggccaatggagaggtccgcatttatcgtgacaaggccctgctcaatgtcatccacaccccggatgcagtgaccagcctttgctttggccggtacgggcgggaggacaacaccctcatcatgaccactcgaggtggtggcctgatcatcaagatcctgaagcgtacagcagtgtttgtagagggaggaagtgaggtgggtcccccaccagcccaggccatgaaactcaatgtgccccgaaagacccggctttacgtggatcagacactgcgagagcgggaggctggcaccgccatgcaccgggccttccagacagacctatacctgctgcgcctacgtgctgcccgcgcctacctgcaggccctcgagtccagcctgagccccctgtccacgacagcccgagagccactcaagctgcacgccgtggttcagggccttggccccacctttaagctcacacttcacctgcagaacacctcaacaacccgtcctgtcctggggctgctggtctgcttcctgtacaacgaggcgctctattccctgccccgggccttcttcaaggtacccttgctggtgccagggctcaactaccccctggagacctttgtggagagtctcagtaacaagggcatctcagacatcatcaaggtgctggtgcttcgagaaggccaaagtgcacccctgctgagtgcccacgtcaacatgcctgggagcgaggggctggcggccgcctgagacctgagctgctgtgaaagcccctgcacaatcagccagggagaactgggcgggtttagtggccccaggcccactcctcatgcagcagtgtgctggggcgacagctcgtctcccctctcttaagcacccgcttcctcaccacccccactgttgggcctatagtagcaggttagtgagtacctagggcggctcaactcctcccacagcaccaacccagcatggtcccactgaagtcctactacgccctcccctccccagccttttccagaaaccatactgggctcagatcagagctccgaagcggtcaaagtgagctgagcaggacaggcccagcctttctccactgccacgtccctcatgcacatcactcatctcctgctgcaggccaaggccaaaattgggctagtcctggccagggaaatcagaagctcttcttgggtgagattgagcctcctgttgctccctggagttccggaggctgggctgcagcccactcagcttgcgggcaaaatacgtgctctcctctctccttgtcagctgagcaaacccagggaatagccctcctctccccaggaaacttctctgaaatcttagacttagccagtcttaggcctacgatgccacacaaaggttgttcagggagaagggggtgcaggaggcagagggtgccccgcagggagctggtggctccagccccactagagctcctaaagatcacacagcagctgctcctgacagggatgctcatgcccagaaagcaagcccaggagaggaaggcagagtgtgacagagcagagccagggccaggcgcaccaggagaggcgtttctggggctccagagaagtgccacgggaggcagaagtccagaactgcccatatagatgcccttctacatcctggagcccaaatcagtcatgtgggtgggaagttcccagggcagtggtcacatcgtgagaattagcaggaaaggcggggcctttcttgtcatagctatttctgaggatgaaatgggagacatatgcccagcacctgatgtaagtttatataatgtaatattatgtacctaccactaagaaatacatgaaccgtgccatgaggacagtaagtgttcataaagcaacatgaagcaagaaacagtgcagggtgcccagtgcacacactagagagaaattgtgaacattaaggacaaggagaattggtgtctttctaaaacatacttatttaaaaacacatacccacttactaatgtggaattacacagtttgtaacaagaaaacagtctctcccattctctagtactgctcccctacccagcagtcacttccagttcattcagctatttttaaaatgtgcttatatgactcttgcttgatatatcaatcttagacattacctgttgactccctgttgtcatacatgaggctttagctctcttttgtcagcaaccctcccccatccctagttattaggttaaaaaatactcagattactatttctattactatgtgaaagttaactgcggagccaagagttggactataattaaattaccttccttgtactttctttttaatggagtt

SEQ ID NO: 21291 - protein, 593 aa, Homo sapiens; identical to SEQ ID NO: 2729

SEQ ID NO: 21292 - DNA, 3451 bp, Homo sapiens
aggacgacgcctgcgaagatggccgctgcgtcctcatcggattccgacgcctgcggagctgagagcaatgaggccaattcgaagtggttggatgcgcactacgacccaatggccaatatccacaccttttctgcctgcctagcgctggcagatttacatggggatggggaatacaagctggtggtaggggaccttggccctggtgggcagcagccccgcctgaaggtgctcaaaggaccactggtgatgaccgaaagcccgctacctgctctgccagctgctgctgccaccttcctcatggagcaacatgagccccggaccccagctctggcacttgcttcaggcccttgtgtctatgtgtataagaatctcagaccctacttcaagttcagcctgccccaattgcctccaaatcctctggaacaagacctttggaaccaggccaaagagggagacggcagaggagcctttgtccatccagtcactcaggtttctgcagctggagctaagtgaaatggaggcatttgtaaaccaacacaagtccaactccatcaagcggcagacagtcatcaccaccatgaccaccttgaagaagaacctggctgacgaggatgctgtgtcttgcctggtgctgggcaccgagaacaaggagctcctggtgcttgaccccgaggccttcaccattttagccaagatgagccttcccagcgtccccgtcttcctagaggtttctggccagtttgatgttgagttccggcttgccgcggcctgccgcaatggaaacatctatattctgagaagagactccaagcaccccaagtactgcatcgagctgagcgcccagcctgtgggacttatccgggtacacaaggtcctagtggtgggcagcacccaagacagcctgcatggcttcacccacaaggggaagaagctgtggacagtgcagatgcccgcagccatcctgaccatgaacctcctggagcagcattcccggggcctgcaggccgtcatggctgggctggccaatggagaggtccgcatttatcgtgacaaggccctgctcaatgtcatccacaccccggatgcagtgaccagcctttgctttggccggtacgggcgggaggacaacaccctcatcatgaccactcgaggtggtggcctgatcatcaagatcctgaagcgtacagcagtgtttgtagagggaggaagtgaggtgggtcccccaccagcccaggccatgaaactcaatgtgccccgaaagacccggctttacgtggatcagacactgcgagagcgggaggctggcaccgccatgcaccgggccttccagacagacctatacctgctgcgcctacgtgctgcccgcgcctacctgcaggccctcgagtccagcctgagccccctgtccacgacagcccgagagccactcaagctgcacgccgtggttcagggccttggccccacctttaagctcacacttcacctgcagaacacctcaacaacccgtcctgtcctggggctgctggtctgcttcctgtacaacgaggcgctctattccctgccccgggccttcttcaaggtacccttgctggtgccagggctcaactaccccctggagacctttgtggagagtctcagtaacaagggcatctcagacatcatcaaggtaggccccgcacttgtaccacgtggaaggtgagcaggaccctggggaggacagtaagggtgagtgccaacaaagaccttagggggctcctgggtgggggtgggggtatctgcacagtggagccctgtggcctgtcattagggccagcgcagaccaggcaaggggtcaggggtgtatgccccctgctgccatggccactcctccataggtgctggtgcttcgagaaggccaaagtgcacccctgctgagtgcccacgtcaacatgcctgggagcgaggggctggcggccgcctgagacctgagctgctgtgaaagcccctgcacaatcagccagggagaactgggcgggtttagtggccccaggcccactcctcatgcagcagtgtgctggggcgacagctcgtctcccctctcttaagcacccgcttcctcaccacccccactgttgggcctatagtagcagccttttccagaaaccatactgggctcagatcagagctccgaagcggtcaaagtgagctgagcaggacaggcccagcctttctccactgccacgtccctcatgcacatcactcatctcctgctgcaggccaaggccaaaattgggctagtcctggccagggaaatcagaagctcttcttgggtgagattgagcctcctgttgctccctggagttccggaggctgggctgcagcccactcagcttgcgggcaaaatacgtgctctcctctctccttgtcagctgagcaaacccagggaatagccctcctctccccaggaaacttctctgaaatcttagacttagccagtcttaggcctacgatgccacacaaaggttgttcagggagaagggggtgcaggaggcagagggtgccccgcagggagctggtggctccagccccactagagctcctaaagatcacacagcagctgctcctgacagggatgctcatgcccagaaagcaagcccaggagaggaaggcagagtgtgacagagcagagccagggccaggcgcaccaggagaggcgtttctggggctccagagaagtgccacgggaggcagaagtccagaactgcccatatagatgcccttctacatcctggagcccaaatcagtcatgtgggtgggaagttcccagggcagtggtcacatcgtgagaattagcaggaaaggcggggcctttcttgtcatagctatttctgaggatgaaatgggagacatatgcccagcacctgatgtaagtttatataatgtaatattatgtacctaccactaagaaatacatgaaccgtgccatgaggacagtaagtgttcataaagcaacatgaagcaagaaacagtgcagggtgcccagtgcacacactagagagaaattgtgaacattaaggacaaggagaattggtgtctttctaaaacatacttatttaaaaacacatacccacttactaatgtggaattacacagtttgtaacaagaaaacagtctctcccattctctagtactgctcccctacccagcagtcacttccagttcattcagctatttttaaaatgtgcttatatgactcttgcttgatatatcaatcttagacattacctgttgactccctgttgtcatacatgaggctttagctctcttttgtcagcaaccctcccccatccctagttattaggttaaaaaatactcagattactatttctattactatgtgaaagttaactgcggagccaagagttggactataattaaattaccttccttgtactttctttttaatggagtt

SEQ ID NO: 21293 - protein, 463 aa, Homo sapiens
MSPGPQLWHLLQALVSMCIRISDPTSSSACPNCLQILWNKTFGTRPKRETAEEPLSIQSLRFLQLELSEMEAFVNQHKSNSIKRQTVITTMTTLKKNLADEDAVSCLVLGTENKELLVLDPEAFTILAKMSLPSVPVFLEVSGQFDVEFRLAAACRNGNIYILRRDSKHPKYCIELSAQPVGLIRVHKVLVVGSTQDSLHGFTHKGKKLWTVQMPAAILTMNLLEQHSRGLQAVMAGLANGEVRIYRDKALLNVIHTPDAVTSLCFGRYGREDNTLIMTTRGGGLIIKILKRTAVFVEGGSEVGPPPAQAMKLNVPRKTRLYVDQTLREREAGTAMHRAFQTDLYLLRLRAARAYLQALESSLSPLSTTAREPLKLHAVVQGLGPTFKLTLHLQNTSTTRPVLGLLVCFLYNEALYSLPRAFFKVPLLVPGLNYPLETFVESLSNKGISDIIKVGPALVPRGR

SEQ ID NO: 21294 - DNA, 334 bp, Homo sapiens
gcaatgaggccaattcgaagtggttggatgcgcactacgacccaatggccaatatccacaccttttctgcctgcctagcgctggcagatttacatggggatggggaatacaagctgctgctgccaccttcctcatggagcaacatgagccccggaccccagctctggcacttgcttcaggcccttgtgtctatgtgtataagaatctcagaccctacttcaagttcagcctgccccaattgcctccaaatcctctggaacaagacctttggaaccaggccaaagaggaccgaatcgaccccttaaccctgaaggagatgctggagagcatccgg

SEQ ID NO: 21295 - protein, 86 aa, Homo sapiens
MANIHTFSACLALADLHGDGEYKLLLPPSSWSNMSPGPQLWHLLQALVSMCIRISDPTSSSACPNCLQILWNKTFGTRPKRTESTP

SEQ ID NO: 21296 - DNA, 821 bp, Homo sapiens
ctgccgctatctccgccccaatacggaagcggcctagtcctccggctccgacagctgggtgtccaggccatggggcagccctgggcggctgggagcacggacggggcgcccgcgcagctgcctctcgtgctcaccgcgctgtgggccgcggccgtgggcctggagctggcttacgtgctggtgctcggtcccgggccgccgccgctgggacccctggcccgggccttgcagctggcgctggccgccttccagctgctcaacctgctgggcaacgtggggctcttcctgcgctcggatcccagcatccgtggcgtgatgctggccggccgcggtctgggccagggctgggcttactgctaccaatgccaaagccaggtgccgccacgcagcggacactgctctgcctgccgcgtctgcatcctgcgtcgggaccaccactgccgcctgctgggccgctgcgtgggcttcggcaactaccggcccttcctgtgcctgctgcttcatgccgccggcgtcctgctccacgtctctgtgctgctgggccctgcactgtcggccctgctgcgagcccacacgcccctccacatggctgccctcctcctgcttccctggctcatgttgctcacagcaccttccagcctgaggaacagtgatttgcaggcaacgtgtacctcctaggctgtccctggatttgcagagatggagtctcgctctgttgtccaggctgaagtgccatggtttgatcttggctcactgcaacctccgcctcccaggctcaagcgattctcctacctcaacctcctgagtagctgggattacag

SEQ ID NO: 21297 - protein, 202 aa, Homo sapiens
MGQPWAAGSTDGAPAQLPLVLTALWAAAVGLELAYVLVLGPGPPPLGPLARALQLALAAFQLLNLLGNVGLFLRSDPSIRGVMLAGRGLGQGWAYCYQCQSQVPPRSGHCSACRVCILRRDHHCRLLGRCVGFGNYRPFLCLLLHAAGVLLHVSVLLGPALSALLRAHTPLHMAALLLLPWLMLLTAPSSLRNSDLQATCTS

SEQ ID NO: 21298 - DNA, 1677 bp, Homo sapiens
cagctcagagctcatccttctcaccattctcctgccagcatcgcaaacttcctccctcatcttccttccacagtgctttcctggcttctctgtgtctgcctctggctgctgagagccagaggcattggcagtctgtggcaggttgatgccatgccatgttcatggctgctgacctcagcaggccctcggctatgcctggccttcccgtttgcttgtaagcttgctactcccagcaacagcagctcaaaccttccctgctctcccacactccaagctccagcactgagaaagtgagacatcagctggcacatcccaaattgtgctgtcctcaactccccgagcccagctgactgcccccagcttcttgtatttggtgcctacctccctgcttggaggcctcaggctgtggcatctgcctctcctgcaggccaggccttctctgccctcctggtttgccaccttggacaaaccctcccttgccctcatatcctcctccagcgcttgccctgctctaagcttcccaagggacttgcccaggctcatggctgctcattccctgcctgctccagcctggcttctgccaccaccactcactcagggatctgtctccacacactccaggaccctttcttgctttatgagaccttttagactcatgacactgctggcccccagcccccgtgaagcgttctccgcctgccacaacctgcaggcagccctggggccccgctgggccctcgtctggctctggcccttcctggcctccccattgcctggggatgggatcaccttccagaccacagcagatgtgggacacacagcctcctgactccaggaagagccagagctgtgcagggaggaaggggtgagaggggggcccccacacctagactcagtaaggaagtcgggttggaccttaacatctgcattggacaactccaccccttccttggccttgcccctgcccgcctacactcctacgtgtccagggcttgggccgtgacttaggcagaggagtgcagaggagggtctggcaggggctgctcaggccgcctagctgcccctttgccaggttaataaagcactgacttgtttctcagcctccctccatctttgcatagtttctggcccctcactttgttgctggggctgtttctgggaccctctgtagggcctggaaactgcaggatgcctgagggtctcaggggctggggctctacctcccctggcctgggtgagttgggggtggggcaccagcacgccaaggcagtgtcctactgatccaggctatgagaatccaaacattctttcccaggtttggcattttatagttagaagcatttctgcaacagcagtttcatggaacctctcttagctaacctggtccatggggcagcagttacgctctaagaatccatgtggtaagatcatggtgcggcaaatggaggcagggtccaacccaggtctttgtgcttttgcctttacccttgcacagctggaggaaatgagtaggaaagaaatcaaggtaaagaaatgcgctggggctgtttgggcatctgtggagggtggtgctgacagggctaggcctgcacctctctggcctcctcaagagctgcttgttaaatgtttccgtgtaaatagaatgaatagagaccgccatttccacatggcaggcct

SEQ ID NO: 21299 - protein, 95 aa, Homo sapiens
MAAHSLPAPAWLLPPPLTQGSVSTHSRTLSCFMRPFRLMTLLAPSPREAFSACHNLQAALGPRWALVWLWPFLASPLPGDGITFQTTADVGHTAS

SEQ ID NO: 21300 - DNA, 1900 bp, Homo sapiens
gattccgagcgcctccactgctggtccgttggccagatcaactcgccgcgtgggccggccgttccctgagagtctgagcgctcgccgcacccccttccgagcttctattggccgtagcagacgtccgtctgccgctatctccgccccaatacggaagcggcctagtcctccggctccgacagctgggtgtccaggccatggggcagccctgggcggctgggagcacggacggggcgcccgcgcagctgcctctcgtgctcaccgcgctgtgggccgcggccgtgggcctggagctggcttacgtgctggtgctcggtcccgggccgccgccgctgggacccctggcccgggccttgcagctggcgctggccgccttccagctgctcaacctgctgggcaacgtggggctcttcctgcgctcggatcccagcatccgtggcgtgatgctggccggccgcggtctgggccagggctgggcttactgctaccaatgccaaagccaggtgccgccacgcagcggacactgctctgcctgccgcgtctgcatcctgcgtcgggaccaccactgccgcctgctgggccgctgcgtgggcttcggcaactaccggcccttcctgtgcctgctgcttcatgccgccggcgtcctgctccacgtctctgtgctgctgggccctgcactgtcggccctgctgcgagcccacacgcccctccacatggctgccctcctcctgcttccctggctcatgttgctcacaggcagagtgtctctggcacagtttgccttggccttcgtgacggacacgtgcgtggcgggtgcgctgctgtgcggggctgggctgctcttccatgggatgctgctgctgcggggccagaccacatgggagtgggctcggggccagcactcctatgacctgggtccctgccacaacctgcaggcagccctggggccccgctgggccctcgtctggctctggcccttcctggcctccccattgcctggggatgggatcaccttccagaccacagcagatgtgggacacacagcctcctgactccaggaagagccagagctgtgcagggaggaaggggtgagaggggggcccccacacctagactcagtaaggaagtcgggttggaccttaacatctgcattggacaactccaccccttccttggccttgcccctgcccgcctacactcctacgtgtccagggcttgggccgtgacttaggcagaggagtgcagaggagggtctggcaggggctgctcaggccgcctagctgcccctttgccaggttaataaagcactgacttgtttctcagcctccctccatctttgcatagtttctggcccctcactttgttgctggggctgtttctgggaccctctgtagggcctggaaactgcaggatgcctgagggtctcaggggctggggctctacctcccctggcctgggtgagttgggggtggggcaccagcacgccaaggcagtgtcctactgatccaggctatgagaatccaaacattctttcccaggtttggcattttatagttagaagcatttctgcaacagcagtttcatggaacctctcttagctaacctggtccatggggcagcagttacgctctaagaatccatgtggtaagatcatggtgcggcaaatggaggcagggtccaacccaggtctttgtgcttttgcctttacccttgcacagctggaggaaatgagtaggaaagaaatcaaggtaaagaaatgcgctggggctgtttgggcatctgtggagggtggtgctgacagggctaggcctgcacctctctggcctcctcaagagctgcttgttaaatgtttccgtgtaaatagaatgaatagagaccgccatttccacatggcaggcct

SEQ ID NO: 21301 - protein, 284 aa, Homo sapiens; identical to SEQ ID NO: 2731

SEQ ID NO: 21302 - DNA, 1102 bp, Homo sapiens
cagctcagagctcatccttctcaccattctcctgccagcatcgcaaacttcctccctcatcttccttccacagtgctttcctggcttctctgtgtctgcctctggctgctgagagccagaggcattggcagtctgtggcaggttgatgccatgccatgttcatggctgctgacctcagcaggccctcggctatgcctggccttcccgtttgcttgtaagcttgctactcccagcaacagcagctcaaaccttccctgctctcccacactccaagctccagcactgagaaagtgagacatcagctggcacatcccaaattgtgctgtcctcaactccccgagcccagctgactgcccccagcttcttgtatttggtgcctacctccctgcttggaggcctcaggctgtggcatctgcctctcctgcaggccaggccttctctgccctcctggtttgccaccttggacaaaccctcccttgccctcatatcctcctccagcgcttgccctgctctaagcttcccaagggacttgcccaggctcatggctgctcattccctgcctgctccagcctggcttctgccaccaccactcactcagggatctgtctccacacactccaggaccctttcttgctttatgagaccttttagactcatgacactgctggcccccagcccccgtgaagcgttctccgcctgccacaacctgcaggcagccctggggccccgctgggccctcgtctggctctggcccttcctggcctccccattgcctggggatgggatcaccttccagaccacagcagatgtgggacacacagcctcctgactccaggaagagccagagctgtgcagggaggaaggggtgagaggggggcccccacacctagactcagtaaggaagtcgggttggaccttaacatctgcattggacaactccaccccttccttggccttgcccctgcccgcctacactcctacgtgtccagggcttgggccgtgacttaggcagaggagtgcagaggagggtctggcaggggctgctcaggccgcctagctgcccctttgccaggttaataaagcactgacttgtttctcagcc

SEQ ID NO: 21303 - protein, 95 aa, Homo sapiens; identical to SEQ ID NO: 21299

SEQ ID NO: 21304 - DNA, 1325 bp, Homo sapiens
gattccgagcgcctccactgctggtccgttggccagatcaactcgccgcgtgggccggccgttccctgagagtctgagcgctcgccgcacccccttccgagcttctattggccgtagcagacgtccgtctgccgctatctccgccccaatacggaagcggcctagtcctccggctccgacagctgggtgtccaggccatggggcagccctgggcggctgggagcacggacggggcgcccgcgcagctgcctctcgtgctcaccgcgctgtgggccgcggccgtgggcctggagctggcttacgtgctggtgctcggtcccgggccgccgccgctgggacccctggcccgggccttgcagctggcgctggccgccttccagctgctcaacctgctgggcaacgtggggctcttcctgcgctcggatcccagcatccgtggcgtgatgctggccggccgcggtctgggccagggctgggcttactgctaccaatgccaaagccaggtgccgccacgcagcggacactgctctgcctgccgcgtctgcatcctgcgtcgggaccaccactgccgcctgctgggccgctgcgtgggcttcggcaactaccggcccttcctgtgcctgctgcttcatgccgccggcgtcctgctccacgtctctgtgctgctgggccctgcactgtcggccctgctgcgagcccacacgcccctccacatggctgccctcctcctgcttccctggctcatgttgctcacaggcagagtgtctctggcacagtttgccttggccttcgtgacggacacgtgcgtggcgggtgcgctgctgtgcggggctgggctgctcttccatgggatgctgctgctgcggggccagaccacatgggagtgggctcggggccagcactcctatgacctgggtccctgccacaacctgcaggcagccctggggccccgctgggccctcgtctggctctggcccttcctggcctccccattgcctggggatgggatcaccttccagaccacagcagatgtgggacacacagcctcctgactccaggaagagccagagctgtgcagggaggaaggggtgagaggggggcccccacacctagactcagtaaggaagtcgggttggaccttaacatctgcattggacaactccaccccttccttggccttgcccctgcccgcctacactcctacgtgtccagggcttgggccgtgacttaggcagaggagtgcagaggagggtctggcaggggctgctcaggccgcctagctgcccctttgccaggttaataaagcactgacttgtttctcagcc

SEQ ID NO: 21305 - protein, 284 aa, Homo sapiens; identical to SEQ ID NO: 2731

SEQ ID NO: 21306 - DNA, 973 bp, Homo sapiens
ctgccgctatctccgccccaatacggaagcggcctagtcctccggctccgacagctgggtgtccaggccatggggcagccctgggcggctgggagcacggacggggcgcccgcgcagctgcctctcgtgctcaccgcgctgtgggccgcggccgtgggcctggagctggcttacgtgctggtgctcggtcccgggccgccgccgctgggacccctggcccgggccttgcagctggcgctggccgccttccagctgctcaacctgctgggcaacgtggggctcttcctgcgctcggatcccagcatccgtggcgtgatgctggccggccgcggtctgggccagggctgggcttactgctaccaatgccaaagccaggtgccgccacgcagcggacactgctctgcctgccgcgtctgcatcctgcgtcgggaccaccactgccgcctgctgggccgctgcgtgggcttcggcaactaccggcccttcctgtgcctgctgcttcatgccgccggcgtcctgctccacgtctctgtgctgctgggccctgcactgtcggccctgctgcgagcccacacgcccctccacatggctgccctcctcctgcttccctggctcatgttgctcacaggagtcccggcccttcagccgcactgccctaccaccttgtggtcaacactcactcccctcagtcacggaagactctggctccagtcacagactctctcttcgccctgggccctgtggaaatcaagggtgtctggaagtttgcatgaacagccccctcaatgcctggatggcttagctcttggcctcctccttcatttttccttcctttccctcctcccatgtccacaccccagtcctggtcagaatccaaaaatgagtcaccctcacaaaccacccatcttcctctttctgctgcccacctcctcttctctccgtcttttactcctccacgccctggcacctgctc

SEQ ID NO: 21307 - protein, 300 aa, Homo sapiens
MGQPWAAGSTDGAPAQLPLVLTALWAAAVGLELAYVLVLGPGPPPLGPLARALQLALAAFQLLNLLGNVGLFLRSDPSIRGVMLAGRGLGQGWAYCYQCQSQVPPRSGHCSACRVCILRRDHHCRLLGRCVGFGNYRPFLCLLLHAAGVLLHVSVLLGPALSALLRAHTPLHMAALLLLPWLMLLTGVPALQPHCPTTLWSTLTPLSHGRLWLQSQTLSSPWALWKSRVSGSLHEQPPQCLDGLALGLLLHFSFLSLLPCPHPSPGQNPKMSHPHKPPIFLFLLPTSSSLRLLLLHALAP

SEQ ID NO: 21308 - DNA, 3507 bp, Homo sapiens
ggagccccgcccgctggcgcgggggccaggagtgcccgggggattgagttgcagccggggtggtgtcggggtttcccggctcagcacattctcccctactccccacagccgccccgatattaatagccctgccgcagcccatccagctggctcagagccgttccccatgcccgggtgtctccatcaccccagaaaacatgcaaaacagctcggcgcctctgtgttcctgactgtgaaatggggatagggctctgtgtcccaccagcgaggtgctggaagaggctcacgaggagctccagagggcagcctctagagcggcccgcggccactattattatcggcctttctattgtggagaggagtaaacagactcagagaggtcccgtggatttctcaaggtcacacagcgccccagcagcggagcaggaatgcaaacccaggatctccgccgcgagatccaccccggcgcccccgagtcccgcagttcccggcttcaggacaaccccttgccaggtccaacccgagctccttcacccccatccggcccctccctcctcccccatatttagtgcgaattcgatctggggctgggctgggccctacttaatggggcccgggtgtccgagagcgtgccgagcggagcgaagccaggagcccgatcgagatgatgatggttatgcagcccgagggtctgggggccggggaggggcgctttgcgggcggcggcgggggcggcgagtacatggaacaggaggaggactgggaccgcgacctgctgctggacccggcctgggagaagcagcagcggaaaaccttcactgcctggtgcaactcacacctgcgcaaggcaggcacccagatcgagaacatcgaggaagatttccgcaatggcctcaaactcatgctgctcctggaggtcatttcaggtgagaggctgcctaggccagataaaggcaagatgcgcttccacaaaatcgccaacgttaacaaggccctggacttcattgccagcaagggggttaaactggtgtccattggtgctgaagagattgttgacgggaacctgaagatgaccctgggcatgatctggaccatcatccttcgcttcgccatccaggacatctctgtggaagaaacctcagccaaggaaggcttgcttctgtggtgccagaggaagacagcaccgtaccgcaacgtcaacgtgcagaacttccacaccagctggaaggatggcctggccctctgtgccctcatccaccgacaccgccctgacctcatcgactacgccaaactgcgaaaggatgaccccatcggaaacctgaacactgcctttgaggtggcagagaaatacctggacatccccaagatgttggatgcagaagacattgtgaacaccccaaagccggatgagaaggccatcatgacctatgtgtcctgcttctaccatgcctttgccggggctgagcaggcagagacagctgccaacaggatctgcaaggtgctggcagtgaaccaggaaaacgagaagctgatggaggagtatgagaagcttgccagtgagctgctggagtggatccgccgcactgtcccatggctggagaaccgtgtgggtgagcccagcatgagtgccatgcagcgcaaactagaggactttcgggactaccggcgtctgcacaagccgccccgcattcaggaaaagtgccagctggagatcaacttcaacacactgcagaccaagttgcggctcagccaccggcctgccttcatgccctccgagggcaagctggtctcggacatcgccaacgcctggcgggggctggagcaggtggaaaagggctatgaggactggctgctctcggagatccggcgcctgcagcgactccagcacctggctgagaagttccggcagaaggcctccctgcacgaagcctggacccggggaaaggaggagatgctgagccagcgcgactacgattcggctttgctacaggaggtgcgggcgttgctgcggcgccacgaggcctttgagagcgacctggcggcgcaccaggaccgcgtggagcacattgccgcgctggcccaggagctcaatgagctggactaccacgaggcagcctcagtgaatagccgctgccaggccatctgcgatcagtgggacaacctgggcaccctgacccagaagaggcgggatgcgctagagcggatggagaagctcctggagaccattgaccggctgcaactggagtttgcccggcgggccgcgcccttcaacaactggctggatggtgccgtggaggacctgcaggacgtgtggctggtacactctgtggaggagacccagagcctgctgacagcgcacgatcagttcaaggcaacactgcccgaggctgactgagagcgaggtgccatcatgggcatccagggtgagatccagaagatctgccagacgtatgggctgcggccctgctccaccaatccctacatcaccctcagcccgcaggacatcaacaccaagtgggatatggtccgaaagctggtgcccagctgtgaccagacactgcaggaggagctggcacggcagcaggtaaacgagaggctccggcgacagtttgcggcccaggccaatgccattggaccctggatccaggcgaaggtggaggaagtggggcggctggcagcagggctagctggctctctggaggagcagatggctgggctacggcagcaggagcagaacattatcaactacaagactaacattgaccggctggagggtgaccaccagctgctgcaggagagcctggtgttcgacaataagcacaccgtctacagcatggagcacatccgcgtgggctgggagcagctgctcacctccattgcccgcaccatcaatgaagtggagaaccaggtactgacccgagacgccaagggactgagccaggagcagctcaacgagttccgagcatccttcaaccactttgacaggaagcagaatgggatgatggagcctgatgacttccgagcttgcctcatctccatgggctatgacctgggggaagtggagtttgctcgcatcatgaccatggtggaccccaacgcagctggggtggtgaccttccaggccttcatagacttcatgacccgagagacagccgagactgacacgactgagcaagttgtagcttccttcaagatcttggcaggagacaagaactacatcacccccgaggagctgcggcgcgagctccctgccaagcaggccgagtactgcatccgccgtatggtgccctacaagggatccggggccccggctggagccctggactacgtggccttctccagtgccctctatggggagagcgacctttgaccccaaccactgaggttctctatgcaagatggagagaggatgcaccctgtggctgatcccatccgtccctcggagcaagggcctaagagaaaagccagccaagtgcttctgaataaagatccctctctgggtctctc

SEQ ID NO: 21309 - protein, 576 aa, Homo sapiens
MMMVMQPEGLGAGEGRFAGGGGGGEYMEQEEDWDRDLLLDPAWEKQQRKTFTAWCNSHLRKAGTQIENIEEDFRNGLKLMLLLEVISGERLPRPDKGKMRFHKIANVNKALDFIASKGVKLVSIGAEEIVDGNLKMTLGMIWTIILRFAIQDISVEETSAKEGLLLWCQRKTAPYRNVNVQNFHTSWKDGLALCALIHRHRPDLIDYAKLRKDDPIGNLNTAFEVAEKYLDIPKMLDAEDIVNTPKPDEKAIMTYVSCFYHAFAGAEQAETAANRICKVLAVNQENEKLMEEYEKLASELLEWIRRTVPWLENRVGEPSMSAMQRKLEDFRDYRRLHKPPRIQEKCQLEINFNTLQTKLRLSHRPAFMPSEGKLVSDIANAWRGLEQVEKGYEDWLLSEIRRLQRLQHLAEKFRQKASLHEAWTRGKEEMLSQRDYDSALLQEVRALLRRHEAFESDLAAHQDRVEHIAALAQELNELDYHEAASVNSRCQAICDQWDNLGTLTQKRRDALERMEKLLETIDRLQLEFARRAAPFNNWLDGAVEDLQDVWLVHSVEETQSLLTAHDQFKATLPEAD

SEQ ID NO: 21310 - DNA, 2135 bp, Homo sapiens
ggaagggatgggctcgcgctgccgggcgtgggcgtggactcgggcgtgggcactggcggagttccaagcccgggctgaggagggggcggcggcggcggcggcggcggcgggcgggtacccttcgactgggcgttgccgctgttccctgcgcggcatggaggggacggccgtggccgtgttcgagattttgagatttttaataattcactggaagtgtgacatagatgtatcaaagggagcattgctagaagggcagctagtgatttccatagaaggattaaattctaagcaccaggcaaatgctcttcattgtgtaacaactagatggagtctcactctgttacccaggccggagtgcagtggcgcagtctcggctcactgcaacctccacctcccaggttcaagtgattctcatgcctcagtcccccgagtagctgggattacagatgcccaccaccatgcctggctaattatggttgcttctgcaggaagcctttttggtggcatggtcctcaagaagttcctaaaagaaatacagtccatactgcccggaatctctgcaaagctgacttggacttcagaggaaggcagctattctcaggatatgacaggggtaacacccttccagatgatttttgaggttgatgaaaagcccagaaccttgatgacagattgtctggttataaagcattttttacgtaaaatcatcatggtgcaccctaaggtcagatttcatttcagtgtaaaggtaaatggaatcctctccacagagatctttggggtggagaatgaacccactttgaaccttgggaatggaattgctcttttggtcgactcccagcattatgtgagaccaaattttggtacaattgaatcacactgcagcagaattcaccctgtgctaggacatccagtaatgcttttcatccctgaagacgtggctggcatggacttgttgggagaactgatactgactccagcagctgcactgtgccccagcccaaaggtttcttccaaccagcttaacaggatttcttcagtttccatatttctatatggacctttgggtctgcctctgatattgtcaacttgggagcagccgatgactactttcttcaaagatacctcttctttagttgactggaaaaaataccatttgtgtatgatacccaatttggatctcaatttggatagagatttggtgcttccagatgtgagttatcaggtggaatccagtgaggaggatcagtctcagactatggatcctcaaggacaaactctgctgctttttctctttgtggatttccacagtgcatttccagtccagcaaatggaaatctggggagtctatactttgctcacaactcatctcaatgccatccttgtggagagccacagtgtagtgcaaggttccatccaattcactgtggacaaggtcttggagcaacatcaccaggctgccaaggctcagcagaaactacaggcctcactctcagtggctgtgaactccatcatgagtattctgactggaagcactaggagcagcttccgaaagatgtgtctccagacccttcaagcagctgacacacaagagttcaggaccaaactgcacaaagtatttcgtgagatcacccaacaccaatttcttcaccactgctcatgtgaggtgaagcagcagctaaccctagaaaaaaaggactcagcccagggcactgaggacgcacctgataacagcagcctggagctcctagcagataccagcgggcaagcagaaaacaagaggctcaagaggggcagcccccgcatagaggagatgcgagctctgcgctctgccagggccccgagcccgtcagaggccgccccgcgccgcccggaagccaccgcggcccccctcactcctagaggaagggagcaccgcgaggctcacggcagggccctggcgccgggcagggcgagcctcggaagccgcctggaggacgtgctgtggctgcaggaggtctccaacctgtcagagtggctgagtcccagccctgggccctgagccgggtccccttccgcaagcgcccaccgatccggaggctgcgggcagccgttatcccgtggtttaataaagctgccgcgcgctcaccaagtcc

SEQ ID NO: 21311 - protein, 677 aa, Homo sapiens
MGSRCRAWAWTRAWALAEFQARAEEGAAAAAAAAGGYPSTGRCRCSLRGMEGTAVAVFEILRFLIIHWKCDIDVSKGALLEGQLVISIEGLNSKHQANALHCVTTRWSLTLLPRPECSGAVSAHCNLHLPGSSDSHASVPRVAGITDAHHHAWLIMVASAGSLFGGMVLKKFLKEIQSILPGISAKLTWTSEEGSYSQDMTGVTPFQMIFEVDEKPRTLMTDCLVIKHFLRKIIMVHPKVRFHFSVKVNGILSTEIFGVENEPTLNLGNGIALLVDSQHYVRPNFGTIESHCSRIHPVLGHPVMLFIPEDVAGMDLLGELILTPAAALCPSPKVSSNQLNRISSVSIFLYGPLGLPLILSTWEQPMTTFFKDTSSLVDWKKYHLCMIPNLDLNLDRDLVLPDVSYQVESSEEDQSQTMDPQGQTLLLFLFVDFHSAFPVQQMEIWGVYTLLTTHLNAILVESHSVVQGSIQFTVDKVLEQHHQAAKAQQKLQASLSVAVNSIMSILTGSTRSSFRKMCLQTLQAADTQEFRTKLHKVFREITQHQFLHHCSCEVKQQLTLEKKDSAQGTEDAPDNSSLELLADTSGQAENKRLKRGSPRIEEMRALRSARAPSPSEAAPRRPEATAAPLTPRGREHREAHGRALAPGRASLGSRLEDVLWLQEVSNLSEWLSPSPGP

SEQ ID NO: 21312 - DNA, 1771 bp, Homo sapiens
ataattcactggaagtgtgacatagatgtatcaaagggagcattgctagaagggcagctagtgatttccatagaaggattaaattctaagcaccaggcaaatgctcttcattgtgtaacaactagtaaatggagtctcatcttgttgcccaggctggagtgcaatggcacgatcttggctcactgcaacctccacctcccaggttcaagcaagtctcctgcctcagcctcctgagtagctgggactacaggagcatgccaccacacctggctaattagaaatacagtccatactgcccggaatctctgcaaagctgacttggacttcagaggaaggcagctattctcaggatatgacaggggtaacacccttccagatgatttttgaggttgatgaaaagcccagaaccttgatgacagattgtctggttataaagcattttttacgtaaaatcatcatggtgcaccctaaggtcagatttcatttcagtgtaaaggtaaatggaatcctctccacagagatctttggggtggagaatgaacccactttgaaccttgggaatggaattgctcttttggtcgactcccagcattatgtgagaccaaattttggtacaattgaatcacactgcagcagaattcaccctgtgctaggacatccagtaatgcttttcatccctgaagacgtggctggcatggacttgttgggagaactgatactgactccagcagctgcactgtgccccagcccaaaggtttcttccaaccagcttaacaggatttcttcagtttccatatttctatatggacctttgggtctgcctctgatattgtcaacttgggagcagccgatgactactttcttcaaagatacctcttctttagttgactggaaaaaataccatttgtgtatgatacccaatttggatctcaatttggatagagatttggtgcttccagatgtgagttatcaggtggaatccagtgaggaggatcagtctcagactatggatcctcaaggacaaactctgctgctttttctctttgtggatttccacagtgcatttccagtccagcaaatggaaatctggggagtctatactttgctcacaactcatctcaatgccatccttgtggagagccacagtgtagtgcaaggttccatccaattcactgtggacaaggtcttggagcaacatcaccaggctgccaaggcagctgacacacaagagttcaggaccaaactgcacaaagtatttcgtgagatcacccaacaccaatttcttcaccactgctcatgtgaggtgaagcagcagctaaccctagaaaaaaaggactcagcccagggcactgaggacgcacctgataacagcagcctggagctcctagcagataccagcgggcaagcagaaaacaagaggctcaagaggggcagcccccgcatagaggagatgcgagctctgcgctctgccagggccccgagcccgtcagaggccgccccgcgccgcccggaagccaccgcggcccccctcactcctagaggaagggagcaccgcgaggctcacggcagggccctggcgccgggcagggcgagcctcggaagccgcctggaggacgtgctgtggctgcaggaggtctccaacctgtcagagtggctgagtcccagccctgggccctgagccgggtccccttccgcaagcgcccaccgatccggaggctgcgggcagccgttatcccgtggtttaataaagctgccgcgcgctcaccaagtc

SEQ ID NO: 21313 - protein, 441 aa, Homo sapiens
MTGVTPFQMIFEVDEKPRTLMTDCLVIKHFLRKIIMVHPKVRFHFSVKVNGILSTEIFGVENEPTLNLGNGIALLVDSQHYVRPNFGTIESHCSRIHPVLGHPVMLFIPEDVAGMDLLGELILTPAAALCPSPKVSSNQLNRISSVSIFLYGPLGLPLILSTWEQPMTTFFKDTSSLVDWKKYHLCMIPNLDLNLDRDLVLPDVSYQVESSEEDQSQTMDPQGQTLLLFLFVDFHSAFPVQQMEIWGVYTLLTTHLNAILVESHSVVQGSIQFTVDKVLEQHHQAAKAADTQEFRTKLHKVFREITQHQFLHHCSCEVKQQLTLEKKDSAQGTEDAPDNSSLELLADTSGQAENKRLKRGSPRIEEMRALRSARAPSPSEAAPRRPEATAAPLTPRGREHREAHGRALAPGRASLGSRLEDVLWLQEVSNLSEWLSPSPGP

SEQ ID NO: 21314 - DNA, 2724 bp, Homo sapiens
tgtttttctcctagataccagcgggcaagcagaaaacaagaggctcaagaggggcagcccccgcatagaggagatgcgagctctgcgctctgccagggccccgagcccgtcagaggccgccccgcgccgcccggaagccaccgcggcccccctcactcctagaggaagggagcaccgcgaggctcacggcagggccctggcgccgggcagggcgagcctcggaagccgcctggaggtaactgggcgagggccgcgcagggaagggctcagcaggaggtgcaggccacgggccgctgctgagaggtcctcaccccgggcccccttgttcccgcaggacgtgctgtggctgcaggaggtctccaacctgtcagagtggctgagtcccagccctgggccctgagccgggtccccttccgcaagcgcccaccgatccggaggctgcgggcagccgttatcccgtggtttaataaagctgccgcgcgctcaccaagtcctcttccgcgtctgcttccgcgtcgggcccgggcggggcggggcggggcgtggagccgcgccgcggcctgacgtcacccacacctccctgggactgcgtcactggtgcgcgccgcgggtcagggcgcaatggcggcgctgggcggggatgggctgcgactgctgtcggtgtcgcggccggagcggccgcccgagtcggcggcgctgggcggcctgggccccgggctgtgctgctgggtgtcagtgttctcctgcctcagcctcgcctgctcctacgtgggcagcctctacgtctggaagagcgaactgcccaggtgcgggggctgcgcgcgaccggaatccgcgccctgcgggcggagcttgggcgagccgggggcgggtccgtgctcatgggcagccgcgggccccctgaacttactgtcccctccgtagggaccatcccgcggtcatcaagcgacgcttcaccagcgtcctggtggtgtccagtctctcacccctgtgcgtgctgctctggagggaactcacaggcatccagccaggcacatccctgctcaccctgatgggcttcaggctggagggcattttcccagcggcgctgctgcccctgttgctgaccatgattcttttcctgggcccactgatgcagctctctatggattgcccttgtgacctggcagatgggctgaaggttgtcctggccccccgctcctgggcccgctgcctcacagacatgcgttggctgcggaaccaagtgatcgccccgctgacagaggagctggtgttccgggcctgtatgctgcccatgttagcaccgtgcatgggcctgggccctgctgtgttcacctgcccgctcttttttggagttgcccattttcaccatattattgagcagctgcgtttccgccagagcagcgtggggaacatcttcttgtctgctggtgagtcctggctagctggcctgggttagggtgtatgatgatgtcgctaatggccactctggagaaggaattgggaactgagggccacagtattggagaggccactgaccgtgggaagttggggtgcaggacagctgtaggtggtggggcaggcagctactgccccggggggaggggatggtcggtctttggctgatgggtatgtagtgtgggggcaggaagggcgtgcaggtgtggtcactcgtggcctccccgtctccagcgttccagttctcctacacagctgtcttcggtgcctacactgctttcctcttcatccgcacaggttggtcctcagtccctcatgggtccctgggggcccacaggagcgggtgggagaatgggaatactgtttgttctaggaacaaaagttcttctactccagtccttgagacaggctgagccagagccctcagcctggtgaggtctgagaggtggaaaggagcagaggccgtggtgtgtgggtggatggctggggtagtgggatcttgatctcctgtttcaggggatgagggtcactagccctggaagggccagaggaggtggtagggctgctccctgagctgctgtctcttttccccaggacacctgattgggccggttctctgccattccttctgcaattacatgggtttcccagctgtttgcgcggccttggagcacccacagaggcggcccctgctggcaggctatgccctgggtgtgggactcttcctgcttctgctccagcccctcacggaccccaagctctacggcagccttcccctttgtgtgcttttggagcgggcaggggactcagaggctcccctgtgctcctgacctatgctcctggatacgctatgaactctcaccggctccccagccctccccaccaaggggtactgcaggggaagggctggctggggtccccgagatctcaggaatttttgtaggggattgaagccagagctagttgcgtcccagggaccaagagaaagaagcagatatccaaagggtgcagccccttttgaaaggggtgtttacgagcagctgtgagtgaggggacaaggggcaggtcccaggagccacacactcccttcctcactttggactgctgcttctcttagctcctctgcctctgaaaagctgctcggggttttttatttataaaacctctccccaccccccaccccccaacttcctgggttttctcattgtctttttgcatcagtactttgtattgggatattaaagagatttaacttgggtaacatgg

SEQ ID NO: 21315 - protein, 135 aa, Homo sapiens
MGFRLEGIFPAALLPLLLTMILFLGPLMQLSMDCPCDLADGLKVVLAPRSWARCLTDMRWLRNQVIAPLTEELVFRACMLPMLAPCMGLGPAVFTCPLFFGVAHFHHIIEQLRFRQSSVGNIFLSAGESWLAGLG

SEQ ID NO: 21316 - DNA, 801 bp, Homo sapiens
cgctgctgagaggtcctcaccccgggcccccttgttcccgcaggacgtgctgtggctgcaggaggtctccaacctgtcagagtggctgagtcccagccctgggccctgagccgggtccccttccgcaagcgcccaccgatccggaggctgcgggcagccgttatcccgtggtttaataaagctgccgcgcgctcaccaagtcctcttccgcgtctgcttccgcgtcgggcccgggcggggcggggcggggcgtggagccgcgccgcggcctgacgtcacccacacctccctgggactgcgtcactggtgcgcgccgcgggtcagggcgcaatggcggcgctgggcggggatgggctgcgactgctgtcggtgtcgcggccggagcggccgcccgagtcggcggcgctgggcggcctgggccccgggctgtgctgctgggtgtcagtgttctcctgcctcagcctcgcctgctcctacgtgggcagcctctacgtctggaagagcgaactgcccagggaccatcccgcggtcatcaagcgacgcttcaccagcgtcctggtggtgtccagtctctcacccctgtgcgtgctgctctggagggaactcacaggcatccagccaggcacatccctgctcaccctgatgggcttcaggctggagggcattttcccagcggcgctgctgcccctgttgctgaccatggtgagtgctcctgctgtattttttcttctggtctttgttatcagcctgatgggcagtgccgtggactcttgtttttggtttttggttgatgggagacag

SEQ ID NO: 21317 - protein, 156 aa, Homo sapiens
MAALGGDGLRLLSVSRPERPPESAALGGLGPGLCCWVSVFSCLSLACSYVGSLYVWKSELPRDHPAVIKRRFTSVLVVSSLSPLCVLLWRELTGIQPGTSLLTLMGFRLEGIFPAALLPLLLTMVSAPAVFFLLVFVISLMGSAVDSCFWFLVDGR

SEQ ID NO: 21318 - DNA, 1771 bp, Homo sapiens
cgctgctgagaggtcctcaccccgggcccccttgttcccgcaggacgtgctgtggctgcaggaggtctccaacctgtcagagtggctgagtcccagccctgggccctgagccgggtccccttccgcaagcgcccaccgatccggaggctgcgggcagccgttatcccgtggtttaataaagctgccgcgcgctcaccaagtcctcttccgcgtctgcttccgcgtcgggcccgggcggggcggggcggggcgtggagccgcgccgcggcctgacgtcacccacacctccctgggactgcgtcactggtgcgcgccgcgggtcagggcgcaatggcggcgctgggcggggatgggctgcgactgctgtcggtgtcgcggccggagcggccgcccgagtcggcggcgctgggcggcctgggccccgggctgtgctgctgggtgtcagtgttctcctgcctcagcctcgcctgctcctacgtgggcagcctctacgtctggaagagcgaactgcccagggaccatcccgcggtcatcaagcgacgcttcaccagcgtcctggtggtgtccagtctctcacccctgtgcgtgctgctctggagggaactcacaggcatccagccaggcacatccctgctcaccctgatgggcttcaggctggagggcattttcccagcggcgctgctgcccctgttgctgaccatgattcttttcctgggcccactgatgcagctctctatggattgcccttgtgacctggcagatgggctgaaggttgtcctggccccccgctcctgggcccgctgcctcacagacatgcgttggctgcggaaccaagtgatcgccccgctgacagaggagctggtgttccgggcctgtatgctgcccatgttagcaccgtgcatgggcctgggccctgctgtgttcacctgcccgctcttttttggagttgcccattttcaccatattattgagcagctgcgtttccgccagagcagcgtggggaacatcttcttgtctgctgcgttccagttctcctacacagctgtcttcggtgcctacactgctttcctcttcatccgcacaggacacctgattgggccggttctctgccattccttctgcaattacatgggtttcccagctgtttgcgcggccttggagcacccacagaggcggcccctgctggcaggctatgccctgggtgtgggactcttcctgcttctgctccagcccctcacggaccccaagctctacggcagccttcccctttgtgtgcttttggagcgggcaggggactcagaggctcccctgtgctcctgacctatgctcctggatacgctatgaactctcaccggctccccagccctccccaccaaggggtactgcaggggaagggctggctggggtccccgagatctcaggaatttttgtaggggattgaagccagagctagttgcgtcccagggaccaagagaaagaagcagatatccaaagggtgcagccccttttgaaaggggtgtttacgagcagctgtgagtgaggggacaaggggcaggtcccaggagccacacactcccttcctcactttggactgctgcttctcttagctcctctgcctctgaaaagctgctcggggttttttatttataaaacctctccccaccccccaccccccaacttcctgggttttctcattgtctttttgcatcagtactttgtattgggatattaaagagatttaacttgggtaacatggccttgggcctttggg

SEQ ID NO: 21319 - protein, 329 aa, Homo sapiens; identical to SEQ ID NO: 2739

SEQ ID NO: 21320 - DNA, 366 bp, Homo sapiens
gcggcctgggccccgggctgtgctgctgggtgtcagtgttctcctgcctcagcctcgcctgctcctacgtgggcagcctctacgtctggaagagcgaactgcccagggaccatcccgcggtcatcaagcgacgcttcaccagcgtcctggtggtgtccagtctctcacccctgtgcgtgctgctctggagggaactcacaggcatccaggtgcgaaggaggcggggcaaagggcaacggcggtgagagctcaggggtctttaggggaggaagcaaaactgatgccccctttcctgtggctcagccaggcacatccctgctcaccctgatgggcttcaggctggagggcattttcccagcggcgctg

SEQ ID NO: 21321 - protein, 80 aa, Homo sapiens
GLGPGLCCWVSVFSCLSLACSYVGSLYVWKSELPRDHPAVIKRRFTSVLVVSSLSPLCVLLWRELTGIQVRRRRGKGQRR

SEQ ID NO: 21322 - DNA, 1223 bp, Homo sapiens
tcatgggcagccgcgggccccctgaacttactgtcccctccgtagggaccatcccgcggtcatcaagcgacgcttcaccagcgtcctggtggtgtccagtctctcacccctgtgcgtgctgctctggagggaactcacaggcatccagccaggcacatccctgctcaccctgatgggcttcaggctggagggcattttcccagcggcgctgctgcccctgttgctgaccatgattcttttcctgggcccactgatgcagctctctatggattgcccttgtgacctggcagatgggctgaaggttgtcctggccccccgctcctgggcccgctgcctcacagacatgcgttggctgcggaaccaagtgatcgccccgctgacagaggagctggtgttccgggcctgtatgctgcccatgttagcaccgtgcatgggcctgggccctgctgtgttcacctgcccgctcttttttggagttgcccattttcaccatattattgagcagctgcgtttccgccagagcagcgtggggaacatcttcttgtctgctggacacctgattgggccggttctctgccattccttctgcaattacatgggtttcccagctgtttgcgcggccttggagcacccacagaggcggcccctgctggcaggctatgccctgggtgtgggactcttcctgcttctgctccagcccctcacggaccccaagctctacggcagccttcccctttgtgtgcttttggagcgggcaggggactcagaggctcccctgtgctcctgacctatgctcctggatacgctatgaactctcaccggctccccagccctccccaccaaggggtactgcaggggaagggctggctggggtccccgagatctcaggaatttttgtaggggattgaagccagagctagttgcgtcccagggaccaagagaaagaagcagatatccaaagggtgcagccccttttgaaaggggtgtttacgagcagctgtgagtgaggggacaaggggcaggtcccaggagccacacactcccttcctcactttggactgctgcttctcttagctcctctgcctctgaaaagctgctcggggttttttatttataaaacctctccccaccccccaccccccaacttcctgggttttctcattgtctttttgcatcagtactttgtattgggatattaaagagatttaacttgggtaacatgg

SEQ ID NO: 21323 - protein, 204 aa, Homo sapiens
MGFRLEGIFPAALLPLLLTMILFLGPLMQLSMDCPCDLADGLKVVLAPRSWARCLTDMRWLRNQVIAPLTEELVFRACMLPMLAPCMGLGPAVFTCPLFFGVAHFHHIIEQLRFRQSSVGNIFLSAGHLIGPVLCHSFCNYMGFPAVCAALEHPQRRPLLAGYALGVGLFLLLLQPLTDPKLYGSLPLCVLLERAGDSEAPLCS

SEQ ID NO: 21324 - DNA, 526 bp, Homo sapiens
cggttctctgccattccttctgcaattacatgggtttcccagctgtttgcgcggccttggagcacccacagaggcggcccctgctggcaggctatgccctgggtgtgggactcttcctgcttctgctccagcccctcacggaccccaagctctacggcagccttcccctttgtgtgcttttggagcgggcaggggactcagaggctcccctgtgctcctgacctatgctcctggatacgctatgaactctcaccggctccccagccctccccaccaaggggtactgcaggggaagggctggctggggtccccgagatctcaggaatttttgtaggggattgaagccagagctagttgcgtcccagggaccaagagaaagaagcagatatccaaaggctgctcggggttttttatttataaaacctctccccaccccccaccccccaacttcctgggttttctcattgtctttttgcatcagtactttgtattgggatattaaagagatttaacttgggtaacatgg

SEQ ID NO: 21325 - protein, 82 aa, Homo sapiens
MPWVWDSSCFCSSPSRTPSSTAAFPFVCFWSGQGTQRLPCAPDLCSWIRYELSPAPQPSPPRGTAGEGLAGVPEISGIFVGD

SEQ ID NO: 21326 - DNA, 4334 bp, Homo sapiens
agttctggaaagtcattgacaggggattaacctagaacatcaattataaacaggcagcaggcctcaggcccagacttgggtgttacaggaacagtgtggcctctctggaactctgcagaccaactgccgtgatgctgaagttccgaacagtccatgggggcctgaggctcctgggaatccgccgaacctccaccgcccccgctgcctccccaaatgtccggcgcctggagtataagcccatcaagaaagtcatggtggccaacagaggtgagattgccatccgtgtgttccgggcctgcacggagctgggcatccgcaccgtagccatctactctgagcaggacacgggccagatgcaccggcagaaagcagatgaagcctatctcatcggccgcggcctggcccccgtgcaggcctacctgcacatcccagacatcatcaaggtggccaaggagaacaacgtagatgcagtgcaccctggctacgggttcctctctgagcgagcggacttcgcccaggcctgccaggatgcaggggtccggtttattgggccaagcccagaagtggtccgcaagatgggagacaaggtggaggcccgggccatcgccattgctgcgggtgttcccgttgtccctggcacagatgcccccatcacgtccctgcatgaggcccacgagttctccaacacctacggcttccccatcatcttcaaggcggcctatgggggtggagggcgtggcatgagggtggtgcacagctacgaggagctggaggagaattacacccgggcctactcagaggctctggccgcctttgggaatggggcgctgtttgtggagaagttcatcgagaagccacggcacatcgaggtgcagatcttgggggaccagtatgggaacatcctgcacctgtacgagcgagactgctccatccagcggcggcaccagaaggtggtcgagattgcccccgccgcccacctggacccgcagcttcggactcggctcaccagcgactctgtgaaactcgctaaacaggtgggctacgagaacgcaggcaccgtggagttcctggtggacaggcacggcaagcactacttcatcgaggtcaactcccgcctgcaggtggagcacacggtcacagaggagatcaccgacgtagacctggtccatgctcagatccacgtggctgagggcaggagcctacccgacctgggcctgcggcaggagaacatccgcatcaacgggtgtgccatccagtgccgggtcaccaccgaggaccccgcgcgcagcttccagccggacaccggccgcattgaggtgttccggagcggagagggcatgggcatccgcctggataatgcttccgccttccaaggagccgtcatctcgccccactacgactccctgctggtcaaagtcattgcccacggcaaagaccaccccacggccgccaccaagatgagcagggcccttgcggagttccgcgtccgaggtgtgaagaccaacatcgccttcctgcagaatgtgctcaacaaccagcagttcctggcaggcactgtggacacccagttcatcgacgagaacccagagctgttccagctgcggcctgcacagaaccgggcccaaaagctgttgcactacctcggccatgtcatggtaaacggtccaaccaccccgattcccgtcaaggccagccccagccccacggaccccgttgtccctgcagtgcccataggcccgcccccggctggtttcagagacatcctgctgcgagaggggcctgagggctttgctcgagctgtgcggaaccacccggggctgctgctgatggacacgaccttcagggacgcccaccagtcactgctggccactcgtgtgcgcacccacgatctcaaaaagatcgccccctatgttgcccacaacttcagcaagctcttcagcatggagaactggggaggagccacgtttgacgtcgccatgcgcttcctgtatgagtgcccctggcggcggctgcaggagctccgggagctcatccccaacatccctttccagatgctgctgcggggggccaatgctgtgggctacaccaactacccagacaacgtggtcttcaagttctgtgaagtggccaaagagaatggcatggatgtcttccgtgtgtttgactccctcaactacttgcccaacatgctgctgggcatggaggcggcaggaagtgccggaggcgtggtggaggctgccatctcatacacgggcgacgtggccgaccccagccgcaccaagtactcactgcagtactacatgggcttggccgaagagctggtgcgagctggcacccacatcctgtgcatcaaggacatggccgggctgctgaagcccacggcctgcaccatgctggtcagctccctccgggaccgcttccccgacctcccactgcacatccacacccacgacacgtcaggggcaggcgtggcagccatgctggcctgtgcccaggctggagctgatgtggtggatgtggcagctgattccatgtctgggatgacttcacagcccagcatgggggccctggtggcctgtaccagagggactcccctggacacagaggtgcccatggagcgcgtgtttgactacagtgagtactgggagggggctcggggactgtacgcggccttcgactgcacggccaccatgaagtctggcaactcggacgtgtatgaaaatgagatcccagggggccagtacaccaacctgcacttccaggcccacagcatggggcttggctccaagttcaaggaggtcaagaaggcctatgtggaggccaaccagatgctgggcgatctcatcaaggtgacgccctcctccaagatcgtgggggacctggcccagtttatggtgcagaatggattgagccgggcagaggccgaagctcaggcggaagagctgtcctttccccgctccgtggtggagttcctgcagggctacatcggtgtcccccatggggggttccccgaaccctttcgctctaaggtactgaaggacctgccaagggtggaggggcggcctggagcctccctccctcccctggatctgcaggcactggagaaggagctggtagaccggcatggggaggaggtgacgccggaagatgtgctctcagcagctatgtaccccgatgtgtttgcccacttcaaggacttcactgccacctttggccccctggatagcctgaatactcgcctcttcctgcagggacccaagatcgcagaggagtttgaggtggagctggagcggggcaagacgctgcacatcaaagccctggccgtgagcgacctgaaccgggccggccagaggcaggtcttctttgagctcaatgggcagctgcggtccatcttggtcaaggacacccaggccatgaaggagatgcacttccaccccaaggccctaaaggacgtgaagggccagatcggggcgcccatgcctgggaaggtgatagacatcaaagtggtggcaggggccaaggtggccaagggccagcccctgtgtgtgctcagtgccatgaagatggagactgtggtgacctcacccatggagggtactgtccgcaaggttcatgtgaccaaggacatgacactggaaggtgacgacctcatcctggagatcgagtgatcttgccccagaccggcagcctggccatccccaagccttcaacagaagctgtgctgccacggcaggcccaggccagccagtgcccgaggccaggaaggccgggccgtggaggtcctgtccacagctggacaggagagacaccgcctgcggtggttcattcctttcagccatcgtcctttcctccggcggacagctgcttacatgttcatctcttgccaaataagggtcccctcctcactggagactacaagtggtgggtcaggtggtcctaggacccaggggaggtttaggggtcctatctcctgggggaaggggagatctaagatgtcccaggtcctgggaagtttactcaataaagctggctttcccctgccctccatgctggatcctgtgcagcccccagcctgcaccactcagcagtggggggctgcctttcaagctccccatgggtgggcaggtcagttgtgtcgttctcctcagagggtagtgagaatgaccatcgtggccctgttttaagtcactattgggtgcctactgtgtatactccccaaacaggactagtagtactgaacttgcttgaggggtggggcctgttctaagtatttaacacctattaacacagggaattaaccttcatcctcttatggacacagaaatcaagtcaca

SEQ ID NO: 21327 - protein, 1178 aa, Homo sapiens; identical to SEQ ID NO: 2741

SEQ ID NO: 21328 - DNA, 4581 bp, Homo sapiens
cgaggactggcgacggcgaggagatggagaaactgactaaagcgcctcgcgcgaggtccctgagggttcgaacccaagtctgtcaggatcgggagcccaagttgtccccatcgtactggatgtggctcagctctgcaggaagccgcggcgtctgccttctagtctcacctgtggacactttgccaaaggagtcgggcctgacggtggaagatgggaaatggccaaaagaataaaccatttcctcttacttaccgaatgaaaagcttgcttcatcttggcgttcaagactctctaatatgattccacctgttgggctctttcttccatttgcctccgcagatagtgtctgccttctggagagctgaccaaacactaaggatgctgaagttccgaacagtccatgggggcctgaggctcctgggaatccgccgaacctccaccgcccccgctgcctccccaaatgtccggcgcctggagtataagcccatcaagaaagtcatggtggccaacagaggtgagattgccatccgtgtgttccgggcctgcacggagctgggcatccgcaccgtagccatctactctgagcaggacacgggccagatgcaccggcagaaagcagatgaagcctatctcatcggccgcggcctggcccccgtgcaggcctacctgcacatcccagacatcatcaaggtggccaaggagaacaacgtagatgcagtgcaccctggctacgggttcctctctgagcgagcggacttcgcccaggcctgccaggatgcaggggtccggtttattgggccaagcccagaagtggtccgcaagatgggagacaaggtggaggcccgggccatcgccattgctgcgggtgttcccgttgtccctggcacagatgcccccatcacgtccctgcatgaggcccacgagttctccaacacctacggcttccccatcatcttcaaggcggcctatgggggtggagggcgtggcatgagggtggtgcacagctacgaggagctggaggagaattacacccgggcctactcagaggctctggccgcctttgggaatggggcgctgtttgtggagaagttcatcgagaagccacggcacatcgaggtgcagatcttgggggaccagtatgggaacatcctgcacctgtacgagcgagactgctccatccagcggcggcaccagaaggtggtcgagattgcccccgccgcccacctggacccgcagcttcggactcggctcaccagcgactctgtgaaactcgctaaacaggtgggctacgagaacgcaggcaccgtggagttcctggtggacaggcacggcaagcactacttcatcgaggtcaactcccgcctgcaggtggagcacacggtcacagaggagatcaccgacgtagacctggtccatgctcagatccacgtggctgagggcaggagcctacccgacctgggcctgcggcaggagaacatccgcatcaacgggtgtgccatccagtgccgggtcaccaccgaggaccccgcgcgcagcttccagccggacaccggccgcattgaggtgttccggagcggagagggcatgggcatccgcctggataatgcttccgccttccaaggagccgtcatctcgccccactacgactccctgctggtcaaagtcattgcccacggcaaagaccaccccacggccgccaccaagatgagcagggcccttgcggagttccgcgtccgaggtgtgaagaccaacatcgccttcctgcagaatgtgctcaacaaccagcagttcctggcaggcactgtggacacccagttcatcgacgagaacccagagctgttccagctgcggcctgcacagaaccgggcccaaaagctgttgcactacctcggccatgtcatggtaaacggtccaaccaccccgattcccgtcaaggccagccccagccccacggaccccgttgtccctgcagtgcccataggcccgcccccggctggtttcagagacatcctgctgcgagaggggcctgagggctttgctcgagctgtgcggaaccacccggggctgctgctgatggacacgaccttcagggacgcccaccagtcactgctggccactcgtgtgcgcacccacgatctcaaaaagatcgccccctatgttgcccacaacttcagcaagctcttcagcatggagaactggggaggagccacgtttgacgtcgccatgcgcttcctgtatgagtgcccctggcggcggctgcaggagctccgggagctcatccccaacatccctttccagatgctgctgcggggggccaatgctgtgggctacaccaactacccagacaacgtggtcttcaagttctgtgaagtggccaaagagaatggcatggatgtcttccgtgtgtttgactccctcaactacttgcccaacatgctgctgggcatggaggcggcaggaagtgccggaggcgtggtggaggctgccatctcatacacgggcgacgtggccgaccccagccgcaccaagtactcactgcagtactacatgggcttggccgaagagctggtgcgagctggcacccacatcctgtgcatcaaggacatggccgggctgctgaagcccacggcctgcaccatgctggtcagctccctccgggaccgcttccccgacctcccactgcacatccacacccacgacacgtcaggggcaggcgtggcagccatgctggcctgtgcccaggctggagctgatgtggtggatgtggcagctgattccatgtctgggatgacttcacagcccagcatgggggccctggtggcctgtaccagagggactcccctggacacagaggtgcccatggagcgcgtgtttgactacagtgagtactgggagggggctcggggactgtacgcggccttcgactgcacggccaccatgaagtctggcaactcggacgtgtatgaaaatgagatcccagggggccagtacaccaacctgcacttccaggcccacagcatggggcttggctccaagttcaaggaggtcaagaaggcctatgtggaggccaaccagatgctgggcgatctcatcaaggtgacgccctcctccaagatcgtgggggacctggcccagtttatggtgcagaatggattgagccgggcagaggccgaagctcaggcggaagagctgtcctttccccgctccgtggtggagttcctgcagggctacatcggtgtcccccatggggggttccccgaaccctttcgctctaaggtactgaaggacctgccaagggtggaggggcggcctggagcctccctccctcccctggatctgcaggcactggagaaggagctggtagaccggcatggggaggaggtgacgccggaagatgtgctctcagcagctatgtaccccgatgtgtttgcccacttcaaggacttcactgccacctttggccccctggatagcctgaatactcgcctcttcctgcagggacccaagatcgcagaggagtttgaggtggagctggagcggggcaagacgctgcacatcaaagccctggccgtgagcgacctgaaccgggccggccagaggcaggtcttctttgagctcaatgggcagctgcggtccatcttggtcaaggacacccaggccatgaaggagatgcacttccaccccaaggccctaaaggacgtgaagggccagatcggggcgcccatgcctgggaaggtgatagacatcaaagtggtggcaggggccaaggtggccaagggccagcccctgtgtgtgctcagtgccatgaagatggagactgtggtgacctcacccatggagggtactgtccgcaaggttcatgtgaccaaggacatgacactggaaggtgacgacctcatcctggagatcgagtgatcttgccccagaccggcagcctggccatccccaagccttcaacagaagctgtgctgccacggcaggcccaggccagccagtgcccgaggccaggaaggccgggccgtggaggtcctgtccacagctggacaggagagacaccgcctgcggtggttcattcctttcagccatcgtcctttcctccggcggacagctgcttacatgttcatctcttgccaaataagggtcccctcctcactggagactacaagtggtgggtcaggtggtcctaggacccaggggaggtttaggggtcctatctcctgggggaaggggagatctaagatgtcccaggtcctgggaagtttactcaataaagctggctttcccctgccctccatgctggatcctgtgcagcccccagcctgcaccactcagcagtggggggctgcctttcaagctccccatgggtgggcaggtcagttgtgtcgttctcctcagagggtagtgagaatgaccatcgtggccctgttttaagtcactattgggtgcctactgtgtatactccccaaacaggactagtagtactgaacttgcttgaggggtggggcctgttctaagtatttaacacctattaacacagggaattaaccttcatcctcttatggacacagaaatcaagtcaca

SEQ ID NO: 21329 - protein, 1178 aa, Homo sapiens; identical to SEQ ID NO: 2741

SEQ ID NO: 21330 - DNA, 4492 bp, Homo sapiens
gttctctgtcagtggaggcagcagcggtagaggcggcggcgaggactggcgacggcgaggagctgccttctagtctcacctgtggacactttgccaaaggagtcgggcctgacggtggaagatgggaaatggccaaaagaataaaccatttcctcttacttaccgaatgaaaagcttgcttcatcttggcgttcaagactctctaatatgattccacctgttgggctctttcttccatttgcctccgcagatagtgtctgccttctggagagctgaccaaacactaaggatgctgaagttccgaacagtccatgggggcctgaggctcctgggaatccgccgaacctccaccgcccccgctgcctccccaaatgtccggcgcctggagtataagcccatcaagaaagtcatggtggccaacagaggtgagattgccatccgtgtgttccgggcctgcacggagctgggcatccgcaccgtagccatctactctgagcaggacacgggccagatgcaccggcagaaagcagatgaagcctatctcatcggccgcggcctggcccccgtgcaggcctacctgcacatcccagacatcatcaaggtggccaaggagaacaacgtagatgcagtgcaccctggctacgggttcctctctgagcgagcggacttcgcccaggcctgccaggatgcaggggtccggtttattgggccaagcccagaagtggtccgcaagatgggagacaaggtggaggcccgggccatcgccattgctgcgggtgttcccgttgtccctggcacagatgcccccatcacgtccctgcatgaggcccacgagttctccaacacctacggcttccccatcatcttcaaggcggcctatgggggtggagggcgtggcatgagggtggtgcacagctacgaggagctggaggagaattacacccgggcctactcagaggctctggccgcctttgggaatggggcgctgtttgtggagaagttcatcgagaagccacggcacatcgaggtgcagatcttgggggaccagtatgggaacatcctgcacctgtacgagcgagactgctccatccagcggcggcaccagaaggtggtcgagattgcccccgccgcccacctggacccgcagcttcggactcggctcaccagcgactctgtgaaactcgctaaacaggtgggctacgagaacgcaggcaccgtggagttcctggtggacaggcacggcaagcactacttcatcgaggtcaactcccgcctgcaggtggagcacacggtcacagaggagatcaccgacgtagacctggtccatgctcagatccacgtggctgagggcaggagcctacccgacctgggcctgcggcaggagaacatccgcatcaacgggtgtgccatccagtgccgggtcaccaccgaggaccccgcgcgcagcttccagccggacaccggccgcattgaggtgttccggagcggagagggcatgggcatccgcctggataatgcttccgccttccaaggagccgtcatctcgccccactacgactccctgctggtcaaagtcattgcccacggcaaagaccaccccacggccgccaccaagatgagcagggcccttgcggagttccgcgtccgaggtgtgaagaccaacatcgccttcctgcagaatgtgctcaacaaccagcagttcctggcaggcactgtggacacccagttcatcgacgagaacccagagctgttccagctgcggcctgcacagaaccgggcccaaaagctgttgcactacctcggccatgtcatggtaaacggtccaaccaccccgattcccgtcaaggccagccccagccccacggaccccgttgtccctgcagtgcccataggcccgcccccggctggtttcagagacatcctgctgcgagaggggcctgagggctttgctcgagctgtgcggaaccacccggggctgctgctgatggacacgaccttcagggacgcccaccagtcactgctggccactcgtgtgcgcacccacgatctcaaaaagatcgccccctatgttgcccacaacttcagcaagctcttcagcatggagaactggggaggagccacgtttgacgtcgccatgcgcttcctgtatgagtgcccctggcggcggctgcaggagctccgggagctcatccccaacatccctttccagatgctgctgcggggggccaatgctgtgggctacaccaactacccagacaacgtggtcttcaagttctgtgaagtggccaaagagaatggcatggatgtcttccgtgtgtttgactccctcaactacttgcccaacatgctgctgggcatggaggcggcaggaagtgccggaggcgtggtggaggctgccatctcatacacgggcgacgtggccgaccccagccgcaccaagtactcactgcagtactacatgggcttggccgaagagctggtgcgagctggcacccacatcctgtgcatcaaggacatggccgggctgctgaagcccacggcctgcaccatgctggtcagctccctccgggaccgcttccccgacctcccactgcacatccacacccacgacacgtcaggggcaggcgtggcagccatgctggcctgtgcccaggctggagctgatgtggtggatgtggcagctgattccatgtctgggatgacttcacagcccagcatgggggccctggtggcctgtaccagagggactcccctggacacagaggtgcccatggagcgcgtgtttgactacagtgagtactgggagggggctcggggactgtacgcggccttcgactgcacggccaccatgaagtctggcaactcggacgtgtatgaaaatgagatcccagggggccagtacaccaacctgcacttccaggcccacagcatggggcttggctccaagttcaaggaggtcaagaaggcctatgtggaggccaaccagatgctgggcgatctcatcaaggtgacgccctcctccaagatcgtgggggacctggcccagtttatggtgcagaatggattgagccgggcagaggccgaagctcaggcggaagagctgtcctttccccgctccgtggtggagttcctgcagggctacatcggtgtcccccatggggggttccccgaaccctttcgctctaaggtactgaaggacctgccaagggtggaggggcggcctggagcctccctccctcccctggatctgcaggcactggagaaggagctggtagaccggcatggggaggaggtgacgccggaagatgtgctctcagcagctatgtaccccgatgtgtttgcccacttcaaggacttcactgccacctttggccccctggatagcctgaatactcgcctcttcctgcagggacccaagatcgcagaggagtttgaggtggagctggagcggggcaagacgctgcacatcaaagccctggccgtgagcgacctgaaccgggccggccagaggcaggtcttctttgagctcaatgggcagctgcggtccatcttggtcaaggacacccaggccatgaaggagatgcacttccaccccaaggccctaaaggacgtgaagggccagatcggggcgcccatgcctgggaaggtgatagacatcaaagtggtggcaggggccaaggtggccaagggccagcccctgtgtgtgctcagtgccatgaagatggagactgtggtgacctcacccatggagggtactgtccgcaaggttcatgtgaccaaggacatgacactggaaggtgacgacctcatcctggagatcgagtgatcttgccccagaccggcagcctggccatccccaagccttcaacagaagctgtgctgccacggcaggcccaggccagccagtgcccgaggccaggaaggccgggccgtggaggtcctgtccacagctggacaggagagacaccgcctgcggtggttcattcctttcagccatcgtcctttcctccggcggacagctgcttacatgttcatctcttgccaaataagggtcccctcctcactggagactacaagtggtgggtcaggtggtcctaggacccaggggaggtttaggggtcctatctcctgggggaaggggagatctaagatgtcccaggtcctgggaagtttactcaataaagctggctttcccctgccctccatgctggatcctgtgcagcccccagcctgcaccactcagcagtggggggctgcctttcaagctccccatgggtgggcaggtcagttgtgtcgttctcctcagagggtagtgagaatgaccatcgtggccctgttttaagtcactattgggtgcctactgtgtatactccccaaacaggactagtagtactgaacttgcttgaggggtggggcctgttctaagtatttaacacctattaacacagggaattaaccttcatcctcttatggacacagaaatcaagtcaca

SEQ ID NO: 21331 - protein, 1178 aa, Homo sapiens; identical to SEQ ID NO: 2741

SEQ ID NO: 21332 - DNA, 4045 bp, Homo sapiens
agttctggaaagtcattgacaggggattaacctagaacatcaattataaacaggcagcaggcctcaggcccagacttgggtgttacaggaacagtgtggcctctctggaactctgcagaccaactgccgtgatgctgaagttccgaacagtccatgggggcctgaggctcctgggaatccgccgaacctccaccgcccccgctgcctccccaaatgtccggcgcctggagtataagcccatcaagaaagtcatggtggccaacagaggtgagattgccatccgtgtgttccgggcctgcacggagctgggcatccgcaccgtagccatctactctgagcaggacacgggccagatgcaccggcagaaagcagatgaagcctatctcatcggccgcggcctggcccccgtgcaggcctacctgcacatcccagacatcatcaaggtggccaaggagaacaacgtagatgcagtgcaccctggctacgggttcctctctgagcgagcggacttcgcccaggcctgccaggatgcaggggtccggtttattgggccaagcccagaagtggtccgcaagatgggagacaaggtggaggcccgggccatcgccattgctgcgggtgttcccgttgtccctggcacagatgcccccatcacgtccctgcatgaggcccacgagttctccaacacctacggcttccccatcatcttcaaggcggcctatgggggtggagggcgtggcatgagggtggtgcacagctacgaggagctggaggagaattacacccgggcctactcagaggctctggccgcctttgggaatggggcgctgtttgtggagaagttcatcgagaagccacggcacatcgaggtgcagatcttgggggaccagtatgggaacatcctgcacctgtacgagcgagactgctccatccagcggcggcaccagaaggtggtcgagattgcccccgccgcccacctggacccgcagcttcggactcggctcaccagcgactctgtgaaactcgctaaacaggtgggctacgagaacgcaggcaccgtggagttcctggtggacaggcacggcaagcactacttcatcgaggtcaactcccgcctgcaggtggagcacacggtcacagaggagatcaccgacgtagacctggtccatgctcagatccacgtggctgagggcaggagcctacccgacctgggcctgcggcaggagaacatccgcatcaacgggtgtgccatccagtgccgggtcaccaccgaggaccccgcgcgcagcttccagccggacaccggccgcattgaggtgttccggagcggagagggcatgggcatccgcctggataatgcttccgccttccaaggagccgtcatctcgccccactacgactccctgctggtcaaagtcattgcccacggcaaagaccaccccacggccgccaccaagatgagcagggcccttgcggagttccgcgtccgaggtgtgaagaccaacatcgccttcctgcagaatgtgctcaacaaccagcagttcctggcaggcactgtggacacccagttcatcgacgagaacccagagctgttccagctgcggcctgcacagaaccgggcccaaaagctgttgcactacctcggccatgtcatggtaaacggtccaaccaccccgattcccgtcaaggccagccccagccccacggaccccgttgtccctgcagtgcccataggcccgcccccggctggtttcagagacatcctgctgcgagaggggcctgagggctttgctcgagctgtgcggaaccacccggggctgctgctgatggacacgaccttcagggacgcccaccagtcactgctggccactcgtgtgcgcacccacgatctcaaaaagatcgccccctatgttgcccacaacttcagcaagctcttcagcatggagaactggggaggagccacgtttgacgtcgccatgcgcttcctgtatgagtgcccctggcggcggctgcaggagctccgggagctcatccccaacatccctttccagatgctgctgcggggggccaatgctgtgggctacaccaactacccagacaacgtggtcttcaagttctgtgaagtggccaaagagaatggcatggatgtcttccgtgtgtttgactccctcaactacttgcccaacatgctgctgggcatggaggcggcaggaagtgccggaggcgtggtggaggctgccatctcatacacgggcgacgtggccgaccccagccgcaccaagtactcactgcagtactacatgggcttggccgaagagctggtgcgagctggcacccacatcctgtgcatcaaggacatggccgggctgctgaagcccacggcctgcaccatgctggtcagctccctccgggaccgcttccccgacctcccactgcacatccacacccacgacacgtcaggggcaggcgtggcagccatgctggcctgtgcccaggctggagctgatgtggtggatgtggcagctgattccatgtctgggatgacttcacagcccagcatgggggccctggtggcctgtaccagagggactcccctggacacagaggtgcccatggagcgcgtgtttgactacagtgagtactgggagggggctcggggactgtacgcggccttcgactgcacggccaccatgaagtctggcaactcggacgtgtatgaaaatgagatcccagggggccagtacaccaacctgcacttccaggcccacagcatggggcttggctccaagttcaaggaggtcaagaaggcctatgtggaggccaaccagatgctgggcgatctcatcaaggtgacgccctcctccaagatcgtgggggacctggcccagtttatggtgcagaatggattgagccgggcagaggccgaagctcaggcggaagagctgtcctttccccgctccgtggtggagttcctgcagggctacatcggtgtcccccatggggggttccccgaaccctttcgctctaaggtactgaaggacctgccaagggtggaggggcggcctggagcctccctccctcccctggatctgcaggcactggagaaggagctggtagaccggcatggggaggaggtgacgccggaagatgtgctctcagcagctatgtaccccgatgtgtttgcccacttcaaggacttcactgccacctttggccccctggatagcctgaatactcgcctcttcctgcagggacccaagatcgcagaggagtttgaggtggagctggagcggggcaagacgctgcacatcaaagccctggccgtgagcgacctgaaccgggccggccagaggcaggtcttctttgagctcaatgggcagctgcggtccatcttggtcaaggacacccaggccatgaaggagatgcacttccaccccaaggccctaaaggacgtgaagggccagatcggggcgcccatgcctgggaaggtgatagacatcaaagtggtggcaggggccaaggtggccaagggccagcccctgtgtgtgctcagtgccatgaagatggagactgtggtgacctcacccatggagggtactgtccgcaaggttcatgtgaccaaggacatgacactggaaggtgacgacctcatcctggagatcgagtgatcttgccccagaccggcagcctggccatccccaagccttcaacagaagctgtgctgccacggcaggcccaggccagccagtgcccgaggccaggaaggccgggccgtggaggtcctgtccacagctggacaggagagacaccgcctgcggtggttcattcctttcagccatcgtcctttcctccggcggacagctgcttacatgttcatctcttgccaaataagggtcccctcctcactggagactacaagtggtgggtcaggtggtcctaggacccaggggaggtttaggggtcctatctcctgggggaaggggagatctaagatgtcccaggtcctgggaagtttactcaataaagctggctttcccctgccctc

SEQ ID NO: 21333 - protein, 1178 aa, Homo sapiens; identical to SEQ ID NO: 2741

SEQ ID NO: 21334 - DNA, 4292 bp, Homo sapiens
cgaggactggcgacggcgaggagatggagaaactgactaaagcgcctcgcgcgaggtccctgagggttcgaacccaagtctgtcaggatcgggagcccaagttgtccccatcgtactggatgtggctcagctctgcaggaagccgcggcgtctgccttctagtctcacctgtggacactttgccaaaggagtcgggcctgacggtggaagatgggaaatggccaaaagaataaaccatttcctcttacttaccgaatgaaaagcttgcttcatcttggcgttcaagactctctaatatgattccacctgttgggctctttcttccatttgcctccgcagatagtgtctgccttctggagagctgaccaaacactaaggatgctgaagttccgaacagtccatgggggcctgaggctcctgggaatccgccgaacctccaccgcccccgctgcctccccaaatgtccggcgcctggagtataagcccatcaagaaagtcatggtggccaacagaggtgagattgccatccgtgtgttccgggcctgcacggagctgggcatccgcaccgtagccatctactctgagcaggacacgggccagatgcaccggcagaaagcagatgaagcctatctcatcggccgcggcctggcccccgtgcaggcctacctgcacatcccagacatcatcaaggtggccaaggagaacaacgtagatgcagtgcaccctggctacgggttcctctctgagcgagcggacttcgcccaggcctgccaggatgcaggggtccggtttattgggccaagcccagaagtggtccgcaagatgggagacaaggtggaggcccgggccatcgccattgctgcgggtgttcccgttgtccctggcacagatgcccccatcacgtccctgcatgaggcccacgagttctccaacacctacggcttccccatcatcttcaaggcggcctatgggggtggagggcgtggcatgagggtggtgcacagctacgaggagctggaggagaattacacccgggcctactcagaggctctggccgcctttgggaatggggcgctgtttgtggagaagttcatcgagaagccacggcacatcgaggtgcagatcttgggggaccagtatgggaacatcctgcacctgtacgagcgagactgctccatccagcggcggcaccagaaggtggtcgagattgcccccgccgcccacctggacccgcagcttcggactcggctcaccagcgactctgtgaaactcgctaaacaggtgggctacgagaacgcaggcaccgtggagttcctggtggacaggcacggcaagcactacttcatcgaggtcaactcccgcctgcaggtggagcacacggtcacagaggagatcaccgacgtagacctggtccatgctcagatccacgtggctgagggcaggagcctacccgacctgggcctgcggcaggagaacatccgcatcaacgggtgtgccatccagtgccgggtcaccaccgaggaccccgcgcgcagcttccagccggacaccggccgcattgaggtgttccggagcggagagggcatgggcatccgcctggataatgcttccgccttccaaggagccgtcatctcgccccactacgactccctgctggtcaaagtcattgcccacggcaaagaccaccccacggccgccaccaagatgagcagggcccttgcggagttccgcgtccgaggtgtgaagaccaacatcgccttcctgcagaatgtgctcaacaaccagcagttcctggcaggcactgtggacacccagttcatcgacgagaacccagagctgttccagctgcggcctgcacagaaccgggcccaaaagctgttgcactacctcggccatgtcatggtaaacggtccaaccaccccgattcccgtcaaggccagccccagccccacggaccccgttgtccctgcagtgcccataggcccgcccccggctggtttcagagacatcctgctgcgagaggggcctgagggctttgctcgagctgtgcggaaccacccggggctgctgctgatggacacgaccttcagggacgcccaccagtcactgctggccactcgtgtgcgcacccacgatctcaaaaagatcgccccctatgttgcccacaacttcagcaagctcttcagcatggagaactggggaggagccacgtttgacgtcgccatgcgcttcctgtatgagtgcccctggcggcggctgcaggagctccgggagctcatccccaacatccctttccagatgctgctgcggggggccaatgctgtgggctacaccaactacccagacaacgtggtcttcaagttctgtgaagtggccaaagagaatggcatggatgtcttccgtgtgtttgactccctcaactacttgcccaacatgctgctgggcatggaggcggcaggaagtgccggaggcgtggtggaggctgccatctcatacacgggcgacgtggccgaccccagccgcaccaagtactcactgcagtactacatgggcttggccgaagagctggtgcgagctggcacccacatcctgtgcatcaaggacatggccgggctgctgaagcccacggcctgcaccatgctggtcagctccctccgggaccgcttccccgacctcccactgcacatccacacccacgacacgtcaggggcaggcgtggcagccatgctggcctgtgcccaggctggagctgatgtggtggatgtggcagctgattccatgtctgggatgacttcacagcccagcatgggggccctggtggcctgtaccagagggactcccctggacacagaggtgcccatggagcgcgtgtttgactacagtgagtactgggagggggctcggggactgtacgcggccttcgactgcacggccaccatgaagtctggcaactcggacgtgtatgaaaatgagatcccagggggccagtacaccaacctgcacttccaggcccacagcatggggcttggctccaagttcaaggaggtcaagaaggcctatgtggaggccaaccagatgctgggcgatctcatcaaggtgacgccctcctccaagatcgtgggggacctggcccagtttatggtgcagaatggattgagccgggcagaggccgaagctcaggcggaagagctgtcctttccccgctccgtggtggagttcctgcagggctacatcggtgtcccccatggggggttccccgaaccctttcgctctaaggtactgaaggacctgccaagggtggaggggcggcctggagcctccctccctcccctggatctgcaggcactggagaaggagctggtagaccggcatggggaggaggtgacgccggaagatgtgctctcagcagctatgtaccccgatgtgtttgcccacttcaaggacttcactgccacctttggccccctggatagcctgaatactcgcctcttcctgcagggacccaagatcgcagaggagtttgaggtggagctggagcggggcaagacgctgcacatcaaagccctggccgtgagcgacctgaaccgggccggccagaggcaggtcttctttgagctcaatgggcagctgcggtccatcttggtcaaggacacccaggccatgaaggagatgcacttccaccccaaggccctaaaggacgtgaagggccagatcggggcgcccatgcctgggaaggtgatagacatcaaagtggtggcaggggccaaggtggccaagggccagcccctgtgtgtgctcagtgccatgaagatggagactgtggtgacctcacccatggagggtactgtccgcaaggttcatgtgaccaaggacatgacactggaaggtgacgacctcatcctggagatcgagtgatcttgccccagaccggcagcctggccatccccaagccttcaacagaagctgtgctgccacggcaggcccaggccagccagtgcccgaggccaggaaggccgggccgtggaggtcctgtccacagctggacaggagagacaccgcctgcggtggttcattcctttcagccatcgtcctttcctccggcggacagctgcttacatgttcatctcttgccaaataagggtcccctcctcactggagactacaagtggtgggtcaggtggtcctaggacccaggggaggtttaggggtcctatctcctgggggaaggggagatctaagatgtcccaggtcctgggaagtttactcaataaagctggctttcccctgccctc

SEQ ID NO: 21335 - protein, 1178 aa, Homo sapiens; identical to SEQ ID NO: 2741

SEQ ID NO: 21336 - DNA, 3999 bp, Homo sapiens
ggcagcagcggtagaggcggcggcgaggactggcgacggcgaggagatagtgtctgccttctggagagctgaccaaacactaaggatgctgaagttccgaacagtccatgggggcctgaggctcctgggaatccgccgaacctccaccgcccccgctgcctccccaaatgtccggcgcctggagtataagcccatcaagaaagtcatggtggccaacagaggtgagattgccatccgtgtgttccgggcctgcacggagctgggcatccgcaccgtagccatctactctgagcaggacacgggccagatgcaccggcagaaagcagatgaagcctatctcatcggccgcggcctggcccccgtgcaggcctacctgcacatcccagacatcatcaaggtggccaaggagaacaacgtagatgcagtgcaccctggctacgggttcctctctgagcgagcggacttcgcccaggcctgccaggatgcaggggtccggtttattgggccaagcccagaagtggtccgcaagatgggagacaaggtggaggcccgggccatcgccattgctgcgggtgttcccgttgtccctggcacagatgcccccatcacgtccctgcatgaggcccacgagttctccaacacctacggcttccccatcatcttcaaggcggcctatgggggtggagggcgtggcatgagggtggtgcacagctacgaggagctggaggagaattacacccgggcctactcagaggctctggccgcctttgggaatggggcgctgtttgtggagaagttcatcgagaagccacggcacatcgaggtgcagatcttgggggaccagtatgggaacatcctgcacctgtacgagcgagactgctccatccagcggcggcaccagaaggtggtcgagattgcccccgccgcccacctggacccgcagcttcggactcggctcaccagcgactctgtgaaactcgctaaacaggtgggctacgagaacgcaggcaccgtggagttcctggtggacaggcacggcaagcactacttcatcgaggtcaactcccgcctgcaggtggagcacacggtcacagaggagatcaccgacgtagacctggtccatgctcagatccacgtggctgagggcaggagcctacccgacctgggcctgcggcaggagaacatccgcatcaacgggtgtgccatccagtgccgggtcaccaccgaggaccccgcgcgcagcttccagccggacaccggccgcattgaggtgttccggagcggagagggcatgggcatccgcctggataatgcttccgccttccaaggagccgtcatctcgccccactacgactccctgctggtcaaagtcattgcccacggcaaagaccaccccacggccgccaccaagatgagcagggcccttgcggagttccgcgtccgaggtgtgaagaccaacatcgccttcctgcagaatgtgctcaacaaccagcagttcctggcaggcactgtggacacccagttcatcgacgagaacccagagctgttccagctgcggcctgcacagaaccgggcccaaaagctgttgcactacctcggccatgtcatggtaaacggtccaaccaccccgattcccgtcaaggccagccccagccccacggaccccgttgtccctgcagtgcccataggcccgcccccggctggtttcagagacatcctgctgcgagaggggcctgagggctttgctcgagctgtgcggaaccacccggggctgctgctgatggacacgaccttcagggacgcccaccagtcactgctggccactcgtgtgcgcacccacgatctcaaaaagatcgccccctatgttgcccacaacttcagcaagctcttcagcatggagaactggggaggagccacgtttgacgtcgccatgcgcttcctgtatgagtgcccctggcggcggctgcaggagctccgggagctcatccccaacatccctttccagatgctgctgcggggggccaatgctgtgggctacaccaactacccagacaacgtggtcttcaagttctgtgaagtggccaaagagaatggcatggatgtcttccgtgtgtttgactccctcaactacttgcccaacatgctgctgggcatggaggcggcaggaagtgccggaggcgtggtggaggctgccatctcatacacgggcgacgtggccgaccccagccgcaccaagtactcactgcagtactacatgggcttggccgaagagctggtgcgagctggcacccacatcctgtgcatcaaggacatggccgggctgctgaagcccacggcctgcaccatgctggtcagctccctccgggaccgcttccccgacctcccactgcacatccacacccacgacacgtcaggggcaggcgtggcagccatgctggcctgtgcccaggctggagctgatgtggtggatgtggcagctgattccatgtctgggatgacttcacagcccagcatgggggccctggtggcctgtaccagagggactcccctggacacagaggtgcccatggagcgcgtgtttgactacagtgagtactgggagggggctcggggactgtacgcggccttcgactgcacggccaccatgaagtctggcaactcggacgtgtatgaaaatgagatcccagggggccagtacaccaacctgcacttccaggcccacagcatggggcttggctccaagttcaaggaggtcaagaaggcctatgtggaggccaaccagatgctgggcgatctcatcaaggtgacgccctcctccaagatcgtgggggacctggcccagtttatggtgcagaatggattgagccgggcagaggccgaagctcaggcggaagagctgtcctttccccgctccgtggtggagttcctgcagggctacatcggtgtcccccatggggggttccccgaaccctttcgctctaaggtactgaaggacctgccaagggtggaggggcggcctggagcctccctccctcccctggatctgcaggcactggagaaggagctggtagaccggcatggggaggaggtgacgccggaagatgtgctctcagcagctatgtaccccgatgtgtttgcccacttcaaggacttcactgccacctttggccccctggatagcctgaatactcgcctcttcctgcagggacccaagatcgcagaggagtttgaggtggagctggagcggggcaagacgctgcacatcaaagccctggccgtgagcgacctgaaccgggccggccagaggcaggtcttctttgagctcaatgggcagctgcggtccatcttggtcaaggacacccaggccatgaaggagatgcacttccaccccaaggccctaaaggacgtgaagggccagatcggggcgcccatgcctgggaaggtgatagacatcaaagtggtggcaggggccaaggtggccaagggccagcccctgtgtgtgctcagtgccatgaagatggagactgtggtgacctcacccatggagggtactgtccgcaaggttcatgtgaccaaggacatgacactggaaggtgacgacctcatcctggagatcgagtgatcttgccccagaccggcagcctggccatccccaagccttcaacagaagctgtgctgccacggcaggcccaggccagccagtgcccgaggccaggaaggccgggccgtggaggtcctgtccacagctggacaggagagacaccgcctgcggtggttcattcctttcagccatcgtcctttcctccggcggacagctgcttacatgttcatctcttgccaaataagggtcccctcctcactggagactacaagtggtgggtcaggtggtcctaggacccaggggaggtttaggggtcctatctcctgggggaaggggagatctaagatgtcccaggtcctgggaagtttactcaataaagctggctttcccctgccctc

SEQ ID NO: 21337 - protein, 1178 aa, Homo sapiens; identical to SEQ ID NO: 2741

SEQ ID NO: 21338 - DNA, 4203 bp, Homo sapiens
gttctctgtcagtggaggcagcagcggtagaggcggcggcgaggactggcgacggcgaggagctgccttctagtctcacctgtggacactttgccaaaggagtcgggcctgacggtggaagatgggaaatggccaaaagaataaaccatttcctcttacttaccgaatgaaaagcttgcttcatcttggcgttcaagactctctaatatgattccacctgttgggctctttcttccatttgcctccgcagatagtgtctgccttctggagagctgaccaaacactaaggatgctgaagttccgaacagtccatgggggcctgaggctcctgggaatccgccgaacctccaccgcccccgctgcctccccaaatgtccggcgcctggagtataagcccatcaagaaagtcatggtggccaacagaggtgagattgccatccgtgtgttccgggcctgcacggagctgggcatccgcaccgtagccatctactctgagcaggacacgggccagatgcaccggcagaaagcagatgaagcctatctcatcggccgcggcctggcccccgtgcaggcctacctgcacatcccagacatcatcaaggtggccaaggagaacaacgtagatgcagtgcaccctggctacgggttcctctctgagcgagcggacttcgcccaggcctgccaggatgcaggggtccggtttattgggccaagcccagaagtggtccgcaagatgggagacaaggtggaggcccgggccatcgccattgctgcgggtgttcccgttgtccctggcacagatgcccccatcacgtccctgcatgaggcccacgagttctccaacacctacggcttccccatcatcttcaaggcggcctatgggggtggagggcgtggcatgagggtggtgcacagctacgaggagctggaggagaattacacccgggcctactcagaggctctggccgcctttgggaatggggcgctgtttgtggagaagttcatcgagaagccacggcacatcgaggtgcagatcttgggggaccagtatgggaacatcctgcacctgtacgagcgagactgctccatccagcggcggcaccagaaggtggtcgagattgcccccgccgcccacctggacccgcagcttcggactcggctcaccagcgactctgtgaaactcgctaaacaggtgggctacgagaacgcaggcaccgtggagttcctggtggacaggcacggcaagcactacttcatcgaggtcaactcccgcctgcaggtggagcacacggtcacagaggagatcaccgacgtagacctggtccatgctcagatccacgtggctgagggcaggagcctacccgacctgggcctgcggcaggagaacatccgcatcaacgggtgtgccatccagtgccgggtcaccaccgaggaccccgcgcgcagcttccagccggacaccggccgcattgaggtgttccggagcggagagggcatgggcatccgcctggataatgcttccgccttccaaggagccgtcatctcgccccactacgactccctgctggtcaaagtcattgcccacggcaaagaccaccccacggccgccaccaagatgagcagggcccttgcggagttccgcgtccgaggtgtgaagaccaacatcgccttcctgcagaatgtgctcaacaaccagcagttcctggcaggcactgtggacacccagttcatcgacgagaacccagagctgttccagctgcggcctgcacagaaccgggcccaaaagctgttgcactacctcggccatgtcatggtaaacggtccaaccaccccgattcccgtcaaggccagccccagccccacggaccccgttgtccctgcagtgcccataggcccgcccccggctggtttcagagacatcctgctgcgagaggggcctgagggctttgctcgagctgtgcggaaccacccggggctgctgctgatggacacgaccttcagggacgcccaccagtcactgctggccactcgtgtgcgcacccacgatctcaaaaagatcgccccctatgttgcccacaacttcagcaagctcttcagcatggagaactggggaggagccacgtttgacgtcgccatgcgcttcctgtatgagtgcccctggcggcggctgcaggagctccgggagctcatccccaacatccctttccagatgctgctgcggggggccaatgctgtgggctacaccaactacccagacaacgtggtcttcaagttctgtgaagtggccaaagagaatggcatggatgtcttccgtgtgtttgactccctcaactacttgcccaacatgctgctgggcatggaggcggcaggaagtgccggaggcgtggtggaggctgccatctcatacacgggcgacgtggccgaccccagccgcaccaagtactcactgcagtactacatgggcttggccgaagagctggtgcgagctggcacccacatcctgtgcatcaaggacatggccgggctgctgaagcccacggcctgcaccatgctggtcagctccctccgggaccgcttccccgacctcccactgcacatccacacccacgacacgtcaggggcaggcgtggcagccatgctggcctgtgcccaggctggagctgatgtggtggatgtggcagctgattccatgtctgggatgacttcacagcccagcatgggggccctggtggcctgtaccagagggactcccctggacacagaggtgcccatggagcgcgtgtttgactacagtgagtactgggagggggctcggggactgtacgcggccttcgactgcacggccaccatgaagtctggcaactcggacgtgtatgaaaatgagatcccagggggccagtacaccaacctgcacttccaggcccacagcatggggcttggctccaagttcaaggaggtcaagaaggcctatgtggaggccaaccagatgctgggcgatctcatcaaggtgacgccctcctccaagatcgtgggggacctggcccagtttatggtgcagaatggattgagccgggcagaggccgaagctcaggcggaagagctgtcctttccccgctccgtggtggagttcctgcagggctacatcggtgtcccccatggggggttccccgaaccctttcgctctaaggtactgaaggacctgccaagggtggaggggcggcctggagcctccctccctcccctggatctgcaggcactggagaaggagctggtagaccggcatggggaggaggtgacgccggaagatgtgctctcagcagctatgtaccccgatgtgtttgcccacttcaaggacttcactgccacctttggccccctggatagcctgaatactcgcctcttcctgcagggacccaagatcgcagaggagtttgaggtggagctggagcggggcaagacgctgcacatcaaagccctggccgtgagcgacctgaaccgggccggccagaggcaggtcttctttgagctcaatgggcagctgcggtccatcttggtcaaggacacccaggccatgaaggagatgcacttccaccccaaggccctaaaggacgtgaagggccagatcggggcgcccatgcctgggaaggtgatagacatcaaagtggtggcaggggccaaggtggccaagggccagcccctgtgtgtgctcagtgccatgaagatggagactgtggtgacctcacccatggagggtactgtccgcaaggttcatgtgaccaaggacatgacactggaaggtgacgacctcatcctggagatcgagtgatcttgccccagaccggcagcctggccatccccaagccttcaacagaagctgtgctgccacggcaggcccaggccagccagtgcccgaggccaggaaggccgggccgtggaggtcctgtccacagctggacaggagagacaccgcctgcggtggttcattcctttcagccatcgtcctttcctccggcggacagctgcttacatgttcatctcttgccaaataagggtcccctcctcactggagactacaagtggtgggtcaggtggtcctaggacccaggggaggtttaggggtcctatctcctgggggaaggggagatctaagatgtcccaggtcctgggaagtttactcaataaagctggctttcccctgccctc

SEQ ID NO: 21339 - protein, 1178 aa, Homo sapiens; identical to SEQ ID NO: 2741

SEQ ID NO: 21340 - DNA, 274 bp, Homo sapiens
gggacgtgtgggtgtgtgggcatgtgtgggtgtgttggggagggtgcccagcgacatgtgacaaagacgcccgtctccgggagatggtgaaggggcccgcgagcaggcgctttgtctggctgtctgcagagtgaggttcgcgccgcggcggcgggcgcccgtgcggtgcaggatgccggggcgccaggatggccgggggcgcgcgcgcctgtgccaggggcgctcaccatggccccgccgctcctgctgctgctgctggccagtggagcggccg

SEQ ID NO: 21341 - protein, 33 aa, Homo sapiens
MPGRQDGRGRARLCQGRSPWPRRSCCCCWPVER

SEQ ID NO: 21342 - DNA, 1539 bp, Homo sapiens
aaggtgccgggaaccgagcgagccggggccgcgggcccgagcgccatgggcccgagggtgggcggcgggcggccggtcatccccgggcctcgtccccgcgggagagcggccaggagtcggcgggggccggccgggctcgcagggaggccggcccgcgccccctgagcgacggacaccagggcgctcaccatggccccgccgctcctgctgctgctgctggccagtggagcggccgcctgcccgctgccctgcgtctgccagaacctgtccgagtcgctcagcaccctctgtgcccaccgaggcctgctgtttgtgccgcccaacgtggaccggcgcacagtggagctgcggctggctgacaacttcatccaggccctggggccccctgacttccgcaacatgacgggactggtggacctgacactgtctcgcaatgccatcacccgcattggggcccgcgcctttggggacctcgagagcctgcgttccctccaccttgacggcaacaggctggtggagctgggcaccgggagcctccggggccccgtcaatctgcagcacctcatcctcagcggcaaccagctgggccgcatcgcgccgggagccttcgacgacttcctagagagcctggaggacctggacctgtcctacaacaacctccggcaggtgccctgggccggcatcggcgccatgcctgccctgcacaccctcaacctggaccataaccttattgacgcactgcccccaggcgccttcgcccagctcggtcagctctcccgcctggacctcacctccaaccgcctggccacgctggctccggacccgcttttctctcgtgggcgtgatgcagaggcctctcccgcccccctggtgctgagctttagcgggaaccccctgcactgcaactgtgagctgctgtggctgcggcggctggcgcggccggacgacctggaaacgtgcgcctccccgcccggcctggccggccgctacttctgggcagtgcccgagggcgagttctcctgtgagccgcccctcattgcccgccacacgcagcgcctctgggtgctggaaggccagcgggccacgctgcggtgccgggccctgggtgaccccgcgcctaccatgcactgggtcggtcctgacgaccggttggttggcaactcctcccgagcccgggctttccccaacgggaccttagagattggggtgaccggcgctggggacgctgggggctacacctgcatcgccaccaaccctgctggtgaggccacagcccgagtagaactgcgggtgctggccttgccccatggtgggaacagcagtgccgaggggggccgccccgggccctcggacatcgccgcctccgctcgcactgctgccgagggtgaggggacgctggagtctgagccagccgtgcaggtgacggaggtgaccgccacctcagggctggtgagctggggtcccgggcggccagccgacccagtgtggatgttccaaatccagtacaacagcagcgaagatgagaccctcatctaccgg

SEQ ID NO: 21343 - protein, 449 aa, Homo sapiens
MAPPLLLLLLASGAAACPLPCVCQNLSESLSTLCAHRGLLFVPPNVDRRTVELRLADNFIQALGPPDFRNMTGLVDLTLSRNAITRIGARAFGDLESLRSLHLDGNRLVELGTGSLRGPVNLQHLILSGNQLGRIAPGAFDDFLESLEDLDLSYNNLRQVPWAGIGAMPALHTLNLDHNLIDALPPGAFAQLGQLSRLDLTSNRLATLAPDPLFSRGRDAEASPAPLVLSFSGNPLHCNCELLWLRRLARPDDLETCASPPGLAGRYFWAVPEGEFSCEPPLIARHTQRLWVLEGQRATLRCRALGDPAPTMHWVGPDDRLVGNSSRARAFPNGTLEIGVTGAGDAGGYTCIATNPAGEATARVELRVLALPHGGNSSAEGGRPGPSDIAASARTAAEGEGTLESEPAVQVTEVTATSGLVSWGPGRPADPVWMFQIQYNSSEDETLIY

SEQ ID NO: 21344 - DNA, 2431 bp, Homo sapiens
cttgtccccagcgcctggactcccccttaactgcttgggaaatgtgacctttgctctggggggcctggccctgcaggccccaaccttccctcatctctggcggccctcttgggcctctgacccagcccctccccgggccaggctcacagaagctggcttctgggactgtcctgggcccaagtgggcacctgcgccagccccacctgtgcctgggctgtggccccttcctacagggcgctcaccatggccccgccgctcctgctgctgctgctggccagtggagcggccgcctgcccgctgccctgcgtctgccagaacctgtccgagtcgctcagcaccctctgtgcccaccgaggcctgctgtttgtgccgcccaacgtggaccggcgcacagtggagctgcggctggctgacaacttcatccaggccctggggccccctgacttccgcaacatgacgggactggtggacctgacactgtctcgcaatgccatcacccgcattggggcccgcgcctttggggacctcgagagcctgcgttccctccaccttgacggcaacaggctggtggagctgggcaccgggagcctccggggccccgtcaatctgcagcacctcatcctcagcggcaaccagctgggccgcatcgcgccgggagccttcgacgacttcctagagagcctggaggacctggacctgtcctacaacaacctccggcaggtgccctgggccggcatcggcgccatgcctgccctgcacaccctcaacctggaccataaccttattgacgcactgcccccaggcgccttcgcccagctcggtcagctctcccgcctggacctcacctccaaccgcctggccacgctggctccggacccgcttttctctcgtgggcgtgatgcagaggcctctcccgcccccctggtgctgagctttagcgggaaccccctgcactgcaactgtgagctgctgtggctgcggcggctggcgcggccggacgacctggaaacgtgcgcctccccgcccggcctggccggccgctacttctgggcagtgcccgagggcgagttctcctgtgagccgcccctcattgcccgccacacgcagcgcctctgggtgctggaaggccagcgggccacgctgcggtgccgggccctgggtgaccccgcgcctaccatgcactgggtcggtcctgacgaccggttggttggcaactcctcccgagcccgggctttccccaacgggaccttagagattggggtgaccggcgctggggacgctgggggctacacctgcatcgccaccaaccctgctggtgaggccacagcccgagtagaactgcgggtgctggccttgccccatggtgggaacagcagtgccgaggggggccgccccgggccctcggacatcgccgcctccgctcgcactgctgccgagggtgaggggacgctggagtctgagccagccgtgcaggtgacggaggtgaccgccacctcagggctggtgagctggggtcccgggcggccagccgacccagtgtggatgttccaaatccagtacaacagcagcgaagatgagaccctcatctaccggattgtcccagcctccagccaccacttcctgctgaagcacctcgtccccggcgctgactatgacctctgcctgctggccttgtcaccggccgctgggccctctgacctcacggccaccaggctgctgggctgtgcccatttctccacgctgccggcctcgcccctgtgccacgccctgcaggcccacgtgctgggcgggaccctgaccgtggccgtggggggtgtgctggtggctgccttactggtcttcactgtggccttgctggttcggggccggggggccggaaatggccgcctccccctcaagctcagccacgtccagtcccagaccaatggaggccccagccccacacccaaggcccacccgccgcggagccccccgccccggccgcagcgcagctgctctctggacctgggagatgccgggtgctacggttatgccaggcgcctgggaggagcttgggcccgacggagccactctgtgcatggggggctgctcggggcagggtgccggggggtaggaggcagcgccgagcggctggaagagagtgtggtgtgatggacgggcagcttcctgtgtgctccaagggatgagcctcgtggggcagagggcccggggccgccgcctggcctgggagtccctccctggtttttattctcagtacctcaggctcccctgtgtacttggaggggcagggagccctttcctcggttctggcctccagaccagggtaagggcaggcccctccaacaggtgctcacagccaccgaggcaggggctgcagccacccactgggagtcttgtttttatttataataaaattgttggggacacctca

SEQ ID NO: 21345 - protein, 635 aa, Homo sapiens; identical to SEQ ID NO: 2747

SEQ ID NO: 21346 - DNA, 1763 bp, Homo sapiens
cccttaactgcttgggaaatgtgacctttgctctggggggcctggccctgcaggccccaaccttccctcatctctggcggccctcttgggcctctgacccagcccctccccgggccaggctcacagaagctggcttctgggactgtcctgggcccaagtgggcacctgcgccagccccacctgtgcctgggctgtggccccttcctacagggcgctcaccatggccccgccgctcctgctgctgctgctggccagtggagcggccgcctgcccgctgccctgcgtctgccagaacctgtccgagtcgctcagcaccctctgtgcccaccgaggcctgctgtttgtgccgcccaacgtggaccggcgcacagtggagctgcggctggctgacaacttcatccaggccctggggccccctgacttccgcaacatgacgggactggtggacctgacactgtctcgcaatgccatcacccgcattggggcccgcgcctttggggacctcgagagcctgcgttccctccaccttgacggcaacaggctggtggagctgggcaccgggagcctccggggccccgtcaatctgcagcacctcatcctcagcggcaaccagctgggccgcatcgcgccgggagccttcgacgacttcctagagagcctggaggacctggacctgtcctacaacaacctccggcaggtgccctgggccggcatcggcgccatgcctgccctgcacaccctcaacctggaccataaccttattgacgcactgcccccaggcgccttcgcccagctcggtcagctctcccgcctggacctcacctccaaccgcctggccacgctggctccggacccgcttttctctcgtgggcgtgatgcagaggcctctcccgcccccctggtgctgagctttagcgggaaccccctgcactgcaactgtgagctgctgtggctgcggcggctggcgcggccggacgacctggaaacgtgcgcctccccgcccggcctggccggccgctacttctgggcagtgcccgagggcgagttctcctgtgagccgcccctcattgcccgccacacgcagcgcctctgggtgctggaaggccagcgggccacgctgcggtgccgggccctgggtgaccccgcgcctaccatgcactgggtcggtcctgacgaccggttggttggcaactcctcccgagcccgggctttccccaacgggaccttagagattggggtgaccggcgctggggacgctgggggctacacctgcatcgccaccaaccctgctggtgaggccacagcccgagtagaactgcgggtgctggccttgccccatggtgggaacagcagtgccgaggggggccgccccgggccctcggacatcgccgcctccgctcgcactgctgccgagggtgaggggacgctggagtctgagccagccgtgcaggtgacggaggtgaccgccacctcagggctggtgagctggggtcccgggcggccagccgacccagtgtggatgttccaaatccaagggcccggggccgccgcctggcctgggagtccctccctggtttttattctcagtacctcaggctcccctgtgtacttggaggggcagggagccctttcctcggttctggcctccagaccagggtaagggcaggcccctccaacaggtgctcacagccaccgaggcaggggctgcagccacccactgggagtcttgtttttatttataataaaattgttggggacacctc

SEQ ID NO: 21347 - protein, 479 aa, Homo sapiens
MAPPLLLLLLASGAAACPLPCVCQNLSESLSTLCAHRGLLFVPPNVDRRTVELRLADNFIQALGPPDFRNMTGLVDLTLSRNAITRIGARAFGDLESLRSLHLDGNRLVELGTGSLRGPVNLQHLILSGNQLGRIAPGAFDDFLESLEDLDLSYNNLRQVPWAGIGAMPALHTLNLDHNLIDALPPGAFAQLGQLSRLDLTSNRLATLAPDPLFSRGRDAEASPAPLVLSFSGNPLHCNCELLWLRRLARPDDLETCASPPGLAGRYFWAVPEGEFSCEPPLIARHTQRLWVLEGQRATLRCRALGDPAPTMHWVGPDDRLVGNSSRARAFPNGTLEIGVTGAGDAGGYTCIATNPAGEATARVELRVLALPHGGNSSAEGGRPGPSDIAASARTAAEGEGTLESEPAVQVTEVTATSGLVSWGPGRPADPVWMFQIQGPGAAAWPGSPSLVFILSTSGSPVYLEGQGALSSVLASRPG

SEQ ID NO: 21348 - DNA, 981 bp, Homo sapiens
ccttaactgcttgggaaatgtgacctttgctctggggggcctggccctgcaggccccaaccttccctcatctctggcggccctcttgggcctctgacccagcccctccccgggccaggctcacagaagctggcttctgggactgtcctgggcccaagtgggcacctgcgccagccccacctgtgcctgggctgtggccccttcctacagggcgctcaccatggccccgccgctcctgctgctgctgctggccagtggagcggccgcctgcccgctgccctgcgtctgccagaacctgtccgagtcgctcagcaccctctgtgcccaccgaggcctgctgtttgtgccgcccaacgtggaccggcgcacagtggagctgcggctggctgacaacttcatccaggccctggggccccctgacttccgcaacatgacgggactggtggacctgacactgtctcgcaatgccatcacccgcattggggcccgcgcctttggggacctcgagagcctgcgttccctccaccttgacggcaacaggctggtggagctgggcaccgggagcctccggggccccgtcaatctgcagcacctcatcctcagcggcaaccagctgggccgcatcgcgccgggagccttcgacgacttcctagagagcctggaggacctggacctgtcctacaacaacctccggcaggtgccctgggccggcatcggcgccatgcctgccctgcacaccctcaacctggaccataacccggggccgccgcctggcctgggagtccctccctggtttttattctcagtacctcaggctcccctgtgtacttggaggggcagggagccctttcctcggttctggcctccagaccagggtaagggcaggcccctccaacaggtgctcacagccaccgaggcaggggctgcagccacccactgggagtcttgtttttatttataataaaattgttggggacacctc

SEQ ID NO: 21349 - protein, 246 aa, Homo sapiens
MAPPLLLLLLASGAAACPLPCVCQNLSESLSTLCAHRGLLFVPPNVDRRTVELRLADNFIQALGPPDFRNMTGLVDLTLSRNAITRIGARAFGDLESLRSLHLDGNRLVELGTGSLRGPVNLQHLILSGNQLGRIAPGAFDDFLESLEDLDLSYNNLRQVPWAGIGAMPALHTLNLDHNPGPPPGLGVPPWFLFSVPQAPLCTWRGREPFPRFWPPDQGKGRPLQQVLTATEAGAAATHWESCFYL

SEQ ID NO: 21350 - DNA, 432 bp, Homo sapiens
ggccaggcggttggaggtgaggtccaggcgggagagctgaccgagctgggcgaaggcgcctgggggcagtgcgtcaataaggttatggtccaggttgagggtctgcagattgacggggccccggaggctcccggtgcccagctccaccagcctgttgccgtcaaggtggagggaacgcaggctctcgaggtccccaaaggcgcgggccccaatgcgggtgatggcattgcgagacagtgtcaggtccaccagtcccgtcatgttgcggaagtcagggggccccagggcctggatgaagttgtcagccagccgcagctccactgtgcgccggtccacgttgggcggcacaaacagcaggcctcggtgggcacagagggtgctgagcgactcggacaggttctggcagacgcagggcagcgggcaggcggccgc

SEQ ID NO: 21351 - protein, 115 aa, Homo sapiens [sequence omitted]

SEQ ID NO: 21352 - DNA, 512 bp, Homo sapiens
cgaggactggcgacggcgaggagatggagaaactgactaaagcgcctcgcgcgaggtccctgagggttcgaacccaagtctgtcaggatcgggagcccaagttgtccccatcgtactggatgtggctcagctctgcaggaagccgcggcgtctgccttctagtctcacctgtggacactttgccaaaggagtcgggcctgacggtggaagatgggaaatggccaaaagaataaaccatttcctcttacttaccgaatgaaaagcttgcttcatcttggcgttcaagactctctaatatgattccacctgttgggctctttcttccatttgcctccgcagatagtgtctgccttctggagagctgaccaaacactaagggtaagtcctgtgcctgaatccaggctggcgggatgcatgggggtcttcaccaggagcagctgtggatgccagcagtttggcatgtcaggtcttaagctcaatcaataaaaaaaggctgcgctctgatttgtgga

SEQ ID NO: 21353 - protein, 69 aa, Homo sapiens
MEKLTKAPRARSLRVRTQVCQDREPKLSPSYWMWLSSAGSRGVCLLVSPVDTLPKESGLTVEDGKWPKE

SEQ ID NO: 21354 - DNA, 1194 bp, Homo sapiens
agatgggtggaggcactgggccacctcagagggccagtgtcttgctgaggggccggagcagtcctgtgcctgcagcctccggagccatgggaacagggctgcgaagtcagtccttgcgagagccccgaccctcctatggaaagctgcaggagccctgggggaggccccaggagggccaactccgcagggcgctaagcctcagacaggggcaagagaagtccaggtcccagggcctcgagagaggcacagaagggccagatgccactgcccaggagcgggtgccggggagcctgggggacacagagcagctgatccaagcccagcgaagaggcagccggtggtggctgaggcggtaccaacagcaggtaagaagaaggtgggagagctttgtcgccatcttccccagcgtgactctgagtcagccggcctccccgtagcccacactgggcaccatcagctaaagatgctggaagccatcgtggcccccttgctgtgcctggaccagcccaccgtgtctgctgacctacctcttcacagctctctggactttggctgggtggccctaggaggcttctgccaccagctcactggagtcgccacgtggctgccactcttagctctggcccttccactccagcactagctctctttgaagatcccagcagggtcaaaaagaagggggctcagctgtctgccctctgggcttgggtaggggccttggactatgattctatgaaggtttagaagaagcctgcccggaatgggggctgtggacgctcctgccccacacgaccagctgtcaacttccaggacggagcttgatgaagccagacccatggccgagaggctcacggacgttgcctggtcactgggccatgacccaactgcccttcttgtcagttgctgatggtgggccagggcgcaggtctccctcccagatggtgagccctctggggcaaggaccacagctgggtggccctcctggctgagcactctgtgctgaaaacctttgaacctcacggtgtcctgatgaaggaagcagaggaagtcttcctccctgtgtgacagagggggaaactgaggcccagagtggggaagggatttcttggttttgacatctccgaccccaccccaccccatccagtgtccagcactggagtcgaacacagtaataaagatgctgagaaaaagtca

SEQ ID NO: 21355 - protein, 144 aa, Homo sapiens
MGGGTGPPQRASVLLRGRSSPVPAASGAMGTGLRSQSLREPRPSYGKLQEPWGRPQEGQLRRALSLRQGQEKSRSQGLERGTEGPDATAQERVPGSLGDTEQLIQAQRRGSRWWLRRYQQQVRRRWESFVAIFPSVTLSQPASP

SEQ ID NO: 21356 - DNA, 4534 bp, Homo sapiens
gaagttctagaaaatgttaattgggggagctgtggctggcagagaaggaaaaaggaagctgaagggcacttgggctcataatggtctctccaaccctgatcctgtcctttatggacatttggcagcgctgctgccttgaggtgccttgcaatgctttatctttttgttaaagccacctctgttgcttcagccagcttgagcggttttctgttacttgctagtggttgggaaggcttagccgacgaagggaaaatgagtcaggtcctgaaggatgagcaagttacgggagtgggccgcatggtgagggagtggacttcctgatggggttaagggcgcctgaacacctgggaggcaagttgaggccaagacctggggtgatggagaggcagggtaggctacccagtgagtaggaggccgaaggaaccacagcagggctccagatctcctggcccagaggggctggtacgggaagcccagaagacactcatccctaaggggagcctgagactgaggaactctcatgccctgcgtcgggctcgtgggcgaagggccttcccagggactgcaccatggcctgtccccagccttacccaggggcctccctctcaggttctgaaggacccaggggtcacagctgtgtggggtgctccactgaacacttccttcaaactccttcaggctggagtgcagtggcgcgatctcagctccatgggagagagtttgaaaggatgaagagtttacatcctctggaaagaagcaaatagaaggcattccaggcaaaaggaactgcatcgagtaaaagcatggaggcaagaaagggcttggtgtgtttgagaaacagtgagtagggcatggtggtggcagaagcttaaagtgtatggcccgtggacagtgacagccggacaagaagctgaagtgacagaacaagttgaaccaaaggaattccagacctgggaaagtggagaaagaattttggggtcagagccgtttaagactttgcctagggcctgggtcttctttctcctaaaggcctcaacccacagcacgccacacaaatatgtcacataacacacaaacaaacatcatatttcacagtccaggaaatgaaatgaagacaaaagcgccccctgtgggtgaagtcacagtcactgcagcagacatcatggctgtggatgtggcagaataccatctgagcgtcatcaagagcccccctggctgggaggtgggtgtctatgctgcaggggccctggccctgctgggaatcgcagctgtgagcctgtggaagctctggacgtcggggagcttccccagcccctctccgttccccaattacgactacaggtaccttcagcagaagtacggcgagagctgcgcagaggccagggagaagagagtgcctgcctggaatgcccagcgggccagcacgcggggaccacccagccgcaaaggcagtctcagcattgaggacacctttgagagcatcagtgaactggggcctctggagctgatgggccgggagttggacctggccccctatgggaccctccggaagtcccagtcggccgactccctgaactccatctcctccgtgagcaacacctttgggcaggacttcacactgggccaggtggaggtgagcatggagtacgacactgcctcccacacgctgaacgtggcggtgatgcagggcaaggacctcctggagcgggaggaggccagcttcgagtcctgcttcatgcgcgtcagcctgctgccggacgagcagatcgtgggcatttctcggatccagagaaatgcctactccatcttctttgatgagaagttctccatccccctggatcccacagccctggaggagaagagcctgcggttttctgtatttggcatcgatgaggatgagcgcaacgtcagcacgggggtggtggagctgaagctttctgtgcttgacctcccgctgcagcccttcagtggctggctctatttacaggaccagaacaaggccgccgatgctgtgggggagatcctgctctccctcagctacctccccacagccgagcgcctcaccgtggtcgtggttaaggccaagaacctcatctggaccaacgacaagaccacagcggaccccttcgtcaaggtgtacctgctgcaggatgggaggaagatgagcaaaaagaagacagccgtgaagagggatgaccccaacccggtgttcaacgaagccatgatcttctcggtgccagccattgtgctccaggacctgtctctccgcgtgacggtggctgagagcagcagcgacggccgtggggacaacgtgggccatgtcatcattgggccgtcagccagtggcatgggaaccacacattggaaccagatgttggccacgctgcgcaggcccgtgtccatgtggcacgctgtccggcgaaactagcaaccagggcgggccagttgggcaatggagctgctggagcccggtacccactcagctctgtctgatgccctctccatagcccagctggagccgtgaacactggggtcccctggcagagtcctcatgacccatcctggtctctctgtccagattgcagcagaggagtgggcgtggctctgtgtccagggccccagggtctgctcctgctgaggaccagctgtggctgggccaggacagaggactcaaccctgctcctcccggtaggccagctgccgagctgggctatgttctggaacccagtgaatcttgggggccaggcactgtgctaggcaccagcaggggtaacacgaagaagacccggcccttagggcatcaggaagactagctcccctgccccggaggatctgctcagtgctgatggcagcccagctgtgtggactcagggggctctgagggctagggaaacaggaagggcctctttgacaaggtaggagctgtgcttggaggggcaggaaaagaactgagcatgtcgcaggcagcgggcccagcctgagcaatggcaggatgtgaacttccccatcgcaaatgcagttctcagcccactgcagtggatacaaggaagggcctttctcggggccggagaagagaccaagagaccaggcccgggcagcagcctaccggccacgtggaacactggctccggagttattctctgtcaaatctactccccggacctcaaccatggcaagaaccagaggtccaaagaggcccagacccaggtccttgtgctcagtcctgcgcaaaccaggcccagaccctgcaagcatttgttgatgcccttgcaggcccactgggagaaagatgcctcaggcaggtctcagcctgggggtggcaggggtggggcagagagaatactgacagcagaggtcttggtgggctgcacgtgcctgcgaagatgtggtggacaaggaggctctcgggctgggccttggaggggtggcagcggaaggacagcccaggtggctgaggcctgatgggaagccggggaaggccagggtggaagggcggcttgagggacgccaggagaagactgaatgccaggctaggaaggaggcggctctcgatcacggggtgggtgcccccgacaccgggtctcctagcttgagttccctagaagcgaaatctgagagggggattctggggcaagtagtttcttgcgggtgagtgttctcagagaaacttaccagatcaagaaagggagctcaggctggatggaggaagccacgcaagtgtggcttcaagatccatcgccttggcctgatcgctgtgggggcaggggcctggagtacgaggggcaccctgggggctcccacccagaagcagaggggctgggctgttgcacctctactggcatcagtctttggttaccccccagccccagtaggaggagagcaggcagagcttgtcatccccagcctggtgtcccgcagtcccaggaagccgcttcttgccttcatggctgagtgctgggaagggctgagctcacccaggccagcaggtggggtatcatctgctcggtggggccacccacaggtgacagcatggaccctcaggctggctgcccctgttccttggtccataactggtgagctatggagacccaggccaacaaattatccccagtgatatggggggaggaggggctagaacaagggcccaggggactggaggcaggatggtggctttccctacctgacacagccatggcccagccccaaggccaggctgtctaccctatggccacagcaggaggtcagcccagggccaggagacacatggctggacaaggctttgcagcctgggagaccccgactttctctaacccagtggctgtgcggtgcaggccactgactccccccctgccctctcccctctctccctccccctaactgcatgacatgttaactgtgtgcccaggacagccgtggtggggaccgggtatgccaactggaatgattctagaaccaaaataaagttggggcaggaagagggggcttccagggagccctgctcggccctgaatcaccttcgtctcttctctaggaa

SEQ ID NO: 21357 - protein, 456 aa, Homo sapiens
MSHNTQTNIIFHSPGNEMKTKAPPVGEVTVTAADIMAVDVAEYHLSVIKSPPGWEVGVYAAGALALLGIAAVSLWKLWTSGSFPSPSPFPNYDYRYLQQKYGESCAEAREKRVPAWNAQRASTRGPPSRKGSLSIEDTFESISELGPLELMGRELDLAPYGTLRKSQSADSLNSISSVSNTFGQDFTLGQVEVSMEYDTASHTLNVAVMQGKDLLEREEASFESCFMRVSLLPDEQIVGISRIQRNAYSIFFDEKFSIPLDPTALEEKSLRFSVFGIDEDERNVSTGVVELKLSVLDLPLQPFSGWLYLQDQNKAADAVGEILLSLSYLPTAERLTVVVVKAKNLIWTNDKTTADPFVKVYLLQDGRKMSKKKTAVKRDDPNPVFNEAMIFSVPAIVLQDLSLRVTVAESSSDGRGDNVGHVIIGPSASGMGTTHWNQMLATLRRPVSMWHAVRRN

SEQ ID NO: 21358 - DNA, 3436 bp, Homo sapiens
ctggagcccagccggagcggcggcccctccgcggagcccggtcacagtcactgcagcagacatcatggctgtggatgtggcagaataccatctgagcgtcatcaagagcccccctggctgggaggtgggtgtctatgctgcaggggccctggccctgctgggaatcgcagctgtgagcctgtggaagctctggacgtcggggagcttccccagcccctctccgttccccaattacgactacaggtaccttcagcagaagtacggcgagagctgcgcagaggccagggagaagagagtgcctgcctggaatgcccagcgggccagcacgcggggaccacccagccgcaaaggcagtctcagcattgaggacacctttgagagcatcagtgaactggggcctctggagctgatgggccgggagttggacctggccccctatgggaccctccggaagtcccagtcggccgactccctgaactccatctcctccgtgagcaacacctttgggcaggacttcacactgggccaggtggaggtgagcatggagtacgacactgcctcccacacgctgaacgtggcggtgatgcagggcaaggacctcctggagcgggaggaggccagcttcgagtcctgcttcatgcgcgtcagcctgctgccggacgagcagatcgtgggcatttctcggatccagagaaatgcctactccatcttctttgatgagaagttctccatccccctggatcccacagccctggaggagaagagcctgcggttttctgtatttggcatcgatgaggatgagcgcaacgtcagcacgggggtggtggagctgaagctttctgtgcttgacctcccgctgcagcccttcagtggctggctctatttacaggaccagaacaaggccgccgatgctgtgggggagatcctgctctccctcagctacctccccacagccgagcgcctcaccgtggtcgtggttaaggccaagaacctcatctggaccaacgacaagaccacagcggaccccttcgtcaaggtgtacctgctgcaggatgggaggaagatgagcaaaaagaagacagccgtgaagagggatgaccccaacccggtgttcaacgaagccatgatcttctcggtgccagccattgtgctccaggacctgtctctccgcgtgacggtggctgagagcagcagcgacggccgtggggacaacgtgggccatgtcatcattgggccgtcagccagtggcatgggaaccacacattggaaccagatgttggccacgctgcgcaggcccgtgtccatgtggcacgctgtccggcgaaactagcaaccagggcgggccagttgggcaatggagctgctggagcccggtacccactcagctctgtctgatgccctctccatagcccagctggagccgtgaacactggggtcccctggcagagtcctcatgacccatcctggtctctctgtccagattgcagcagaggagtgggcgtggctctgtgtccagggccccagggtctgctcctgctgaggaccagctgtggctgggccaggacagaggactcaaccctgctcctcccggtaggccagctgccgagctgggctatgttctggaacccagtgaatcttgggggccaggcactgtgctaggcaccagcaggggtaacacgaagaagacccggcccttagggcatcaggaagactagctcccctgccccggaggatctgctcagtgctgatggcagcccagctgtgtggactcagggggctctgagggctagggaaacaggaagggcctctttgacaaggtaggagctgtgcttggaggggcaggaaaagaactgagcatgtcgcaggcagcgggcccagcctgagcaatggcaggatgtgaacttccccatcgcaaatgcagttctcagcccactgcagtggatacaaggaagggcctttctcggggccggagaagagaccaagagaccaggcccgggcagcagcctaccggccacgtggaacactggctccggagttattctctgtcaaatctactccccggacctcaaccatggcaagaaccagaggtccaaagaggcccagacccaggtccttgtgctcagtcctgcgcaaaccaggcccagaccctgcaagcatttgttgatgcccttgcaggcccactgggagaaagatgcctcaggcaggtctcagcctgggggtggcaggggtggggcagagagaatactgacagcagaggtcttggtgggctgcacgtgcctgcgaagatgtggtggacaaggaggctctcgggctgggccttggaggggtggcagcggaaggacagcccaggtggctgaggcctgatgggaagccggggaaggccagggtggaagggcggcttgagggacgccaggagaagactgaatgccaggctaggaaggaggcggctctcgatcacggggtgggtgcccccgacaccgggtctcctagcttgagttccctagaagcgaaatctgagagggggattctggggcaagtagtttcttgcgggtgagtgttctcagagaaacttaccagatcaagaaagggagctcaggctggatggaggaagccacgcaagtgtggcttcaagatccatcgccttggcctgatcgctgtgggggcaggggcctggagtacgaggggcaccctgggggctcccacccagaagcagaggggctgggctgttgcacctctactggcatcagtctttggttaccccccagccccagtaggaggagagcaggcagagcttgtcatccccagcctggtgtcccgcagtcccaggaagccgcttcttgccttcatggctgagtgctgggaagggctgagctcacccaggccagcaggtggggtatcatctgctcggtggggccacccacaggtgacagcatggaccctcaggctggctgcccctgttccttggtccataactggtgagctatggagacccaggccaacaaattatccccagtgatatggggggaggaggggctagaacaagggcccaggggactggaggcaggatggtggctttccctacctgacacagccatggcccagccccaaggccaggctgtctaccctatggccacagcaggaggtcagcccagggccaggagacacatggctggacaaggctttgcagcctgggagaccccgactttctctaacccagtggctgtgcggtgcaggccactgactccccccctgccctctcccctctctccctccccctaactgcatgacatgttaactgtgtgcccaggacagccgtggtggggaccgggtatgccaactggaatgattctagaaccaaaataaagttggggcaggaagagggggcttccagggagccctgctcggccctgaatcaccttcgtctcttctctaggaa

SEQ ID NO: 21359 - protein, 421 aa, Homo sapiens; identical to SEQ ID NO: 2749

SEQ ID NO: 21360 - DNA, 6028 bp, Homo sapiens
tttaatgggaaactctccccgcacacacacacactttttttttgaggcacagtctcactatgttgtccagactggttttgaactcctgggctcaagagatcctcccacaccagcctccccagtagctgggactacaggcatgacccactgcacccagctaaatttttcaattttaaaatgttggcaactcacttaaatgtaagacaaataaacacatctgtaggctggcagtgctgcccacactgcccagactaggggttagggggtctgtatgggccatcaccaggctgctaaccacagcaaccaatatgtgccaagcctgactacacgtaccttctcattccaccctcctggcagcctcacatctgctttacaggtggggaactgaggctctaagagactaagaaaattacccaaggccactgcagctagccaggggcaggtatgggagtcagagctgggtgcagctgactacaaaccctgtgctcaggatgacaccctctaggagcctcgacctctctcccagttctcttctccctccactcaggcaaatgagctctgccttcacagggcaccaggctggaacatatgtctggaggccaggggcggtggctcacgcctgtaatcctagcactttgggaggccaagatgggaggatcattgaggtcaggagttcaagaccatcctggccaacatgatgaaaccccgtctctactgaaaatacaaaaactagctgggcatggtggctcatgcctgtaatcccagctacttgggaggctgaggcaggagaatcacttgaacccaggaggcagaggttgcagtgagctgagatcgcgccattgcattcaagcctgggtgacacagtgaggctctgtctcaaaaaaaaaaaaaaaaaaaaaaaaaagaaggaacttctgtctggggtgtgcctagcagtcattcacaccctcactgaaatctcagctccctgggaaaggatgtcgtgttaaagggagaggaaagaacagacagcgtgggagtctggggtctgagctgggccagccatggaggtgatggggcccccgacagccagaggccagatgcagcttgaggctttgtcccgtaccacgcctgttgtgctgtggggtgtactttgccatgcataccttgctcgcgtgctgcgggcattggctgtcccagcttggccccactcttgcaaagtcagcttgtgccaggtaagcaggaaaaagccgatggcttatctgattcccggcaaggcagaagcaggctgggaggtgcgtgtgtgtacattagcatgtgtttcagcgtatccagaccagcttccgccaggagctaggaccaccttgggcaggtacatggtgacccatttgacctgcagattcttaggaaactttttggaaaccatatgcccacttgcagtgagacacagtggttaggagcatggagccagttggcctgggttgaacagtttattagctgtgtggcctggggcaaattacgccctgggactctcacccgcaaaccagagataataatagtacctacctcatggggctgttaggcaaattaaatgaggtcagataaatgcaaagtgcttagaatggcgcttgatgtgtaagaagggctcgacaaggttctctattactatcattatctccagcccaggcccaggaatgagcttccactctagtcaggatgggtgaagcccttcctggcttagcaccacccttccatcaccatgacaacgcacatctccttgtgggagtgggggcagcatcaggagaactggaagccaggagctggctgtgcaccttatctgacctgcttctagaggctcctgggcacctccaggacttaagggggtagactaggacttatggcaccccaaatgtgctggataaccctgactggagcatggcaccgaagcttcttgactccaaagccacagactggggagaaccccggaattcctgaaaatgtggagggccttagctttaccctctgattcgaccccagtcccaaagggaacctacaggatgctccgaggggttgggaattggtgggtcacactccccaaggactttttatactgcgtctgaatggtgtttgcatttttttgcaaattggttgctacctttaaaactcaggaaatggcacataaaaaattcaggtatctggcttttctttaaagtgccagaagatcaagccacggtggttggcattcctgctggggcaaaaatgcagctgcccttgggccaggccatcactctgcagttcttacctccccttccccttgccctaccaccctgcaccaggcctgcaggcttaccatgtgtaaccacctctctgaactacaagggaatccagaaattggggtgggcattatcctggccctcggtgcccttgacctgagatcagtgcagcccatcccaaattcctttttccaggactcccacatacacccacttagaacacatctgtgagccagatttacttcttagcacactaataaaacaatgagcagtcacctaggttcaggtaatgggttgtacgagctcccagacctttctagaacaacttaagcctcagtcattcctaaaagctgggggtggaggatggggtggggaagaaaccatgccaagcagtgaaaggactgataatagaatattgcagacacgcagcctttccttcccaatcaaaatggaagcatttgaaggaaggctctggctcaagccaggggggccttgctctaatgagtcacctactgcgtcgccgctggtcagcctgatgttgttaggatggaaatgagctggggttgccagatttggcaaatacaaaaacaggacacccaggagcattgatgttttggatgaacaatggaaaagattttggcgtaaatatgtcctgtggaatatttgggacacacatattaaaaacgtatttgaaatttggccaggcgctgtggctcacacctgtaatctcagcactttgggagaccaaggctggtggatcacctgaggccaggagttcgatatcagcctggccaacatggtgaaaccgcatctctacaaaaaatacaaaaattagccgggtggggtggcacatgcctgtcatcccagctacttgggaggctgaggcaggagatcacttgaacccaggggcagaggctgcagtgagccgagatcgcgccactgcactctagcctgggcaacaaagagagactccatctgaaaaaacaaaacaaaacaaaacaaaatctgaaattcacatgccactgggcatcctgtgttttatctggcaatcctgagaagagtcttagaatgcttgaaaagagctttaaacatcatttcttaaaatgccaagcctccctttggtggcactccccttatagctgagtgtaagctctggatgacaggcacgtgggtgccaggaggccaggacctaggagcgggacgctgactctctgcagccctctcctctcactctcttttcccttccagtcacagtcactgcagcagacatcatggctgtggatgtggcagaataccatctgagcgggtccccggggagaccctcatcctgctgcaccctggggatgagcctgtgactcggaatccactcaccgaggccttctgtggagactgtcaagtagccaagggaaaataagcccaggaaggtcaaggttagattcatggggcgttaaactcagagaccacccagtccagaggcagaggttatagtgagctgagatcacaccactgcactccagctttccagcctgggcaacagagtgagactccgtctcatcagaaaaaaaaagaggccacccagtccagggccatggctcccaccttgtcaccctttgcctcagcagggagatgggagctggctgggagatgcctcgagactccagacatactcctgcagccctccccatggacagcggatggggtcagagaagaaacataccagccgtcttttctccctttgttcctctcctcattcacagatgggagaagtgaggcttagagagtaacggggtcaggatgtgcactcaggtctcctgactcccagccccgtgctccccatcactctagcccctaccctaacgcagcccctggggagcccagggctgatctgaagggtgtgcccgggaatcacctttcccatcactttttcccaaaagtgagccagggagccgcacttttcaccctcaggctcacaggtcttgcccccctgcccccaccctgccccctacccgtatggccttgggcaagtggtgaaaccggaacttctacttacttatctgtaaaatgcaaaagatgaggcttgcctcagggctgttgggaagatttagagagctgatggttgtgcagcgcccagcatggtgcaaacgccactcttccagtggcagcgctttgcacacgctgttcccctgtcctggagtccttccctgcctctgccactgcctgcctgagtcctggcacctggtggtggggttataggtgcagatctggacccagtctgtctggaggcagatctctcctccgtccctcagcttcctcatctgtaaaatggggaaaacaatagaaccaacctcacaggattgccttgactccatgggttaatatacgtgacgtgcttagaacagggcctggcaaatcataaatagtaagtgcttcataaggggagctattcctcctcctcctcatcccactcgtttctggtcttcgcctagaccccacttccaatatcaccccaagactggtattccataaaatcaataaatgaatgcgaattgtcatttcatgtcaccttcctggggcttttccttctgtgcccccagccctgcccccttttctgccaccccgggcatgggctccacccttcagctcccaaagagcctcaggcacaggggagcctgaacctgctttgccacctggctgtgcccacagcctgcttagagaccttgggcctctggtcctgccctctagccaacccccggctactacccagccctgctgtgaccctgttcccaggactcccagaatacaccaagccttagcagggcggggcccgggagcctccatggatctctttgtcatgggcatacgtagcccacaggtgacattctgtcaacagcggcaggaggaaggagggtttcttcacagcccttccaccgtcgttacccattccttctgtttttccctggtctgcccagcccgtgactatgtgctgcgtgacttttgcgcacgtcacacgattgcgtgattagaccatgttggggattcatttttttcctctcttaacaatgccagaaatgtgtctctgcattgccacagtgccatcctaatgacctcaattgtcattctcgaaggccagtgacatttcctcccaagacagagccaccagccctcactggccccctcggtgggaccttcaggctgtctccagatttctgctgttataaatacagcctcgatgactcatcccagacacaaaacctgttgggattttccctttagaataaattcaccagagtgggaccgctggatgggggatgttcttgtcatccgcattttccaaacggagtatgaagcccagaggtgctgggtgacttgcctggaagccaaggtaccggtgcccggctctgccgtttctcaccgctggccttgagtggagaaacagatgtgctcattacccttccttggtctcagttttcctcttttagaaagtagggccttggccaggggcggtggctcacgcctgtaatcccagcactttgggaggccaaggcgagtggatcacctgaggtcaggagtttgagaccagcctggccaatatggtggaaccccatctctactagaaatacaaaaaattagctgggcatggtggtggacgcctgtaattccagctactcgggaggctgaggcaggagaatcgcttgaaccggggaggcagaggttgcagtgagccgaaatcgtgccattgcactccagcctgggcaacaagagtgaaactccatctc

SEQ ID NO: 21361 - protein, 159 aa, Homo sapiens [sequence omitted]

SEQ ID NO: 21362 - DNA, 571 bp, Homo sapiens
cacccagaagcagaggggctgggctgttgcacctctactggcatcagtctttggttaccccccagccccagtaggaggagagcaggcagagcttgtcatccccagcctggtgtcccgcagtcccaggaagccgcttcttgccttcatggctgagtgctgggaagggctgagctcacccaggccagcaggtggggtatcatctgctcggtggggccacccacaggtgacagcatggaccctcaggctggctgcccctgttccttggtccataactggtgagctatggagacccaggccaacaaattatccccagtgatatggggggaggaggggctagaacaagggcccaggggactggaggcaggatggccactgactccccccctgccctctcccctctctccctccccctaactgcatgacatgttaactgtgtgcccaggacagccgtggtggggaccgggtatgccaactggaatgattctagaaccaaaataaagttggggcaggaagagggggcttccagggagccctgctcggccctgaatcaccttcgtctcttctctaggaa

SEQ ID NO: 21363 - protein, 43 aa, Homo sapiens
METQANKLSPVIWGEEGLEQGPRGLEAGWPLTPPLPSPLSPSP

SEQ ID NO: 21364 - DNA, 644 bp, Homo sapiens
attcctgccccgccgggcctgccccgcgcagtctgggtctctgcgccgcagccgcccgcccgcccgctcagcgcccggccccgggatgacggcggcccaggccgcgggtgaggaggcgccaccaggcgtgcggtccgtcaaggtggtcctggtgggcgacggcggctgcgggaagacgtcgctgctgatggtcttcgccgatggggccttccccgagagctacacccccacggtgtttgagcggtacatggtcaacctgcaagtgaaaggcaaacctgtgcacctccacatctgggacacagcagggcaagatgactatgaccgcctgcggcccctgttctaccctgacgccagcgtcctgctgctttgcttcgatgtcaccagcccgaacagctttgacaacatctttaaccggtttctccctaggtgctggctttgctgattatccatatcagagctcaggctggggagcaagagagtggtccactgagagggccagaactctccagggctcacacatgccccccacatgccccctcgcccccctgcagtggtacccagaagtgaatcatttctgcaagaaggtacccatcatcgtcgtgggctgcaagactgacctgtgcaaggacaaatcactggtgaac

SEQ ID NO: 21365 - protein, 118 aa, Homo sapiens
MTAAQAAGEEAPPGVRSVKVVLVGDGGCGKTSLLMVFADGAFPESYTPTVFERYMVNLQVKGKPVHLHIWDTAGQDDYDRLRPLFYPDASVLLLCFDVTSPNSFDNIFNRFLPRCWLC

SEQ ID NO: 21366 - DNA, 1134 bp, Homo sapiens
attcctgccccgccgggcctgccccgcgcagtctgggtctctgcgccgcagccgcccgcccgcccgctcagcgcccggccccgggatgacggcggcccaggccgcgggtgaggaggcgccaccaggcgtgcggtccgtcaaggtggtcctggtgggcgacggcggctgcgggaagacgtcgctgctgatggtcttcgccgatggggccttccccgagagctacacccccacggtgtttgagcggtacatggtcaacctgcaagtgaaaggcaaacctgtgcacctccacatctgggacacagcagggcaagatgactatgaccgcctgcggcccctgttctaccctgacgccagcgtcctgctgctttgcttcgatgtcaccagcccgaacagctttgacaacatctttaaccggtggtacccagaagtgaatcatttctgcaagaaggtacccatcatcgtcgtgggctgcaagactgacctgtgcaaggacaaatcactggtgaacaagctccgaagaaacggattggagcctgtgacctaccacaggggccaggagatggcgaggtccgtgggcgcggtggcctacctcgagtgctcggctcggctccatgacaacgtccacgccgtcttccaggaggccgccgaggtggccctcagcagccgcggtcgcaacttctggcggcggattacccagggcttttgcgtggtgacctgagcggctcggggcgtcccagcgacgcgggaaggggcagggcgctgacctgctgctgagctggctgggctggacccggtccctaggctgtgaccgccgaactccactgcaacagacgggcgccaccaaagccaggccctgaggcctgggagtcctggactgagaaagggggttcctgggcccacctgctctgtgtagggctcgtcctgcggtgcccgagaatcactcgctaacccctatgcccggtcccggaccgacatcctggagccgcctgtgcagcctgatgccccctcgtggctgctcccagggctgcacctgccaggacctaatgttcttaggtccctctggccagaacccacacccggccccttcccacctgtcatactggtaactgtaacaagaaaaacgacatcacttat

SEQ ID NO: 21367 - protein, 210 aa, Homo sapiens [sequence omitted]

SEQ ID NO: 21368 - DNA, 6518 bp, Homo sapiens
gagagtctgacgggttcaaaatggcggcggctgcttcagcggctcctcctgtgtgagggaaacaacacccctccccggcagcggcggcggcggcggcggctctcggagcaccttcccagcggctgggcccgtggccgctctgtctttcctgggcaggggacgctccgggaggaggggcaacgccagggggcccatcccccggaatccctcttctgcgactggggagtagccggggggctcgtcccgcagcgcggagccagacctgagggggagacgcgaggggagccagggcccccatcccggcgcgccgcgccgctcccgccctgtccgccccccggggccggggcccgcgttccggggggccggggcggcgcggggagcctcgggccggccggtctcagctgatcggccgctgctcccgcaggcgaccagcccctgctggccgagggcacggcgaggagggcgctccctgcggccggggccggcccggggctcgggcccgggctgctgaccgctggcctgggggaggcgggggcgccccgggctcggcgccgaggggtcgcgctcctctctcctgacgcctccgactcccggtctccaaagccagaagagaaggtttgattcagcaactgtttgctcccttttcctggtcgctctgaccctctctggatactgggttgatccacggaaaaaccgaagacgacgtttgggatttaattattcctctcagctttggaatcttttacttctcacttggacaagaactcaagagcagaatctccgtgttgcaatctggttcctaaggaggaagaggaaggcagccctggagtggtttctttacagtaatttcaacagaagagtgagagatggaacccgaagaagaaaggattcgttacagccagagattgcgtggtaccatgcgacgacgctatgaagatgatggcatttcagatgatgaaattgaaggaaaaagaacttttgacttggaagagaaactgcacaccaacaaatataatgccaattttgttacttttatggaaggaaaagattttaatgtagagtatattcagcggggtggcttgagagatcctctgattttcaagaattctgatggactcggaataaaaatgccggatccagacttcactgtgaatgatgtcaaaatgtgtgtggggagtcgtcgcatggtggatgtcatggacgtgaacacacagaaaggcattgaaatgaccatggctcagtggacacgctactatgagaccccagaggaggagcgagagaaactctataatgtcatcagcctcgagtttagccacaccaggctggagaatatggtgcagaggccctccacggtggatttcattgactgggtagacaacatgtggccaaggcacttgaaggaaagccagactgaatcaacaaatgccatcttggagatgcagtaccctaaagtgcagaagtactgtctaatgagtgttcgaggctgctatactgacttccatgtggactttggtggtacctctgtttggtatcacatccatcaagggggaaaggtcttctggctcatcccccctacagcccacaacctggagctgtacgagaattggctgctgtcagggaaacagggagacatctttctgggtgaccgggtatcagattgtcagcgcattgagctcaagcagggctataccttcgtcattccctcaggctggattcatgctgtgtatactcctacagacacattagtgtttgggggcaattttttgcatagcttcaacatccctatgcagttaaaaatatacaacattgaagatcggacacgggttccaaataagtttcgctatccattctactatgagatgtgttggtatgtgttggagcgctatgtgtactgcataaccaaccgttcccacctaactaaggaatttcagaaagagtccctcagcatggatttggagttaaatgggttggagtctgggaatggggatgaggaagcagtggatcgagaaccccgacgcttgagcagcaggcgttctgtcctcactagccctgtagcgaatggagtcaacctggattatgatggactgggcaaaacctgccgaagtcttccaagtctgaagaaaactttggctggggactcatcttctgactgtagccggggctcccacaatggacaagtgtgggatccccagtgtgctccccgaaaggacaggcaagtgcatctgacccattttgagcttgaaggccttcgctgccttgtagataagttggagtctctgccactgcacaagaaatgtgtccccacagggatagaagatgaagatgctctcattgctgatgtaaagattttgctggaggagcttgccaacagcgatcccaagttagccctcactggagttcctatagtacagtggccaaaaagggataagcttaaattccccactcggccaaaggtgcgggttcctaccatccccattacgaagcctcacactatgaaaccagctccacggttaacacctgtgaggccagctgctgcctccccgattgtgtcaggagccagacggagacgagtgcgatgtcgaaaatgcaaagcctgtgtgcaaggagagtgtggtgtttgccactactgcagagacatgaagaagtttggggggcctggacgcatgaagcagtcctgtgtcctccgacagtgcttggcacccagactgcctcactcagtcacatgttccctctgtggagaggtggatcagaatgaagagacacaagactttgagaagaaactcatggaatgctgtatctgcaatgagattgttcatcctggctgcctccagatggacggagaggggttgcttaacgaagaattgccaaattgctgggaatgtccaaagtgctaccaggaggacagctcggagaaagcccagaagcggaaaatggaagagagtgacgaagaagctgtgcaagccaaagtcctgcggcccctgcggagctgcgatgagcctctcacgcccccgcctcattcacccacttccatgctgcagctcatccatgacccggtttccccccggggtatggtgactcggtcatcccctggggctggccccagcgaccaccacagtgccagccgcgatgagcgcttcaaacggcggcagttgctgcggctgcaggccacagagcgcaccatggtgctgcgacaagagactttggacaaaaattgacttgagtaggtgtaaggccattgtgccccaggccctcagtggcatcatcaagaggcagccagtcagccttgacctcagttggaccaacatctctaaaaagcaactgacatggctcgtcaataggctgccaggactgaaagacctcctcctagcaggctgctcctggtctgcagtctctgccctcagcacctccagctgcccccttctcaggacccttgatcttcggtgggcagtaggaatcaaggaccctcaaattcgggacttgcttactccaccggctgataaaccaggtcaggacaatcgcagcaagctccggaacatgaccgacttccggctggcaggccttgacatcacagatgccacgcttcgcctcataattcgccacatgcccctcctgtctcgactcgacctcagtcactgcagccaccttacagatcagtcctccaatctactcactgctgtcgggtcttccactcgctactctctcacagagctcaatatggcaggttgcaataaattgacagaccagaccctgatctacctacggcgcattgccaacgtcaccttgatcgaccttcgaggatgcaagcagatcactcgaaaagcctgcgagcacttcatctcagacttgtccatcaacagcctctactgcctgtctgacgagaagctgatacagaagatcagctaagacacacccagcccagattcaacaggaaaccgatcttcccctgactccccaccgaggagagcctctcctcgaccctgcacgggctctgaggccagcgtcacactccctctctgctctcctgtcccttgagcccttcctctacaggtggggcagagagggtggtggacaccaggcttatctgcctgctcctctccctcctaaggaaaagggagtagcagattgatctgaggggaaagcacaggctgtgctgtcgaggcgcctgctcgcttactcgcctgccaggaggccgggctctcagtttggggtgtttgtgcaaccttcatctgcactgggccctgtgcccctcctccccatccatggtccccagcagtgcctggttctgagcaaactcccagggaagaaaacggccctgtctccatggccaggttcttgtggtgtccagtgcgcgtctctcctccatcacactctcccggcttgcgcaggaggggccagcagccccaggagtcccagacccgtgccgatcacactggtgctgttgagatctcccaaacctcacgtccttaactgtgctctccctcctttcctctcccttgagcttggttctgcccagcactcgtgcttgttcacataattaggtttcccaccccagcctacccgacttacttgctagtctctatgaggtccttattgcacttattggggttgaagctcttcagaggagctggaactgtctaccccagggacacacccatttcgttgctacccaagtggattctgagacaggcaccatctccttgttccccctctctcttttgcctcccactgactgcccttttccatgtgtcttcattctgcctgaagaaggctttcccaggatgcacgtcctcagagggagcagcctatctcccccaagctggaggcggcagaggactgggccaagccccaacctgcctcccagccaggctcctccaggcctctggtttagcggagccccctgagcccaggcctgtgtctagccccagtggctcactgaactttcagggcagtcagggggtcctgcttagaagccagtcaccagccctctgcctgcagccatggaagggggtgtgcacgtgcctctgtgtgtgtggctgagtgtattctgcgcgtgtgtgtggagggagggagggaggggagcatggtgtctcccgctccaccgccctttgttgagccccatcagctgcccccttttactttgcattgaacggcctgtccaaagatcctctctctagggcagcagagagctttttgcactttaaaaaaaaaaagaaagaaagaaaggtcggaatttcttttgggtcaatatttttaagtgtgtgaggagatgctcagtagcagcagcctatggcaagagcttataaatgattgatgcaaatttgcactctgctccccctctgtaaggatactgatagcacaacctcttccccccaccccgccccgccttttggtcgtccatccctgtccctttctggccctcttcctgtagcccagtctcaggctttcctcttcctgaagccctacagagttagggaatggagcccaggcaccaggggtctaaagtgtgagccactgagaagagagacgccaactgcacccttgccacttccaaagcaatagaggcagagtggtcccctctttgccacctaggccagttttgaccctggcattaactggccttagaagaaactggatcctggtagggggtggcattttgtttgtttcttccaatctgctgaatcttttgactgcaccttacaaacagcagtctgctcccatgaccctctgcccacttccattggtctccaggccccaataatctggggttgaaactttgaggaaatgccagtgacttattccagagtgcctcagttaggggaacttctctgtaaagaaccctgggtattgagcaaaaaccttattatcgttaatgacctataattggaagcttcctgcctttttctttggttgctcctgtggaaaatactgaaaagattactttgttttattttgttgtctttttataaaaggggaggtggagagaccccttcagagcagggattgtgccgggagagtgcctctgactttgggacatttcatccacagaaatttccaagccaatggtttcttttgggttttggtttttatgtttgttttttggggtttggaaaaacatgcatttttaccgtgcacgtaaattggtcagcagaaaagggagcccagaaaaggcagcagatggaccatgcccttgctgggttttccttttctttgggactgtgaggggaaatggtttttagaggtgagggttggtccatgtggaggaaagaagtgtctctgttgggggacagaggaacctggggagtccatcgcatgtcctacaatctgctcttagacacggccttgccaggagagcctgccctcagactgcaggaccagaacccctgcctccatctttccaagcaccggggcgaaaaaccacaaaggaaaggaagaaaatttatatatatataatataaaatcacttggtgattaaaaaaataactgctccataaataaaactcctaaagtcacttatgttt

SEQ ID NO: 21369 - protein, 782 aa, Homo sapiens
MEPEEERIRYSQRLRGTMRRRYEDDGISDDEIEGKRTFDLEEKLHTNKYNANFVTFMEGKDFNVEYIQRGGLRDPLIFKNSDGLGIKMPDPDFTVNDVKMCVGSRRMVDVMDVNTQKGIEMTMAQWTRYYETPEEEREKLYNVISLEFSHTRLENMVQRPSTVDFIDWVDNMWPRHLKESQTESTNAILEMQYPKVQKYCLMSVRGCYTDFHVDFGGTSVWYHIHQGGKVFWLIPPTAHNLELYENWLLSGKQGDIFLGDRVSDCQRIELKQGYTFVIPSGWIHAVYTPTDTLVFGGNFLHSFNIPMQLKIYNIEDRTRVPNKFRYPFYYEMCWYVLERYVYCITNRSHLTKEFQKESLSMDLELNGLESGNGDEEAVDREPRRLSSRRSVLTSPVANGVNLDYDGLGKTCRSLPSLKKTLAGDSSSDCSRGSHNGQVWDPQCAPRKDRQVHLTHFELEGLRCLVDKLESLPLHKKCVPTGIEDEDALIADVKILLEELANSDPKLALTGVPIVQWPKRDKLKFPTRPKVRVPTIPITKPHTMKPAPRLTPVRPAAASPIVSGARRRRVRCRKCKACVQGECGVCHYCRDMKKFGGPGRMKQSCVLRQCLAPRLPHSVTCSLCGEVDQNEETQDFEKKLMECCICNEIVHPGCLQMDGEGLLNEELPNCWECPKCYQEDSSEKAQKRKMEESDEEAVQAKVLRPLRSCDEPLTPPPHSPTSMLQLIHDPVSPRGMVTRSSPGAGPSDHHSASRDERFKRRQLLRLQATERTMVLRQETLDKN

SEQ ID NO: 21370 - DNA, 6383 bp, Homo sapiens
ctcccggtctccaaagccagaagagaaggtttgattcagcaactgtttgctcccttttcctggtcgctctgaccctctctggatactgggttgatccacggaaaaaccgaagacgacgtttgggatttaattattcctctcagctttggaatcttttacttctcacttggacaagaactcaagagcagaatctccgtgttgcaatctggttcctaaggaggaagaggaaggcagccctggagtggtttctttacagtaatttcaacagaagagtgagagatggaacccgaagaagaaaggattcgttacagccagagattgcgtggtaccatgcgacgacgctatgaagatgatggcatttcagatgatgaaattgaaggaaaaagaacttttgacttggaagagaaactgcacaccaacaaatataatgccaattttgttacttttatggaaggaaaagattttaatgtagagtatattcagcggggtggcttgagagatcctctgattttcaagaattctgatggactcggaataaaaatgccggatccagacttcactgtgaatgatgtcaaaatgtgtgtggggagtcgtcgcatggtggatgtcatggacgtgaacacacagaaaggcattgaaatgaccatggctcagtggacacgctactatgagaccccagaggaggagcgagagaaactctataatgtcatcagcctcgagtttagccacaccaggctggagaatatggtgcagaggccctccacggtggatttcattgactgggtagacaacatgtggccaaggcacttgaaggaaagccagactgaatcaacaaatgccatcttggagatgcagtaccctaaagtgcagaagtactgtctaatgagtgttcgaggctgctatactgacttccatgtggactttggtggtacctctgtttggtatcacatccatcaagggggaaaggtcttctggctcatcccccctacagcccacaacctggagctgtacgagaattggctgctgtcagggaaacagggagacatctttctgggtgaccgggtatcagattgtcagcgcattgagctcaagcagggctataccttcgtcattccctcaggctggattcatgctgtgtatactcctacagacacattagtgtttgggggcaattttttgcatagcttcaacatccctatgcagttaaaaatatacaacattgaagatcggacacgggttccaaataagtttcgctatccattctactatgagatgtgttggtatgtgttggagcgctatgtgtactgcataaccaaccgttcccacctaactaaggaatttcagaaagagtccctcagcatggatttggagttaaatgggttggagtctgggaatggggatgaggaagcagtggatcgagaaccccgacgcttgagcagcaggcgttctgtcctcactagccctgtagcgaatggagtcaacctggattatgatggactgggcaaaacctgccgaagtcttccaagtctgaagaaaactttggctggggactcatcttctgactgtagccggggctcccacaatggacaagtgtgggatccccagtgtgctccccgaaaggacaggcaagtgcatctgacccattttgagcttgaaggccttcgctgccttgtagataagttggagtctctgccactgcacaagaaatgtgtccccacagggatagaagatgaagatgctctcattgctgatgtaaagattttgctggaggagcttgccaacagcgatcccaagttagccctcactggagttcctatagtacagtggccaaaaagggataagcttaaattccccactcggccaaaggtgcgggttcctaccatccccattacgaagcctcacactatgaaaccagctccacggttaacacctgtgaggccagctgctgcctccccgattgtgtcaggagccagacggagacgagtgcgatgtcgaaaatgcaaagcctgtgtgcaaggagagtgtggtgtttgccactactgcagagacatgaagaagtttggggggcctggacgcatgaagcagtcctgtgtcctccgacagtgcttggcacccagactgcctcactcagtcacatgttccctctgtggagaggtggatcagaatgaagagacacaagactttgagaagaaactcatggaatgctgtatctgcaatgagattgttcatcctggctgcctccagatggacggagaggggttgcttaacgaagaattgccaaattgctgggaatgtccaaagtgctaccaggaggacagctcggagaaagcccagaagcggaaaatggaagagagtgacgaagaagctgtgcaagccaaagtcctgcggcccctgcggagctgcgatgagcctctcacgcccccgcctcattcacccacttccatgctgcagctcatccatgacccggtttccccccggggtatggtgactcggtcatcccctggggctggccccagcgaccaccacagtgccagccgcgatgagcgcttcaaacggcggcagttgctgcggctgcaggccacagagcgcaccatggtacgggaaaaggagaacaatcccagcggcaaaaaggagctgtctgaagttgagaaagccaagatccggggatcgtacctcactgtcacgctacagaggcccaccaaagagctccacgggacatccattgtgcccaagctgcaggccatcacggcctcctctgccaaccttcgccattccccccgtgtgctagtgcagcactgcccagcccgaaccccccagcgtggggatgaggaggggctggggggagaggaggaggaagaggaggaggaggaggaggaagatgacagtgcagaggaggggggtgcagccaggctgaatggccggggcagttgggctcaggatggagacgaaagctggatgcagcgggaggtctggatgtctgtcttccgctacctcagccgcagagaactttgtgaatgtatgcgagtgtgcaagacgtggtataaatggtgctgcgacaagagactttggacaaaaattgacttgagtaggtgtaaggccattgtgccccaggccctcagtggcatcatcaagaggcagccagtcagccttgacctcagttggaccaacatctctaaaaagcaactgacatggctcgtcaataggctgccaggactgaaagacctcctcctagcaggctgctcctggtctgcagtctctgccctcagcacctccagctgcccccttctcaggacccttgatcttcggtgggcagtaggaatcaaggaccctcaaattcgggacttgcttactccaccggctgataaaccaggtcaggacaatcgcagcaagctccggaacatgaccgacttccggctggcaggccttgacatcacagatgccacgcttcgcctcataattcgccacatgcccctcctgtctcgactcgacctcagtcactgcagccaccttacagatcagtcctccaatctactcactgctgtcgggtcttccactcgctactctctcacagagctcaatatggcaggttgcaataaattgacagaccagaccctgatctacctacggcgcattgccaacgtcaccttgatcgaccttcgaggatgcaagcagatcactcgaaaagcctgcgagcacttcatctcagacttgtccatcaacagcctctactgcctgtctgacgagaagctgatacagaagatcagctaagacacacccagcccagattcaacaggaaaccgatcttcccctgactccccaccgaggagagcctctcctcgaccctgcacgggctctgaggccagcgtcacactccctctctgctctcctgtcccttgagcccttcctctacaggtggggcagagagggtggtggacaccaggcttatctgcctgctcctctccctcctaaggaaaagggagtagcagattgatctgaggggaaagcacaggctgtgctgtcgaggcgcctgctcgcttactcgcctgccaggaggccgggctctcagtttggggtgtttgtgcaaccttcatctgcactgggccctgtgcccctcctccccatccatggtccccagcagtgcctggttctgagcaaactcccagggaagaaaacggccctgtctccatggccaggttcttgtggtgtccagtgcgcgtctctcctccatcacactctcccggcttgcgcaggaggggccagcagccccaggagtcccagacccgtgccgatcacactggtgctgttgagatctcccaaacctcacgtccttaactgtgctctccctcctttcctctcccttgagcttggttctgcccagcactcgtgcttgttcacataattaggtttcccaccccagcctacccgacttacttgctagtctctatgaggtccttattgcacttattggggttgaagctcttcagaggagctggaactgtctaccccagggacacacccatttcgttgctacccaagtggattctgagacaggcaccatctccttgttccccctctctcttttgcctcccactgactgcccttttccatgtgtcttcattctgcctgaagaaggctttcccaggatgcacgtcctcagagggagcagcctatctcccccaagctggaggcggcagaggactgggccaagccccaacctgcctcccagccaggctcctccaggcctctggtttagcggagccccctgagcccaggcctgtgtctagccccagtggctcactgaactttcagggcagtcagggggtcctgcttagaagccagtcaccagccctctgcctgcagccatggaagggggtgtgcacgtgcctctgtgtgtgtggctgagtgtattctgcgcgtgtgtgtggagggagggagggaggggagcatggtgtctcccgctccaccgccctttgttgagccccatcagctgcccccttttactttgcattgaacggcctgtccaaagatcctctctctagggcagcagagagctttttgcactttaaaaaaaaaaagaaagaaagaaaggtcggaatttcttttgggtcaatatttttaagtgtgtgaggagatgctcagtagcagcagcctatggcaagagcttataaatgattgatgcaaatttgcactctgctccccctctgtaaggatactgatagcacaacctcttccccccaccccgccccgccttttggtcgtccatccctgtccctttctggccctcttcctgtagcccagtctcaggctttcctcttcctgaagccctacagagttagggaatggagcccaggcaccaggggtctaaagtgtgagccactgagaagagagacgccaactgcacccttgccacttccaaagcaatagaggcagagtggtcccctctttgccacctaggccagttttgaccctggcattaactggccttagaagaaactggatcctggtagggggtggcattttgtttgtttcttccaatctgctgaatcttttgactgcaccttacaaacagcagtctgctcccatgaccctctgcccacttccattggtctccaggccccaataatctggggttgaaactttgaggaaatgccagtgacttattccagagtgcctcagttaggggaacttctctgtaaagaaccctgggtattgagcaaaaaccttattatcgttaatgacctataattggaagcttcctgcctttttctttggttgctcctgtggaaaatactgaaaagattactttgttttattttgttgtctttttataaaaggggaggtggagagaccccttcagagcagggattgtgccgggagagtgcctctgactttgggacatttcatccacagaaatttccaagccaatggtttcttttgggttttggtttttatgtttgttttttggggtttggaaaaacatgcatttttaccgtgcacgtaaattggtcagcagaaaagggagcccagaaaaggcagcagatggaccatgcccttgctgggttttccttttctttgggactgtgaggggaaatggtttttagaggtgagggttggtccatgtggaggaaagaagtgtctctgttgggggacagaggaacctggggagtccatcgcatgtcctacaatctgctcttagacacggccttgccaggagagcctgccctcagactgcaggaccagaacccctgcctccatctttccaagcaccggggcgaaaaaccacaaaggaaaggaagaaaatttatatatatataatataaaatcacttggtgattaaaaaaataactgctccataaataaaactcctaaagtcacttatgttt

SEQ ID NO: 21371 - protein, 1162 aa, Homo sapiens; identical to SEQ ID NO: 2753

SEQ ID NO: 21372 - DNA, 6790 bp, Homo sapiens
ctcccggtctccaaagccagaagagaaggtttgattcagcaactgtttgctcccttttcctggtcgctctgaccctctctggatactgggttgatccacggaaaaaccgaagacgacgtttgggatttaattattcctctcagctttggaatcttttacttctcacttggacaagaactcaagagcagaatctccgtgttgcaatctggttcctaaggaggaagaggaaggcagccctggagtggtttctttacagtaatttcaacagaagagtgagagatggaacccgaagaagaaaggattcgttacagccagagattgcgtggtaccatgcgacgacgctatgaagatgatggcatttcagatgatgaaattgaaggaaaaagaacttttgacttggaagagaaactgcacaccaacaaatataatgccaattttgttacttttatggaaggaaaagattttaatgtagagtatattcagcggggtggcttgagagatcctctgattttcaagaattctgatggactcggaataaaaatgccggatccagacttcactgtgaatgatgtcaaaatgtgtgtggggagtcgtcgcatggtggatgtcatggacgtgaacacacagaaaggcattgaaatgaccatggctcagtggacacgctactatgagaccccagaggaggagcgagagaaactctataatgtcatcagcctcgagtttagccacaccaggctggagaatatggtgcagaggccctccacggtggatttcattgactgggtagacaacatgtggccaaggcacttgaaggaaagccagactgaatcaacaaatgccatcttggagatgcagtaccctaaagtgcagaagtactgtctaatgagtgttcgaggctgctatactgacttccatgtggactttggtggtacctctgtttggtatcacatccatcaagggggaaaggtcttctggctcatcccccctacagcccacaacctggagctgtacgagaattggctgctgtcagggaaacagggagacatctttctgggtgaccgggtatcagattgtcagcgcattgagctcaagcagggctataccttcgtcattccctcaggctggattcatgctgtgtatactcctacagacacattagtgtttgggggcaattttttgcatagcttcaacatccctatgcagttaaaaatatacaacattgaagatcggacacgggttccaaataagtttcgctatccattctactatgagatgtgttggtatgtgttggagcgctatgtgtactgcataaccaaccgttcccacctaactaaggaatttcagaaagagtccctcagcatggatttggagttaaatgggttggagtctgggaatggggatgaggaagcagtggatcgagaaccccgacgcttgagcagcaggcgttctgtcctcactagccctgtagcgaatggagtcaacctggattatgatggactgggcaaaacctgccgaagtcttccaagtctgaagaaaactttggctggggactcatcttctgactgtagccggggctcccacaatggacaagtgtgggatccccagtgtgctccccgaaaggacaggcaagtgcatctgacccattttgagcttgaaggccttcgctgccttgtagataagttggagtctctgccactgcacaagaaatgtgtccccacagggatagaagatgaagatgctctcattgctgatgtaaagattttgctggaggagcttgccaacagcgatcccaagttagccctcactggagttcctatagtacagtggccaaaaagggataagcttaaattccccactcggccaaaggtgcgggttcctaccatccccattacgaagcctcacactatgaaaccagctccacggttaacacctgtgaggccagctgctgcctccccgattgtgtcaggagccagacggagacgagtgcgatgtcgaaaatgcaaagcctgtgtgcaaggagagtgtggtgtttgccactactgcagagacatgaagaagtttggggggcctggacgcatgaagcagtcctgtgtcctccgacagtgcttggcacccagactgcctcactcagtcacatgttccctctgtggagaggtggatcagaatgaagagacacaagactttgagaagaaactcatggaatgctgtatctgcaatgagattgttcatcctggctgcctccagatggacggagaggggttgcttaacgaagaattgccaaattgctgggaatgtccaaagtgctaccaggaggacagctcggagaaagcccagaagcggaaaatggaagagagtgacgaagaagctgtgcaagccaaagtcctgcggcccctgcggagctgcgatgagcctctcacgcccccgcctcattcacccacttccatgctgcagctcatccatgacccggtttccccccggggtatggtgactcggtcatcccctggggctggccccagcgaccaccacagtgccagccgcgatgagcgcttcaaacggcggcagttgctgcggctgcaggccacagagcgcaccatggtacgggaaaaggagaacaatcccagcggcaaaaaggagctgtctgaagttgagaaagccaagatccggggatcgtacctcactgtcacgctacagaggcccaccaaagagctccacgggacatccattgtgcccaagctgcaggccatcacggcctcctctgccaaccttcgccattccccccgtgtgctagtgcagcactgcccagcccgaaccccccagcgtggggatgaggaggggctggggggagaggaggaggaagaggaggaggaggaggaggaagatgacagtgcagaggaggggggtgcagccaggctgaatggccggggcagttgggctcaggatggagacgaaagctggatgcagcgggaggtctggatgtctgtcttccgctacctcagccgcagagaactttgtgaatgtatgcgagtgtgcaagacgtggtataaatggtgctgcgacaagagactttggacaaaaattgacttgagtaggtgtaaggccattgtgccccaggccctcagtggcatcatcaagaggcagccagtcagccttgacctcagttggaccaacatctctaaaaagcaactgacatggctcgtcaataggctgccaggactgaaagacctcctcctagcaggctgctcctggtctgcagtctctgccctcagcacctccagctgcccccttctcaggacccttgatcttcggtgggcagtaggaatcaaggaccctcaaattcgggacttgcttactccaccggctgataaaccaggtcaggacaatcgcagcaagctccggaacatgaccgacttccggctggcaggccttgacatcacagatgccacgcttcgcctcataattcgccacatgcccctcctgtctcgactcgacctcagtcactgcagccaccttacagatcagtcctccaatctactcactgctgtcgggtcttccactcgctactctctcacagagctcaatatggcaggttgcaataaattgacagaccagaccctgatctacctacggcgcattgccaacgtcaccttgatcgaccttcgaggatgcaagcagatcactcgaaaagcctgcgagcacttcatctcagacttgtccatcaacagcctctactgcctgtctgacgagaagctgatacagaagatcagctaagacacacccagcccagattcaacaggaaaccgatcttcccctgactccccaccgaggagagcctctcctcgaccctgcacgggctctgaggccagcgtcacactccctctctgctctcctgtcccttgagcccttcctctacaggtggggcagagagggtggtggacaccaggcttatctgcctgctcctctccctcctaaggaaaagggagtagcagattgatctgaggggaaagcacaggctgtgctgtcgaggcgcctgctcgcttactcgcctgccaggaggccgggctctcagtttggggtgtttgtgcaaccttcatctgcactgggccctgtgcccctcctccccatccatggtccccagcagtgcctggttctgagcaaactcccagggaagaaaacggccctgtctccatggccaggttcttgtggtgtccagtgcgcgtctctcctccatcacactctcccggcttgcgcaggaggggccagcagccccaggagtcccagacccgtgccgatcacactggtgctgttgagatctcccaaacctcacgtccttaactgtgctctccctcctttcctctcccttgagcttggttctgcccagcactcgtgcttgttcacataattaggtttcccaccccagcctacccgacttacttgctagtctctatgaggtccttattgcacttattggggttgaagctcttcagaggagctggaactgtctaccccagggacacacccatttcgttgctacccaagtggattctgagacaggcaccatctccttgttccccctctctcttttgcctcccactgactgcccttttccatgtgtcttcattctgcctgaagaaggctttcccaggatgcacgtcctcagagggagcagcctatctcccccaagctggaggcggcagaggactgggccaagccccaacctgcctcccagccaggctcctccaggcctctggtttagcggagccccctgagcccaggcctgtgtctagccccagtggctcactgaactttcagggcagtcagggggtcctgcttagaagccagtcaccagccctctgcctgcagccatggaagggggtgtgcacgtgcctctgtgtgtgtggctgagtgtattctgcgcgtgtgtgtggagggagggagggaggggagcatggtgtctcccgctccaccgccctttgttgagccccatcagctgcccccttttactttgcattgaacggcctgtccaaagatcctctctctagggcagcagagagctttttgcactttaaaaaaaaaaagaaagaaagaaaggtcggaatttcttttgggtcaatatttttaagtgtgtgaggagatgctcagtagcagcagcctatggcaagagcttataaatgattgatgcaaatttgcactctgctccccctctgtaaggatactgatagcacaacctcttccccccaccccgccccgccttttggtcgtccatccctgtccctttctggccctcttcctgtagcccagtctcaggctttcctcttcctgaagccctacagagttagggaatggagcccaggcaccaggggtctaaagtgtgagccactgagaagagagacgccaactgcacccttgccacttccaaagcaatagaggcagagtggtcccctctttgccacctaggccagttttgaccctggcattaactggccttagaagaaactggatcctggtagggggtggcattttgtttgtttcttccaatctgctgaatcttttgactgcaccttacaaacagcagtctgctcccatgaccctctgcccacttccattggtctccaggccccaataatctggggttgaaactttgaggaaatgccagtgacttattccagagtgcctcagttaggggaacttctctgtaaagaaccctgggtattgagcaaaaaccttattatcgttaatgacctataattggaagcttcctgcctttttctttggttgctcctgtggaaaatactgaaaagattactttgttttattttgttgtctttttataaaaggggaggtggagagaccccttcagagcagggattgtgccgggagagtgcctctgactttgggacatttcatccacagaaatttccaagccaatggtttcttttgggttttggtttttatgtttgttttttggggtttggaaaaacatgcatttttaccgtgcacgtaaattggtcagcagaaaagggagcccagaaaaggcagcagatggaccatgcccttgctgggttttccttttctttgggactgtgaggggaaatggtttttagaggtgagggttggtccatgtggaggaaagaagtgtctctgttgggggacagaggaacctggggagtccatcgcatgtcctacaatctgctcttagacacggccttgccaggagagcctgccctcagactgcaggaccagaacccctgcctccatctttccaagcaccggggcgaaaaaccacaaaggaaaggaagaaaatttatatatatataatataaaatcacttggtgattaaaaaaataactgctccataaataaaactcctaaagtcacttatgtttaaagggtttggttgtgttttttgtttttcggagaaatattgtaaatatatatttttttgttgctgatttagagtcaatctccaatgttgtgctaaaaagtttaaattaaatgtaagcattaaggggataagtcttatgctatctcagttgacacattgaggttattttgggccagagaaggaggaagctagttggactttgttttgttttccaaaagttctccactattggttttagagagagcaaggacatctttcctctgacacgtgggaatgggtgatatttgtgtaataaaatttttaaaagacaaaaaaagaaatagcctccaatgggaaatattttaatttaggttttgtttttgtttgggggtttttgtttttttaaaaaaataaaaaggctttaaaaac

SEQ ID NO: 21373 - protein, 1162 aa, Homo sapiens; identical to SEQ ID NO: 2753

SEQ ID NO: 21374 - DNA, 576 bp, Homo sapiens
agaaggtttgattcagcaactgtttgctcccttttcctggtcgctctgaccctctctggatactgggttgatccacggaaaaaccgaagacgacgtttgggatttaattattcctctcagctttggaatcttttacttctcacttggacaagaactcaagagcagaatctccgtgttgcaatctggttcctaaggaggaagaggaaggcagccctggagtggtttctttacagtaatttcaacagaagagtgagagatggaacccgaagaagaaaggattcgttacagccagagattgtagagacggggttggctggtcttgaactcgtgacctcaggtgatcctcccgcctccgcctcccaaggtgttgggattacagccgtgagccactgcatctggcctgtctgttcatttcataaacatctgagagggtctttgctacaggacttcaggagcactagcatcgatggtggcagatgaaaaagcagatttttttcccctgaagctctttaataatggcaaaagttaaaaagtgttttctctgtagtcctgaatttactgaatgtattcccttcc

SEQ ID NO: 21375 - protein, 159 aa, Homo sapiens [sequence omitted]

SEQ ID NO: 21376 - DNA, 731 bp, Homo sapiens
agaaggtttgattcagcaactgtttgctcccttttcctggtcgctctgaccctctctggatactgggttgatccacggaaaaaccgaagacgacgtttgggatttaattattcctctcagctttggaatcttttacttctcacttggacaagaactcaagagcagaatctccgtgttgcaatctggttcctaaggaggaagaggaaggcagccctggagtggtttctttacagtaatttcaacagaagagtgagagatggaacccgaagaagaaaggattcgttacagccagagattgcgtggtaccatgcgacgacgctatgaagatgatggcatttcagatgatgaaattgaaggaaaaagaacttttgacttggaagagaaactgcacaccaacaaatataatgccaattttgttacttttatggaaggaaaaggtcagtattgttttggttccagcttacagtcctttgatgtgggaagccatagactctgagcattgggggtttagcctttatccagctaaaatattgcctgttgatgttatctatctattttctcttgttatacaatgccatttgcatgcacttatcccccagtcctcccaccctgtgagtcattctctcctatattagaagtaatctttttattagggcaggagtattgttggatttttttgcctaacggcctcttcctccttcttctatcccttggtttaaatttaattaaaa

SEQ ID NO: 21377 - protein, 79 aa, Homo sapiens [sequence omitted]

SEQ ID NO: 21378 - DNA, 555 bp, Homo sapiens
ttttatctttagggtttaactttttaccaagtactcacagacagagaaaaaccccaagaacctaaaatttaaaacagaaaacaaggatatgagtgacatacataaataaaagccttgacatacacacaaactgcacaatactgccgttttaacagatcaagtgcaataagttcaaagttcatgaaaagaaagaatgtgccatctttgtttgaaacataatcaaacactggctatcaaatatttatagctatctaattcaggatgttaagcagacagacgttagcaagaaaatgttaaagtaggcggaaagtcgtggctcatgcctgtaatctcagcattctgggaggccaaggcaagtggatcacccgaggtcaggagttccagaccagcctggcgtcaagcattccactggccttggtctcccaaagtgctgggattacaggcctaagtcactgtacctagacagactaaacttttaaaatcaactagacactttattatttgttctaaatggtccaaataccaaacatcatcaatgtggtagtctgacatgtg

SEQ ID NO: 21379 - protein, 42 aa, Homo sapiens [sequence omitted]

SEQ ID NO: 21380 - DNA, 457 bp, Homo sapiens
ttaaaacggcagtattgtgcagtttgtgtgtatgtcaaggcttttatttatgtatgtcactcatatccttgttttctgttttaaattttaggttcttggggtttttctctgtctgtgagtacttggtaaaaagttaaaccctaaagataaaaggcagcaaatagtgaccaaacgaatgtttttggcaaatacattggtgaaggcctccttcagtcaatctgttgccgaggctggaatgtagtggtgcgatctcggctcacttaaacctctgcctcttgggttcaagtgattctcctgcctcagcctcctgagtagctgggattacagcgtggtaccatgcgacgacgctatgaagatgatggcatttcagatgatgaaattgaaggaaaaagaacttttgacttggaagagaaactgcacaccaacaaatataatgccaattttgttacttttatgg

SEQ ID NO: 21381 - protein, 39 aa, Homo sapiens
MRRRYEDDGISDDEIEGKRTFDLEEKLHTNKYNANFVTF

SEQ ID NO: 21382 - DNA, 637 bp, Homo sapiens
aaataggtttcataaaagtttatcaaaggcacatagtttactgatctcatttgagatcatgttaatgtttgaaattcccttgaacctcactgaagactaaggttaatttgtagcaatagttaaaatttgcttagtcagatataaatagccagaaaacctaacaggatggaagttgaaacagagctaagatttatgaaagtgtctgccaccacacccagctaattttttgtatttttagtagagacgaggttttaccatgttggccaggctgttctggaactcctgacctcgtgattcacctgcctcgacttcccaaagtgcggggattataggtgtgagctgccacgcccggccctcattagagagtcttatagcaaatgtctctagctgatcatctagtggtaatgtaaatcagctaagtacatacatattgattgattgacttaaagtatttactagatcgctgatttgttacaagcatttgttacttttgcattcctttaagaaaactttggggctgggtgcagtggctcatacatgtgatcacaacactttggtagaccaaattgggaggatcatttttgaactctggggtttgagaccagcctggacaacattgcaagaccgcatctctatt

SEQ ID NO: 21383 - protein, 51 aa, Homo sapiens
NRAKIYESVCHHTQLIFCIFSRDEVLPCWPGCSGTPDLVIHLPRLPKVRGL

SEQ ID NO: 21384 - DNA, 957 bp, Homo sapiens
tgaaggataagaaagatctactgccttggaccttctagggtttaccacatagtcaagttctataggctgggaaaattgcttgcctttcttctacctggtggtcttaattttgtacctgtttatcagttgagggagacgactgggtcatgtcaatggctgttaacagactaaagttttttaactcacaggtcttctggctcatcccccctacagcccacaacctggagctgtacgagaattggctgctgtcagggaaacagggagacatctttctgggtgaccgggtatcagattgtcagcgcattgagctcaagcagggctataccttcgtcattccctcaggctggattcatgctgtgtatactcctacagacacattagtgtttgggggcaattttttgcatagcttcaacatccctatgcagttaaaaatatacaacattgaagatcggacacgggtaagtaatcttatgtaacagttgcatgtgaagaggtttactccagttatgatagatgttacaagagattcactgatggtttatcaaaacttccatttttctttcagttaaaatgcagtgttgacattttgggaacacacaaaattttaaatttaatttttttttttttaaggcagaatcttgttctgttttccaggctagagtgcagtggcgtgatcatggatgattgcagcctcaacctcccaggctcaagcatcttcctgcctcagcctcccaagtagctgggaccgtgggtgcacaccacatctgactaatttttaatttttttcgtagagacttggtctcactgcgttgcccaggctggtctagaactcctggttcaagcagtcctcccacctcagcctcccaaagtgctgggattacaggtgtgagccactgcgactggccaaataaaaattttaacacgatttacatactccgttttagggactccaattct

SEQ ID NO: 21385 - protein, 109 aa, Homo sapiens
MSMAVNRLKFFNSQVFWLIPPTAHNLELYENWLLSGKQGDIFLGDRVSDCQRIELKQGYTFVIPSGWIHAVYTPTDTLVFGGNFLHSFNIPMQLKIYNIEDRTRVSNLM

SEQ ID NO: 21386 - DNA, 3011 bp, Homo sapiens
actctcgctcggctccccctcctgccatcttccgttgcaaagcatttctgggagctgcatgtgggtgacgcagcagcattgttcgcaggcacaggaagccgcggctgagctgaagggctcgagaaggagcccagagcgctgcacgctgctccctctgggtagtctgaagggtcagagctggactgccctgccctatgtgctctgggagattccagaatattcaagtaaatccggattttcccagaggcagaatatctaactccttcaggagaacttccagtacagaaaacaaaacaaagacgctggggaaacttcaccaagagcctcggcagctccagagcgacgggaaacgaaaggtcagggggtcgatcggcaaaccctttctggtttggggtgcgtgtaactatagggacttttgtctcagtgaagaggcaggagaaactgcctgccgggcgagtccaggacaatgctatgttacttcgtgttgcttgagccgtcattgcacttgttccctcacctggtgggatgtgcttttgaattgggttggttggcttttgagaatcctttccctctctgcccaggcaccttctgttctctttcccttcctgtgatctgtagggtgtgggcttgtgtttaaatgttctcccgaatgcctggagccgagataggcgtcagcctttcccgcactccacccccgctctcctatcccaaaccccctctagtgaagggtggtggcttctttatatggtttcttgtagggcctcagctggagtctgccttttttgatgaaagcagggcgtgcttggttgaatggccccagcaaaataaggcttggaaggaaatctgcatttccctccacacccacacataccccagtaactgagtcttgtatgtgtgaacagctgccaccccccacacacacaccgacacagttttccgcctacccttccctattccccacaaaaatcttgcaggtagaattagactgcttttggtgaacagttaagttccttttctactcttgaacaatcgcagatcttactgtgcagtctgttttgctgaaagtggaaagtccccgtttgtggacagctcagttcacttcagcagaggaaatgggcagagtcctactcttcgtcagtgcgaagtgggggaggggagccatgcactccctagcacacattttgaatggacctgaatttttcaccctagggagattaggagcccataccagagccttgtcccacgtggcaccacaccccgcctcttcacccccacgctgtatggtactaacagaaaaggatgccatagcaacttgaagtaaataaaacatccgcagatgaaatgagtttgggggaaggtgagaggcatctggagacttggcaaaaggggatcttagtagaggagcttcttggctatgagtgaaagggtctttctgagacccaactttgggatttggagcaggatccttaggttaagaatgaaaatacataaaagtcctggtctccgggacagagcacacaggattatgagaaaaattattagcaatggcccagacttgctaacctgtccaggatcagagtttagtgtttgccgaaacagttaccatcctgtacatacatacctagggtagccagaaaaggaatcatgtaacttgtctcccagatttattttgctgttggtgttgctttagggctcataaggtcagaagaagaaggattccattatactagaagatttgggtttcaggagtttctgtctaaaacgaaaagatttggccaggtgcagtggctcatgcctgtaatcccagcactttgggaggccgaggcaagcggatcacctgaggtcaggagttcgagaccagcctggccaacatggtgaaactccgtctctactaaaaatacaaaaattagctgggtatggtggcaggtgcctgtaatcccagctactcaggaggctgaggcaggagaatagcttgaacacgggaggcgaggcggaggttgcagtgagccgagatagcgccactgcactccagcctgagcaacagagtgagactccatctaaaaaataaaaattaaaaaaaatatatttgtttcaaaataacagtcaaccagtgtgattcacttaagtggcattttctcactgtagcattgttcgtaagtcatttaaattttattggtaatgccatgagaacttttgcccctaagattgttcctttcccccatttagaggaataaaggcaaatagcagactctgtgggtgtgtgtatgtgtgtgtgtgtgtgtgtgtgtgtgagagagagagagaaagaaagagatttgagattgagatttctgtaatcagccttagaagaaaagagccctgggttgaatctgcacattaggctgtaccattcatctcattaattctgtattagcaaatcatttttatgccacttggttcacatctgagaaatgaaggcaattacctgataatattcactaactggtgtagaaaagtgaagaagcaataataaagttttactgtcatatgtagaactgtatgagaagtaacacttgtcaccacagtaagttagttgtttcagtgtgttagtataattagtacacaagtaagggattgggaacaaaggtgagtttgaagtcctttctgctcccccaccaccaccatccgcccccagtagagatgggtcttgctgtgtttcccaggctggtctcaaactcctggctcaagtgatcctcccacctctcaacctgtaatcccagcactttgggaggcccaggcaggtggatcacctgaggtcaggagttcaagaccagcctggccaacatggtgaaacaccgtctgtaccaaaaatacaaaaattaagccaggcgtggtggcatgcgcctataatcccagctacttgcaaggctggggcaggagaatcacttgaacccaggaggcagaggttgcagtgagccgagatcgcaccattgcacttcagcctgggggacaagagcgaaactgtctcaaag

SEQ ID NO: 21387 - protein, 138 aa, Homo sapiens [sequence omitted]

SEQ ID NO: 21388 - DNA, 463 bp, Homo sapiens
aacaaaacaaagacgctggggaaacttcaccaagagcctcggcagctccagagcgacgggaaacgaaagattttgctggaggagcttgccaacagcgatcccaagttagccctcactggagttcctatagtacagtggccaaaaagggataagtgtggaatggaaaagagaagaaaggggccgggcatggtggctcacacctgtaatcccagcactttgggaggcccaggcaggtggatcacctgaggtcaggagttcaagaccagcctggccaacatggtgaaacaccgtctgtaccaaaaatacaaaaattaagccaggcgtggtggcatgcgcctataatcccagctacttgcaaggctggggcaggagaatcacttgaacccaggaggcagaggttgcagtgagccgagatcgcaccattgcacttcagcctgggggacaagagcgaaactgtctcaaa

SEQ ID NO: 21389 - protein, 50 aa, Homo sapiens
YSGQKGISVEWKREERGRAWWLTPVIPALWEAQAGGSPEVRSSRPAWPTW

SEQ ID NO: 21390 - DNA, 4028 bp, Homo sapiens
tattaaattgaagccagcatgttgtggtttgtggcctgtagatttgtagactgcagtggaaagccaggcctatccctttcagttctggtctggcctggctagaaaatgtcaggatagcactgaggcagaacttgagggtgagagaggactctgtaagcctgataaagagcctcttttgacctgatacagtaatgggctgaaggcagggtgaattgtggatgtgctgagtagcaccctgcatttcaggcagctgcgagtgattgacaagggagggaacggagcaggccttcttagctttagacagtaagaagtctagaaacttcaagaggctcccttatatacacttcagcaggaaccatgccattttaatacagatgaaggggctatagactgttgcttgctatgggtccctaacaactgttgtgttctcaaacactccagaataaatcagggtaaagtggtcaagttatatactatcaacatgtaggtttgcaaagcgtctagttgttgtagagttcaaggcaattttttgcctattctgtgaggcaaaaaatgataaggtgtgatccctgtacacttgtagaagaacgagcctccaggtactctgcttttcccagaagccataagcagcctgtgatgggagctccactgatcaagttaatgaaggcgagttctcttcccttctatcacaggtgctgcgacaagagactttggacaaaaattgacttgagtaggtgtaaggccattgtgccccaggccctcagtggcatcatcaagaggcagccagtcagccttgacctcagttggaccaacatctctaaaaagcaactgacatggctcgtcaataggctgccaggactgaaagacctcctcctagcaggctgctcctggtctgcagtctctgccctcagcacctccagctgcccccttctcaggacccttgatcttcggtgggcagtaggaatcaaggaccctcaaattcgggacttgcttactccaccggctgataaaccaggtcaggacaatcgcagcaagctccggaacatgaccgacttccggctggcaggccttgacatcacagatgccacgcttcgcctcataattcgccacatgcccctcctgtctcgactcgacctcagtcactgcagccaccttacagatcagtcctccaatctactcactgctgtcgggtcttccactcgctactctctcacagagctcaatatggcaggttgcaataaattgacagaccagaccctgatctacctacggcgcattgccaacgtcaccttgatcgaccttcgaggatgcaagcagatcactcgaaaagcctgcgagcacttcatctcagacttgtccatcaacagcctctactgcctgtctgacgagaagctgatacagaagatcagctaagacacacccagcccagattcaacaggaaaccgatcttcccctgactccccaccgaggagagcctctcctcgaccctgcacgggctctgaggccagcgtcacactccctctctgctctcctgtcccttgagcccttcctctacaggtggggcagagagggtggtggacaccaggcttatctgcctgctcctctccctcctaaggaaaagggagtagcagattgatctgaggggaaagcacaggctgtgctgtcgaggcgcctgctcgcttactcgcctgccaggaggccgggctctcagtttggggtgtttgtgcaaccttcatctgcactgggccctgtgcccctcctccccatccatggtccccagcagtgcctggttctgagcaaactcccagggaagaaaacggccctgtctccatggccaggttcttgtggtgtccagtgcgcgtctctcctccatcacactctcccggcttgcgcaggaggggccagcagccccaggagtcccagacccgtgccgatcacactggtgctgttgagatctcccaaacctcacgtccttaactgtgctctccctcctttcctctcccttgagcttggttctgcccagcactcgtgcttgttcacataattaggtttcccaccccagcctacccgacttacttgctagtctctatgaggtccttattgcacttattggggttgaagctcttcagaggagctggaactgtctaccccagggacacacccatttcgttgctacccaagtggattctgagacaggcaccatctccttgttccccctctctcttttgcctcccactgactgcccttttccatgtgtcttcattctgcctgaagaaggctttcccaggatgcacgtcctcagagggagcagcctatctcccccaagctggaggcggcagaggactgggccaagccccaacctgcctcccagccaggctcctccaggcctctggtttagcggagccccctgagcccaggcctgtgtctagccccagtggctcactgaactttcagggcagtcagggggtcctgcttagaagccagtcaccagccctctgcctgcagccatggaagggggtgtgcacgtgcctctgtgtgtgtggctgagtgtattctgcgcgtgtgtgtggagggagggagggaggggagcatggtgtctcccgctccaccgccctttgttgagccccatcagctgcccccttttactttgcattgaacggcctgtccaaagatcctctctctagggcagcagagagctttttgcactttaaaaaaaaaaagaaagaaagaaaggtcggaatttcttttgggtcaatatttttaagtgtgtgaggagatgctcagtagcagcagcctatggcaagagcttataaatgattgatgcaaatttgcactctgctccccctctgtaaggatactgatagcacaacctcttccccccaccccgccccgccttttggtcgtccatccctgtccctttctggccctcttcctgtagcccagtctcaggctttcctcttcctgaagccctacagagttagggaatggagcccaggcaccaggggtctaaagtgtgagccactgagaagagagacgccaactgcacccttgccacttccaaagcaatagaggcagagtggtcccctctttgccacctaggccagttttgaccctggcattaactggccttagaagaaactggatcctggtagggggtggcattttgtttgtttcttccaatctgctgaatcttttgactgcaccttacaaacagcagtctgctcccatgaccctctgcccacttccattggtctccaggccccaataatctggggttgaaactttgaggaaatgccagtgacttattccagagtgcctcagttaggggaacttctctgtaaagaaccctgggtattgagcaaaaaccttattatcgttaatgacctataattggaagcttcctgcctttttctttggttgctcctgtggaaaatactgaaaagattactttgttttattttgttgtctttttataaaaggggaggtggagagaccccttcagagcagggattgtgccgggagagtgcctctgactttgggacatttcatccacagaaatttccaagccaatggtttcttttgggttttggtttttatgtttgttttttggggtttggaaaaacatgcatttttaccgtgcacgtaaattggtcagcagaaaagggagcccagaaaaggcagcagatggaccatgcccttgctgggttttccttttctttgggactgtgaggggaaatggtttttagaggtgagggttggtccatgtggaggaaagaagtgtctctgttgggggacagaggaacctggggagtccatcgcatgtcctacaatctgctcttagacacggccttgccaggagagcctgccctcagactgcaggaccagaacccctgcctccatctttccaagcaccggggcgaaaaaccacaaaggaaaggaagaaaatttatatatatataatataaaatcacttggtgattaaaaaaataactgctccataaataaaactcctaaagtcacttatgttt

SEQ ID NO: 21391 - protein, 286 aa, Homo sapiens [sequence omitted]

SEQ ID NO: 21392 - DNA, 4435 bp, Homo sapiens
tattaaattgaagccagcatgttgtggtttgtggcctgtagatttgtagactgcagtggaaagccaggcctatccctttcagttctggtctggcctggctagaaaatgtcaggatagcactgaggcagaacttgagggtgagagaggactctgtaagcctgataaagagcctcttttgacctgatacagtaatgggctgaaggcagggtgaattgtggatgtgctgagtagcaccctgcatttcaggcagctgcgagtgattgacaagggagggaacggagcaggccttcttagctttagacagtaagaagtctagaaacttcaagaggctcccttatatacacttcagcaggaaccatgccattttaatacagatgaaggggctatagactgttgcttgctatgggtccctaacaactgttgtgttctcaaacactccagaataaatcagggtaaagtggtcaagttatatactatcaacatgtaggtttgcaaagcgtctagttgttgtagagttcaaggcaattttttgcctattctgtgaggcaaaaaatgataaggtgtgatccctgtacacttgtagaagaacgagcctccaggtactctgcttttcccagaagccataagcagcctgtgatgggagctccactgatcaagttaatgaaggcgagttctcttcccttctatcacaggtgctgcgacaagagactttggacaaaaattgacttgagtaggtgtaaggccattgtgccccaggccctcagtggcatcatcaagaggcagccagtcagccttgacctcagttggaccaacatctctaaaaagcaactgacatggctcgtcaataggctgccaggactgaaagacctcctcctagcaggctgctcctggtctgcagtctctgccctcagcacctccagctgcccccttctcaggacccttgatcttcggtgggcagtaggaatcaaggaccctcaaattcgggacttgcttactccaccggctgataaaccaggtcaggacaatcgcagcaagctccggaacatgaccgacttccggctggcaggccttgacatcacagatgccacgcttcgcctcataattcgccacatgcccctcctgtctcgactcgacctcagtcactgcagccaccttacagatcagtcctccaatctactcactgctgtcgggtcttccactcgctactctctcacagagctcaatatggcaggttgcaataaattgacagaccagaccctgatctacctacggcgcattgccaacgtcaccttgatcgaccttcgaggatgcaagcagatcactcgaaaagcctgcgagcacttcatctcagacttgtccatcaacagcctctactgcctgtctgacgagaagctgatacagaagatcagctaagacacacccagcccagattcaacaggaaaccgatcttcccctgactccccaccgaggagagcctctcctcgaccctgcacgggctctgaggccagcgtcacactccctctctgctctcctgtcccttgagcccttcctctacaggtggggcagagagggtggtggacaccaggcttatctgcctgctcctctccctcctaaggaaaagggagtagcagattgatctgaggggaaagcacaggctgtgctgtcgaggcgcctgctcgcttactcgcctgccaggaggccgggctctcagtttggggtgtttgtgcaaccttcatctgcactgggccctgtgcccctcctccccatccatggtccccagcagtgcctggttctgagcaaactcccagggaagaaaacggccctgtctccatggccaggttcttgtggtgtccagtgcgcgtctctcctccatcacactctcccggcttgcgcaggaggggccagcagccccaggagtcccagacccgtgccgatcacactggtgctgttgagatctcccaaacctcacgtccttaactgtgctctccctcctttcctctcccttgagcttggttctgcccagcactcgtgcttgttcacataattaggtttcccaccccagcctacccgacttacttgctagtctctatgaggtccttattgcacttattggggttgaagctcttcagaggagctggaactgtctaccccagggacacacccatttcgttgctacccaagtggattctgagacaggcaccatctccttgttccccctctctcttttgcctcccactgactgcccttttccatgtgtcttcattctgcctgaagaaggctttcccaggatgcacgtcctcagagggagcagcctatctcccccaagctggaggcggcagaggactgggccaagccccaacctgcctcccagccaggctcctccaggcctctggtttagcggagccccctgagcccaggcctgtgtctagccccagtggctcactgaactttcagggcagtcagggggtcctgcttagaagccagtcaccagccctctgcctgcagccatggaagggggtgtgcacgtgcctctgtgtgtgtggctgagtgtattctgcgcgtgtgtgtggagggagggagggaggggagcatggtgtctcccgctccaccgccctttgttgagccccatcagctgcccccttttactttgcattgaacggcctgtccaaagatcctctctctagggcagcagagagctttttgcactttaaaaaaaaaaagaaagaaagaaaggtcggaatttcttttgggtcaatatttttaagtgtgtgaggagatgctcagtagcagcagcctatggcaagagcttataaatgattgatgcaaatttgcactctgctccccctctgtaaggatactgatagcacaacctcttccccccaccccgccccgccttttggtcgtccatccctgtccctttctggccctcttcctgtagcccagtctcaggctttcctcttcctgaagccctacagagttagggaatggagcccaggcaccaggggtctaaagtgtgagccactgagaagagagacgccaactgcacccttgccacttccaaagcaatagaggcagagtggtcccctctttgccacctaggccagttttgaccctggcattaactggccttagaagaaactggatcctggtagggggtggcattttgtttgtttcttccaatctgctgaatcttttgactgcaccttacaaacagcagtctgctcccatgaccctctgcccacttccattggtctccaggccccaataatctggggttgaaactttgaggaaatgccagtgacttattccagagtgcctcagttaggggaacttctctgtaaagaaccctgggtattgagcaaaaaccttattatcgttaatgacctataattggaagcttcctgcctttttctttggttgctcctgtggaaaatactgaaaagattactttgttttattttgttgtctttttataaaaggggaggtggagagaccccttcagagcagggattgtgccgggagagtgcctctgactttgggacatttcatccacagaaatttccaagccaatggtttcttttgggttttggtttttatgtttgttttttggggtttggaaaaacatgcatttttaccgtgcacgtaaattggtcagcagaaaagggagcccagaaaaggcagcagatggaccatgcccttgctgggttttccttttctttgggactgtgaggggaaatggtttttagaggtgagggttggtccatgtggaggaaagaagtgtctctgttgggggacagaggaacctggggagtccatcgcatgtcctacaatctgctcttagacacggccttgccaggagagcctgccctcagactgcaggaccagaacccctgcctccatctttccaagcaccggggcgaaaaaccacaaaggaaaggaagaaaatttatatatatataatataaaatcacttggtgattaaaaaaataactgctccataaataaaactcctaaagtcacttatgtttaaagggtttggttgtgttttttgtttttcggagaaatattgtaaatatatatttttttgttgctgatttagagtcaatctccaatgttgtgctaaaaagtttaaattaaatgtaagcattaaggggataagtcttatgctatctcagttgacacattgaggttattttgggccagagaaggaggaagctagttggactttgttttgttttccaaaagttctccactattggttttagagagagcaaggacatctttcctctgacacgtgggaatgggtgatatttgtgtaataaaatttttaaaagacaaaaaaagaaatagcctccaatgggaaatattttaatttaggttttgtttttgtttgggggtttttgtttttttaaaaaaataaaaaggctttaaaaac

SEQ ID NO: 21393 - protein, 286 aa, Homo sapiens [sequence omitted]

SEQ ID NO: 21394 - DNA, 1968 bp, Homo sapiens
gacgagaagctgatacagaagatcagctaagacacacccagcccagattcaacaggaaaccgatcttcccctgactccccaccgaggagagcctctcctcgaccctgcacgggctctgaggccagcgtcacactccctctctgctctcctgtcccttgagcccttcctctacaggtggggcagagagggtggtggacaccaggcttatctgcctgctcctctccctcctaaggaaaagggagtagcagattgatctgaggggaaagcacaggctgtgctgtcgaggcgcctgctcgcttactcgcctgccaggaggccgggctctcagtttggggtgtttgtgcaaccttcatctgcactgggccctgtgcccctcctccccatccatggtccccagcagtgcctggttctgagcaaactcccagggaagaaaacggccctgtctccatggccaggttcttgtggtgtccagtgcgcgtctctctgagtgtattctgcgcgtgtgtgtggagggagggagggaggggagcatggtgtctcccgctccaccgccctttgttgagccccatcagctgcccccttttactttgcattgaacggcctgtccaaagatcctctctctagggcagcagagagctttttgcactttaaaaaaaaaaagaaagaaagaaaggtcggaatttcttttgggtcaatatttttaagtgtgtgaggagatgctcagtagcagcagcctatggcaagagcttataaatgattgatgcaaatttgcactctgctccccctctgtaaggatactgatagcacaacctcttccccccaccccgccccgccttttggtcgtccatccctgtccctttctggccctcttcctgtagcccagtctcaggctttcctcttcctgaagccctacagagttagggaatggagcccaggcaccaggggtctaaagtgtgagccactgagaagagagacgccaactgcacccttgccacttccaaagcaatagaggcagagtggtcccctctttgccacctaggccagttttgaccctggcattaactggccttagaagaaactggatcctggtagggggtggcattttgtttgtttcttccaatctgctgaatcttttgactgcaccttacaaacagcagtctgctcccatgaccctctgcccacttccattggtctccaggccccaataatctggggttgaaactttgaggaaatgccagtgacttattccagagtgcctcagttaggggaacttctctgtaaagaaccctgggtattgagcaaaaaccttattatcgttaatgacctataattggaagcttcctgcctttttctttggttgctcctgtggaaaatactgaaaagattactttgttttattttgttgtctttttataaaaggggaggtggagagaccccttcagagcagggattgtgccgggagagtgcctctgactttgggacatttcatccacagaaatttccaagccaatggtttcttttgggttttggtttttatgtttgttttttggggtttggaaaaacatgcatttttaccgtgcacgtaaattggtcagcagaaaagggagcccagaaaaggcagcagatggaccatgcccttgctgggttttccttttctttgggactgtgaggggaaatggtttttagaggtgagggttggtccatgtggaggaaagaagtgtctctgttgggggacagaggaacctggggagtccatcgcatgtcctacaatctgctcttagacacggccttgccaggagagcctgccctcagactgcaggaccagaacccctgcctccatctttccaagcaccggggcgaaaaaccacaaaggaaaggaagaaaatttatatatatataatataaaatcacttggtgattaaaaaaataactgctccataaataaaactcctaaagtcacttatgttt

SEQ ID NO: 21395 - protein, 58 aa, Homo sapiens
MARFLWCPVRVSLSVFCACVWREGGRGAWCLPLHRPLLSPISCPLLLCIERPVQRSSL

SEQ ID NO: 21396 - DNA, 2375 bp, Homo sapiens
gacgagaagctgatacagaagatcagctaagacacacccagcccagattcaacaggaaaccgatcttcccctgactccccaccgaggagagcctctcctcgaccctgcacgggctctgaggccagcgtcacactccctctctgctctcctgtcccttgagcccttcctctacaggtggggcagagagggtggtggacaccaggcttatctgcctgctcctctccctcctaaggaaaagggagtagcagattgatctgaggggaaagcacaggctgtgctgtcgaggcgcctgctcgcttactcgcctgccaggaggccgggctctcagtttggggtgtttgtgcaaccttcatctgcactgggccctgtgcccctcctccccatccatggtccccagcagtgcctggttctgagcaaactcccagggaagaaaacggccctgtctccatggccaggttcttgtggtgtccagtgcgcgtctctctgagtgtattctgcgcgtgtgtgtggagggagggagggaggggagcatggtgtctcccgctccaccgccctttgttgagccccatcagctgcccccttttactttgcattgaacggcctgtccaaagatcctctctctagggcagcagagagctttttgcactttaaaaaaaaaaagaaagaaagaaaggtcggaatttcttttgggtcaatatttttaagtgtgtgaggagatgctcagtagcagcagcctatggcaagagcttataaatgattgatgcaaatttgcactctgctccccctctgtaaggatactgatagcacaacctcttccccccaccccgccccgccttttggtcgtccatccctgtccctttctggccctcttcctgtagcccagtctcaggctttcctcttcctgaagccctacagagttagggaatggagcccaggcaccaggggtctaaagtgtgagccactgagaagagagacgccaactgcacccttgccacttccaaagcaatagaggcagagtggtcccctctttgccacctaggccagttttgaccctggcattaactggccttagaagaaactggatcctggtagggggtggcattttgtttgtttcttccaatctgctgaatcttttgactgcaccttacaaacagcagtctgctcccatgaccctctgcccacttccattggtctccaggccccaataatctggggttgaaactttgaggaaatgccagtgacttattccagagtgcctcagttaggggaacttctctgtaaagaaccctgggtattgagcaaaaaccttattatcgttaatgacctataattggaagcttcctgcctttttctttggttgctcctgtggaaaatactgaaaagattactttgttttattttgttgtctttttataaaaggggaggtggagagaccccttcagagcagggattgtgccgggagagtgcctctgactttgggacatttcatccacagaaatttccaagccaatggtttcttttgggttttggtttttatgtttgttttttggggtttggaaaaacatgcatttttaccgtgcacgtaaattggtcagcagaaaagggagcccagaaaaggcagcagatggaccatgcccttgctgggttttccttttctttgggactgtgaggggaaatggtttttagaggtgagggttggtccatgtggaggaaagaagtgtctctgttgggggacagaggaacctggggagtccatcgcatgtcctacaatctgctcttagacacggccttgccaggagagcctgccctcagactgcaggaccagaacccctgcctccatctttccaagcaccggggcgaaaaaccacaaaggaaaggaagaaaatttatatatatataatataaaatcacttggtgattaaaaaaataactgctccataaataaaactcctaaagtcacttatgtttaaagggtttggttgtgttttttgtttttcggagaaatattgtaaatatatatttttttgttgctgatttagagtcaatctccaatgttgtgctaaaaagtttaaattaaatgtaagcattaaggggataagtcttatgctatctcagttgacacattgaggttattttgggccagagaaggaggaagctagttggactttgttttgttttccaaaagttctccactattggttttagagagagcaaggacatctttcctctgacacgtgggaatgggtgatatttgtgtaataaaatttttaaaagacaaaaaaagaaatagcctccaatgggaaatattttaatttaggttttgtttttgtttgggggtttttgtttttttaaaaaaataaaaaggctttaaaaac

SEQ ID NO: 21397 - protein, 58 aa, Homo sapiens; identical to SEQ ID NO: 21395

SEQ ID NO: 21398 - DNA, 1470 bp, Homo sapiens
tgatacagaagatcagctaagacacacccagcccagattcaacaggaaaccgatcttcccctgactccccaccgaggagagcctctcctcgaccctgcacgggctctgaggccagcgtcacactccctctctgctctcctgtcccttgagcccttcctctacaggtggggcagagagggtggtggacaccaggcttatctgcctgctcctctccctcctaaggaaaagggagtagcagattgatctgaggggaaagcacaggctgtgctgtcgaggcgcctgctcgcttactcgcctgccaggaggccgggctctcagtttggggtgtttgtgcaaccttcatctgcactgggccctgtgcccctcctccccatccatggtccccagcagtgcctggttctgagcaaactcccagggaagaaaacggccctgtctccatggccaggttcttgtggtgtccagtgcgcgtctctcctccatcacactctcccggcttgcgcaggaggggccagcagccccaggagtcccagacccgtgccgatcacactggtgctgttgagatctcccaaacctcacgtccttaactgtgctctccctcctttcctctcccttgagcttggttctgcccagcactcgtgcttgttcacataattaggtttcccaccccagcctacccgacttacttgctagtctctatgaggtccttattgcacttattggggttgaagctcttcagaggagctggaactgtctaccccagggacacacccatttcgttgctacccaagtggattctgagacaggcaccatctccttgttccccctctctcttttgcctcccactgactgcccttttccatgtgtcttcattctgcctgaagaaggctttcccaggatgcacgtcctcagagggagcagcctatccctgcctccatctttccaagcaccggggcgaaaaaccacaaaggaaaggaagaaaatttatatatatataatataaaatcacttggtgattaaaaaaataactgctccataaataaaactcctaaagtcacttatgtttaaagggtttggttgtgttttttgtttttcggagaaatattgtaaatatatatttttttgttgctgatttagagtcaatctccaatgttgtgctaaaaagtttaaattaaatgtaagcattaaggggataagtcttatgctatctcagttgacacattgaggttattttgggccagagaaggaggaagctagttggactttgttttgttttccaaaagttctccactattggttttagagagagcaaggacatctttcctctgacacgtgggaatgggtgatatttgtgtaataaaatttttaaaagacaaaaaaagaaatagcctccaatgggaaatattttaatttaggttttgtttttgtttgggggtttttgtttttttaaaaaaataaaaaggctttaaaaac

SEQ ID NO: 21399 - protein, 99 aa, Homo sapiens
MRSLLHLLGLKLFRGAGTVYPRDTPISLLPKWILRQAPSPCSPSLFCLPLTALFHVSSFCLKKAFPGCTSSEGAAYPCLHLSKHRGEKPQRKGRKFIYI

SEQ ID NO: 21400 - DNA, 3468 bp, Homo sapiens
ggaggcggcggcggctccggggcgcgggcgcgcgggcggcggcggcggcggcgccccgactgcagtcccggcgggagcggagcgcgagccggggccgggcccgagccggcgccatggggcggcgccgcctgtgagcggcggcgagcggagccgcgggcgccgagcagggccaggcgggaggcgtcggcgcccgaggccgagcgagccgcggccgggccgggccgagcgccgagcgagcaggagcggcggcggcggcggcggcggcgggaggaggcagcgccgccgccaagatggcggacctggaggcggtgctggccgacgtgagctacctgatggccatggagaagagcaaggccacgccggccgcgcgcgccagcaagaagatcctgctgcccgagcccagcatccgcagtgtcatgcagaagtacctggaggaccggggcgaggtgacctttgagaagatcttttcccagaagctggggtacctgctcttccgagacttctgcctgaaccacctggaggaggccaggcccttggtggaattctatgaggagatcaagaagtacgagaagctggagacggaggaggagcgtgtggcccgcagccgggagatcttcgactcatacatcatgaaggagctgctggcctgctcgcatcccttctcgaagagtgccactgagcatgtccaaggccacctggggaagaagcaggtgcctccggatctcttccagccatacatcgaagagatttgtcaaaacctccgaggggacgtgttccagaaattcattgagagcgataagttcacacggttttgccagtggaagaatgtggagctcaacatccacctgaccatgaatgacttcagcgtgcatcgcatcattgggcgcgggggctttggcgaggtctatgggtgccggaaggctgacacaggcaagatgtacgccatgaagtgcctggacaaaaagcgcatcaagatgaagcagggggagaccctggccctgaacgagcgcatcatgctctcgctcgtcagcactggggactgcccattcattgtctgcatgtcatacgcgttccacacgccagacaagctcagcttcatcctggacctcatgaacggtggggacctgcactaccacctctcccagcacggggtcttctcagaggctgacatgcgcttctatgcggccgagatcatcctgggcctggagcacatgcacaaccgcttcgtggtctaccgggacctgaagccagccaacatccttctggacgagcatggccacgtgcggatctcggacctgggcctggcctgtgacttctccaagaagaagccccatgccagcgtgggcacccacgggtacatggctccggaggtcctgcagaagggcgtggcctacgacagcagtgccgactggttctctctggggtgcatgctcttcaagttgctgcgggggcacagccccttccggcagcacaagaccaaagacaagcatgagatcgaccgcatgacgctgacgatggccgtggagctgcccgactccttctcccctgaactacgctccctgctggaggggttgctgcagagggatgtcaaccggagattgggctgcctgggccgaggggctcaggaggtgaaagagagcccctttttccgctccctggactggcagatggtcttcttgcagaagtaccctcccccgctgatccccccacgaggggaggtgaacgcggccgacgccttcgacattggctccttcgatgaggaggacacaaaaggaatcaagttactggacagtgatcaggagctctaccgcaacttccccctcaccatctcggagcggtggcagcaggaggtggcagagactgtcttcgacaccatcaacgctgagacagaccggctggaggctcgcaagaaagccaagaacaagcagctgggccatgaggaagactacgccctgggcaaggactgcatcatgcatggctacatgtccaagatgggcaaccccttcctgacccagtggcagcggcggtacttctacctgttccccaaccgcctcgagtggcggggcgagggcgaggccccgcagagcctgctgaccatggaggagatccagtcggtggaggagacgcagatcaaggagcgcaagtgcctgctcctcaagatccgcggtgggaaacagttcattttgcagtgcgatagcgaccctgagctggtgcagtggaagaaggagctgcgcgacgcctaccgcgaggcccagcagctggtgcagcgggtgcccaagatgaagaacaagccgcgctcgcccgtggtggagctgagcaaggtgccgctggtccagcgcggcagtgccaacggcctctgacccgcccacccgccttttataaacctctaatttattttgtcgaatttttattatttgttttcccgccaagcggaaaaggttttattttgtaattattgtgatttcccgtggccccagcctggcccagctcccccgggaggggcccgcttgcctcggctcctgctgcaccaacccagccgctgcccggcgccctctgtcctgacttcaggggctgcccgctcccagtgtcttcctgtgggggaagagcacagccctcccgccccttccccgagggatgatgccacaccaagctgtgccaccctgggctctgtgggctgcactctgtgcccatgggcactgctgggtggcccatcccccctcaccaggggcaggcacagcacagggatccgacttgaattttcccactgcaccccctcctgctgcagaggggcaggccctgcactgtcctgctccacagtgttggcgagaggaggggcccgttgtctccctggccctcaaggcctcccacagtgactcgggctcctgtgcccttattcaggaaaagcctctgtgtcactggctgcctccactcccacttccctgacactgcggggcttggctgagagagtggcattggcagcaggtgctgctaccctccctgctgtcccctcttgccccaacccccagcacccgggctcagggaccacagcaaggcacctgcaggttgggccatactggcctcgcctggcctgaggtctcgctgatgctgggctgggtgcgaccccatctgcccaggacggggccggccaggtgggcgggcagcacagcaaggaggctggctggggcctatcagtgtgccccccatcctggcccatcagtgtacccccgcccaggctggccagccccacagcccacgtcctgtcagtgccgccgcctcgcccaccgcatgccccctcgtgccagtcgcgctgcctgtgtggtgtcgcgccttctcccccccggggctgggttggcgcaccctcccctcccgtctactcattccccggggcgtttctttgccgatttttgaatgtgattttaaagagtgaaaaatgagactatgcgtttttataaaaaatggtgcctgatt

SEQ ID NO: 21401 - protein, 689 aa, Homo sapiens
MADLEAVLADVSYLMAMEKSKATPAARASKKILLPEPSIRSVMQKYLEDRGEVTFEKIFSQKLGYLLFRDFCLNHLEEARPLVEFYEEIKKYEKLETEEERVARSREIFDSYIMKELLACSHPFSKSATEHVQGHLGKKQVPPDLFQPYIEEICQNLRGDVFQKFIESDKFTRFCQWKNVELNIHLTMNDFSVHRIIGRGGFGEVYGCRKADTGKMYAMKCLDKKRIKMKQGETLALNERIMLSLVSTGDCPFIVCMSYAFHTPDKLSFILDLMNGGDLHYHLSQHGVFSEADMRFYAAEIILGLEHMHNRFVVYRDLKPANILLDEHGHVRISDLGLACDFSKKKPHASVGTHGYMAPEVLQKGVAYDSSADWFSLGCMLFKLLRGHSPFRQHKTKDKHEIDRMTLTMAVELPDSFSPELRSLLEGLLQRDVNRRLGCLGRGAQEVKESPFFRSLDWQMVFLQKYPPPLIPPRGEVNAADAFDIGSFDEEDTKGIKLLDSDQELYRNFPLTISERWQQEVAETVFDTINAETDRLEARKKAKNKQLGHEEDYALGKDCIMHGYMSKMGNPFLTQWQRRYFYLFPNRLEWRGEGEAPQSLLTMEEIQSVEETQIKERKCLLLKIRGGKQFILQCDSDPELVQWKKELRDAYREAQQLVQRVPKMKNKPRSPVVELSKVPLVQRGSANGL

SEQ ID NO: 21402 - DNA, 3796 bp, Homo sapiens
ggaggcggcggcggctccggggcgcgggcgcgcgggcggcggcggcggcggcgccccgactgcagtcccggcgggagcggagcgcgagccggggccgggcccgagccggcgccatggggcggcgccgcctgtgagcggcggcgagcggagccgcgggcgccgagcagggccaggcgggaggcgtcggcgcccgaggccgagcgagccgcggccgggccgggccgagcgccgagcgagcaggagcggcggcggcggcggcggcggcgggaggaggcagcgccgccgccaagatggcggacctggaggcggtgctggccgacgtgagctacctgatggccatggagaagagcaaggccacgccggccgcgcgcgccagcaagaagatcctgctgcccgagcccagcatccgcagtgtcatgcagaagtacctggaggaccggggcgaggtgacctttgagaagatcttttcccagaagctggggtacctgctcttccgagacttctgcctgaaccacctggaggaggccaggcccttggtggaattctatgaggagatcaagaagtacgagaagctggagacggaggaggagcgtgtggcccgcagccgggagatcttcgactcatacatcatgaaggagctgctggcctgctcgcatcccttctcgaagagtgccactgagcatgtccaaggccacctggggaagaagcaggtgcctccggatctcttccagccatacatcgaagagatttgtcaaaacctccgaggggacgtgttccagaaattcattgagagcgataagttcacacggttttgccagtggaagaatgtggagctcaacatccacctgaccatgaatgacttcagcgtgcatcgcatcattgggcgcgggggctttggcgaggtctatgggtgccggaaggctgacacaggcaagatgtacgccatgaagtgcctggacaaaaagcgcatcaagatgaagcagggggagaccctggccctgaacgagcgcatcatgctctcgctcgtcagcactggggactgcccattcattgtctgcatgtcatacgcgttccacacgccagacaagctcagcttcatcctggacctcatgaacggtggggacctgcactaccacctctcccagcacggggtcttctcagaggctgacatgcgcttctatgcggccgagatcatcctgggcctggagcacatgcacaaccgcttcgtggtctaccgggacctgaagccagccaacatccttctggacgagcatggccacgtgcggatctcggacctgggcctggcctgtgacttctccaagaagaagccccatgccagcgtgggcacccacgggtacatggctccggaggtcctgcagaagggcgtggcctacgacagcagtgccgactggttctctctggggtgcatgctcttcaagttgctgcgggggcacagccccttccggcagcacaagaccaaagacaagcatgagatcgaccgcatgacgctgacgatggccgtggagctgcccgactccttctcccctgaactacgctccctgctggaggggttgctgcagagggatgtcaaccggagattgggctgcctgggccgaggggctcaggaggtgaaagagagcccctttttccgctccctggactggcagatggtcttcttgcagaagtaccctcccccgctgatccccccacgaggggaggtgaacgcggccgacgccttcgacattggctccttcgatgaggaggacacaaaaggaatcaagttactggacagtgatcaggagctctaccgcaacttccccctcaccatctcggagcggtggcagcaggaggtggcagagactgtcttcgacaccatcaacgctgagacagaccggctggaggctcgcaagaaagccaagaacaagcagctgggccatgaggaagactacgccctgggcaaggactgcatcatgcatggctacatgtccaagatgggcaaccccttcctgacccagtggcagcggcggtacttctacctgttccccaaccgcctcgagtggcggggcgagggcgaggccccgcagagcctgctgaccatggaggagatccagtcggtggaggagacgcagatcaaggagcgcaagtgcctgctcctcaagatccgcggtgggaaacagttcattttgcagtgcgatagcgaccctgagctggtgcagtggaagaaggagctgcgcgacgcctaccgcgaggcccagcagctggtgcagcgggtgcccaagatgaagaacaagccgcgctcgcccgtggtggagctgagcaaggtgccgctggtccagcgcggcagtgccaacggcctctgacccgcccacccgccttttataaacctctaatttattttgtcgaatttttattatttgttttcccgccaagcggaaaaggttttattttgtaattattgtgatttcccgtggccccagcctggcccagctcccccgggaggggcccgcttgcctcggctcctgctgcaccaacccagccgctgcccggcgccctctgtcctgacttcaggggctgcccgctcccagtgtcttcctgtgggggaagagcacagccctcccgccccttccccgagggatgatgccacaccaagctgtgccaccctgggctctgtgggctgcactctgtgcccatgggcactgctgggtggcccatcccccctcaccaggggcaggcacagcacagggatccgacttgaattttcccactgcaccccctcctgctgcagaggggcaggccctgcactgtcctgctccacagtgttggcgagaggaggggcccgttgtctccctggccctcaaggcctcccacagtgactcgggctcctgtgcccttattcaggaaaagcctctgtgtcactggctgcctccactcccacttccctgacactgcggggcttggctgagagagtggcattggcagcaggtgctgctaccctccctgctgtcccctcttgccccaacccccagcacccgggctcagggaccacagcaaggcacctgcaggttgggccatactggcctcgcctggcctgaggtctcgctgatgctgggctgggtgcgaccccatctgcccaggacggggccggccaggtgggcgggcagcacagcaaggaggctggctggggcctatcagtgtgccccccatcctggcccatcagtgtacccccgcccaggctggccagccccacagcccacgtcctgtcagtgccgccgcctcgcccaccgcatgccccctcgtgccagtcgcgctgcctgtgtggtgtcgcgccttctcccccccggggctgggttggcgcaccctcccctcccgtctactcattccccggggcgtttctttgccgatttttgaatgtgattttaaagagtgaaaaatgagactatgcgtttttataaaaaatggtgcctgattcggctgtctcagactctttttgtacctggtgaccccttttcagcttctgctgggctggggcctgatggggagggtctcggtggtaccaggtctcctccaccgccatggcttccaaggtggtctgctcgggcccaggccatcttccaggtggggtgaggcagtgggtcccacttcccctcctacccctcccagctgacagtcctctccacctagtggctgtccagtgcccattcctcaccttttcccggggaggagagagcagcttctgccacttcccaggtaagcaggaggaggtgccaacagtgttaggcctggcacagtgtctggg

SEQ ID NO: 21403 - protein, 689 aa, Homo sapiens; identical to SEQ ID NO: 21401

SEQ ID NO: 21404 - DNA, 210 bp, Homo sapiens
ctgacaggacgtgggctgtggggctggccagcctgggcgggggtacactgatgggccaggatggggggcacactgataggccccagccagcctccttgctgtgctgcccgcccacctggccggccccgtcctgggcagatggggcttcttcttggagaagtcacaggccaggcccaggtccgagatccgcacgtggccatgctcgtccag

SEQ ID NO: 21405 - protein, 52 aa, Homo sapiens
MGQDGGHTDRPQPASLLCCPPTWPAPSWADGASSWRSHRPGPGPRSARGHAR

SEQ ID NO: 21406 - DNA, 1808 bp, Homo sapiens
atccctctcccttcttatcacctgtgagaccctgtgccagccctgccagcttgtaggcctcagttcctccttggccaacttccctggggggtggcagttgcactgaccatccctacccagggccctgggtctgggcagcctgtggctgatggtattccggcatctctgtccacccatgtgcccctgccccatccacctggtaaagttactggacagtgatcaggagctctaccgcaacttccccctcaccatctcggagcggtggcagcaggaggtggcagagactgtcttcgacaccatcaacgctgagacagaccggctggaggctcgcaagaaagccaagaacaagcagctgggccatgaggaagactacgccctgggcaaggactgcatcatgcatggctacatgtccaagatgggcaaccccttcctgacccaggaggagatccagtcggtggaggagacgcagatcaaggagcgcaagtgcctgctcctcaagatccgcggtgggaaacagttcattttgcagtgcgatagcgaccctgagctggtgcagtggaagaaggagctgcgcgacgcctaccgcgaggcccagcagctggtgcagcgggtgcccaagatgaagaacaagccgcgctcgcccgtggtggagctgagcaaggtgccgctggtccagcgcggcagtgccaacggcctctgacccgcccacccgccttttataaacctctaatttattttgtcgaatttttattatttgttttcccgccaagcggaaaaggttttattttgtaattattgtgatttcccgtggccccagcctggcccagctcccccgggaggggcccgcttgcctcggctcctgctgcaccaacccagccgctgcccggcgccctctgtcctgacttcaggggctgcccgctcccagtgtcttcctgtgggggaagagcacagccctcccgccccttccccgagggatgatgccacaccaagctgtgccaccctgggctctgtgggctgcactctgtgcccatgggcactgctgggtggcccatcccccctcaccaggggcaggcacagcacagggatccgacttgaattttcccactgcaccccctcctgctgcagaggggcaggccctgcactgtcctgctccacagtgttggcgagaggaggggcccgttgtctccctggccctcaaggcctcccacagtgactcgggctcctgtgcccttattcaggaaaagcctctgtgtcactggctgcctccactcccacttccctgacactgcggggcttggctgagagagtggcattggcagcaggtgctgctaccctccctgctgtcccctcttgccccaacccccagcacccgggctcagggaccacagcaaggcacctgcaggttgggccatactggcctcgcctggcctgaggtctcgctgatgctgggctgggtgcgaccccatctgcccaggacggggccggccaggtgggcgggcagcacagcaaggaggctggctggggcctatcagtgtgccccccatcctggcccatcagtgtacccccgcccaggctggccagccccacagcccacgtcctgtcagtgccgccgcctcgcccaccgcatgccccctcgtgccagtcgcgctgcctgtgtggtgtcgcgccttctcccccccggggctgggttggcgcaccctcccctcccgtctactcattccccggggcgtttctttgccgatttttgaatgtgattttaaagagtgaaaaatgagactatgcgtttttataaaaaatggtgcctgatt

SEQ ID NO: 21407 - protein, 183 aa, Homo sapiens
MVFRHLCPPMCPCPIHLVKLLDSDQELYRNFPLTISERWQQEVAETVFDTINAETDRLEARKKAKNKQLGHEEDYALGKDCIMHGYMSKMGNPFLTQEEIQSVEETQIKERKCLLLKIRGGKQFILQCDSDPELVQWKKELRDAYREAQQLVQRVPKMKNKPRSPVVELSKVPLVQRGSANGL

SEQ ID NO: 21408 - DNA, 832 bp, Homo sapiens
cgaatttttattatttgttttcccgccaagcggaaaaggttttattttgtaattattgtgatttcccgtggccccagcctggcccagctcccccgggaggggcccgcttgcctcggctcctgctgcaccaacccagccgctgcccggcgccctctgtcctgacttcaggggctgcccgctcccagtgtcttcctgtgggggaagagcacagccctcccgccccttccccgagggatgatgccacaccaagctgtgccaccctgggctctgtgggctgcactctgtgcccatgggcactgctgggtggcccatcccccctcaccaggggcaggcacagcacagggatccgacttgaattttcccactgcaccccctcctgctgcagaggggcaggccctgcactgtcctgctccacagtgttggcgagaggaggggcccgttgtctccctggccctcaaggcctcccacagtgactcgggctcctgtgcccttattcaggaaaagcctctgtgtcactggctgcctccactcccacttccctgacactgcggggcttggctgagagagtggcattggcagcaggtgctgctaccctccctgctgtcccctcttgccccaacccccagcacccgggctcagggaccacagcaaggcacctgcaggttgggccatactggcctcgcctggcctgaggtctcgctgatgctgggtgggttggcgcaccctcccctcccgtctactcattccccggggcgtttctttgccgatttttgaatgtgattttaaagagtgaaaaatgagactatgcgtttttataaaaaatggtgcctga

SEQ ID NO: 21409 - protein, 102 aa, Homo sapiens
MMPHQAVPPWALWAALCAHGHCWVAHPPSPGAGTAQGSDLNFPTAPPPAAEGQALHCPAPQCWREEGPVVSLALKASHSDSGSCALIQEKPLCHWLPPLPLP

SEQ ID NO: 21410 - DNA, 1567 bp, Homo sapiens
gccaaccgcagcctctgcaaaagggactcgtgcggcgggcgaaggcagccgttcgccgcgggcggtcctccgccgggacggctctgccgctgcctgggcctgcgcccctctctccccgaactcctatccctgacttcagggccccgggggccgcctccccgcatcgctgggcctgcagacaccggccaggtcccaggggaaggtgcttcccgctcagccggcaagcacttagtggcgtctgctcgttgctcgtctccaggccgggtgaggggagccggggcgccccacttcacccgcacaccccagcagagtcggtgaccgcgggacctggggtaggaagaccggggcgagcaaggggatccgcgggggaaacgcaggcatcacggctgcagcaggaccgcggcccgccgcgcacgcgcgtgcactaccgaggggcccagtgcccgccccctccggccccgccttcctcttccggacccggctccgggggtctgcgcagggctcggggcgcctcctgcgggccgcgggcggagctgtaaccgggcaccgccctccaggccgccccagcggacccgggcccgaccgaggtcggggcgcagacccaaggccgggcatctcctcgggcgctcgcggttgctctgccgcgcgctggcctggccgcggttgccatggttgcggggggacgggggcgcgcgcgaagccccgccccggcccggcgcagccccgcccgctccgccgcccgccccgccctccctgccgcccgcgctgccgccgccgccgccgccgccgctactgctgcgggggccgcggggggcgcagctggggcgcggctcggaggggaggctagggggccgtgccaggcccgaagccgaggcggggccgggatgcggcgctgaggcccagcatggccggcccgggccccaccttcccgctgcaccggctcgtctgggcgaaccggcatcgcgaactggaggccgcactgcacagccaccaggttccgccaaactcctggctggcagagcatactatctcataccccctaccccaggagcaggctcggagggagccactgtgccccctttacagagtaggactctgagacccagtggaaacaaaggctcccccagggctctgcacaggctcatggccaggttgaggctggccctccacctccaggtgcttacagcctcattgtctgaagaccactgtagtgccccacttggcccaccctctccagggcagagtggttgggcgtagctgagccatagcagtgcgtcaagacttgatgaagggccaggcgttgtggcttactcctgtaatcccagcgctttctgaggccaaagtgggcggatcacttgagcccaggaggtggagaccagcctgggcaacatggtgaaagccgtctctacaaaaagtacaaaaattagctgggagtggtggcacacacctgtggtcccagctactcgggaggctgaggtggaagaatcacctgagcccagggaggcagaggttgcagtgagccgagattgcaccactacactccagcctgggtgacagagcaagtctc

SEQ ID NO: 21411 - protein, 64 aa, Homo sapiens
MAGPGPTFPLHRLVWANRHRELEAALHSHQVPPNSWLAEHTISYPLPQEQARREPLCPLYRVGL

SEQ ID NO: 21412 - DNA, 2169 bp, Homo sapiens
gccaaccgcagcctctgcaaaagggactcgtgcggcgggcgaaggcagccgttcgccgcgggcggtcctccgccgggacggctctgccgctgcctgggcctgcgcccctctctccccgaactcctatccctgacttcagggccccgggggccgcctccccgcatcgctgggcctgcagacaccggccaggtcccaggggaaggtgcttcccgctcagccggcaagcacttagtggcgtctgctcgttgctcgtctccaggccgggtgaggggagccggggcgccccacttcacccgcacaccccagcagagtcggtgaccgcgggacctggggtaggaagaccggggcgagcaaggggatccgcgggggaaacgcaggcatcacggctgcagcaggaccgcggcccgccgcgcacgcgcgtgcactaccgaggggcccagtgcccgccccctccggccccgccttcctcttccggacccggctccgggggtctgcgcagggctcggggcgcctcctgcgggccgcgggcggagctgtaaccgggcaccgccctccaggccgccccagcggacccgggcccgaccgaggtcggggcgcagacccaaggccgggcatctcctcgggcgctcgcggttgctctgccgcgcgctggcctggccgcggttgccatggttgcggggggacgggggcgcgcgcgaagccccgccccggcccggcgcagccccgcccgctccgccgcccgccccgccctccctgccgcccgcgctgccgccgccgccgccgccgccgctactgctgcgggggccgcggggggcgcagctggggcgcggctcggaggggaggctagggggccgtgccaggcccgaagccgaggcggggccgggatgcggcgctgaggcccagcatggccggcccgggccccaccttcccgctgcaccggctcgtctgggcgaaccggcatcgcgaactggaggccgcactgcacagccaccagcacgacattgaacaggaggacccccgcgggcggaccccactggagctggccgtgtctctgggaaacctggagtctgtgagagtgctccttcgacacaatgccaacgtgggcaaagagaaccgccagggctgggcagtcctgcaggaggcagtcagcactggagaccccgagatggtgcagctggtgctccagtatcgggactaccagagggccacgcagaggctggcgggcattccggaactgctcaacaaacttcgccagcccagggtcacgtaggaaagagagacggccaggctcacgtgggagagactggaccctttggaagagaagccttgccagctttgggcctcctgaagaatgcagattacctggagcagggacttcaggttgactcggtggattatggcctgaaaccctggaatacttgctactacgcacccttctggaagcacacggaggggcctggctggcagagcatactatctcataccccctaccccaggagcaggctcggagggagccactgtgccccctttacagagtaggactctgagacccagtggaaacaaaggctcccccagggctctgcacaggctcatggccaggttgaggctggccctccacctccaggtgcttacagcctcattgtctgaagaccactgtagtgccccacttggcccaccctctccagggcagagtggttgggcgtagctgagccatagcagtgcgtcaagacttgatgaagggccaggcgttgtggcttactcctgtaatcccagcgctttctgaggccaaagtgggcggatcacttgagcccaggaggtggagaccagcctgggcaacatggtgaaagccgtctctacaaaaagtacaaaaattagctgggagtggtggcacacacctgtggtcccagctactcgggaggctgaggtggaagaatcacctgagcccagggaggcagaggttgcagtgagccgagattgcaccactacactccagcctgggtgacagagcaagtctcaaaaaaaaaaaaaaaaaaaaaaaagacctgatgaagggctgggctggctgtggacaaggggctcccaggcctgctggagccagcagcaggcagggcgctgacaagcagctctggtttctcttaggcccccgatttctacgttgagatgaagtgg

SEQ ID NO: 21413 - protein, 121 aa, Homo sapiens
MAGPGPTFPLHRLVWANRHRELEAALHSHQHDIEQEDPRGRTPLELAVSLGNLESVRVLLRHNANVGKENRQGWAVLQEAVSTGDPEMVQLVLQYRDYQRATQRLAGIPELLNKLRQPRVT

SEQ ID NO: 21414 - DNA, 3011 bp, Homo sapiens
gccaaccgcagcctctgcaaaagggactcgtgcggcgggcgaaggcagccgttcgccgcgggcggtcctccgccgggacggctctgccgctgcctgggcctgcgcccctctctccccgaactcctatccctgacttcagggccccgggggccgcctccccgcatcgctgggcctgcagacaccggccaggtcccaggggaaggtgcttcccgctcagccggcaagcacttagtggcgtctgctcgttgctcgtctccaggccgggtgaggggagccggggcgccccacttcacccgcacaccccagcagagtcggtgaccgcgggacctggggtaggaagaccggggcgagcaaggggatccgcgggggaaacgcaggcatcacggctgcagcaggaccgcggcccgccgcgcacgcgcgtgcactaccgaggggcccagtgcccgccccctccggccccgccttcctcttccggacccggctccgggggtctgcgcagggctcggggcgcctcctgcgggccgcgggcggagctgtaaccgggcaccgccctccaggccgccccagcggacccgggcccgaccgaggtcggggcgcagacccaaggccgggcatctcctcgggcgctcgcggttgctctgccgcgcgctggcctggccgcggttgccatggttgcggggggacgggggcgcgcgcgaagccccgccccggcccggcgcagccccgcccgctccgccgcccgccccgccctccctgccgcccgcgctgccgccgccgccgccgccgccgctactgctgcgggggccgcggggggcgcagctggggcgcggctcggaggggaggctagggggccgtgccaggcccgaagccgaggcggggccgggatgcggcgctgaggcccagcatggccggcccgggccccaccttcccgctgcaccggctcgtctgggcgaaccggcatcgcgaactggaggccgcactgcacagccaccaggttccgccaaactcctgacaacctgcagctctgcctgaccaggccccgccgccagaccccggctctgcccctgccttccctcctgccccctcctctcccctgccaggacacgcaggccaccctctgccatctccctgcacgacattgaacaggaggacccccgcgggcggaccccactggagctggccgtgtctctgggaaacctggagtctgtgagagtgctccttcgacacaatgccaacgtgggcaaagagaaccgccagggctgggcagtcctgcaggaggcagtcagcactggagaccccgagatggtgcagctggtgctccagtatcgggactaccagagggccacgcagaggctggcgggcattccggaactgctcaacaaacttcgccaggcccccgatttctacgttgagatgaagtgggagttcaccagctgggtgccccttgtgtctaagatgtgcccaagcgatgtgtaccgcgtgtggaagcggggtgagagcctgcgagtagacaccagtctcctgggcttcgagcacatgacctggcagcggggccggaggagcttcatcttcaagggccaggaggcaggagccctggtgatggaagtggaccatgaccggcaggtggtgcatgtggagacactggggctcactctgcaggagcccgaaacactgctggccgccatgcggcccagcgaggagcatgtggccagtcgcctcacctctcctatcgtctccacccacctggacactcgtaatgtggcctttgagaggaacaaatgtggtatctggggctggcggtctgagaagatggaaactgttagcggctacgaggccaaggtgtacagtgccaccaacgtggagctggtgacacgcacacgcacggagcacctctctgatcaggacaagtcgaggagcaaagcggggaagactccattccagtccttcctggggatggcgcagcagcattcctcccacaccggggcccccgtgcagcaggcagccagccccaccaaccccacagccatctcccctgaggagtacttcgaccccaacttcagcctggagtcacggaacattggccgccccatcgagatgtccagcaaagtacagaggttcaaggcaacactgtggctgagtgaagagcacccgctctccctgggtgaccaggtgacccccatcatcgacctaatggccatcagcaacgctcactttgccaagctgcgcgacttcatcactctgcgccttccacctggcttccccgtcaaaattgagattccccttttccacgtgctcaatgcccgcatcaccttcagcaacctgtgtggctgtgatgagcccctgagctccgtgtgggtgccggcccccagctctgctgttgccgcatcagggaaccctttcccgtgcgaggtggaccccaccgtgtttgaagtgcccaacgggtacagcgtgctgggcatggagcgcaacgagcccctccgggacgaggacgatgacctcctgcagttcgccatccagcagagcctgcttgaagcgggcactgaggcggagcaggtgaccgtctgggaagccctgaccaacacccggcccggtgcccgccctcctccccaggccacggtttatgaggaacagcttcagctggagcgggccctccaggaaagcctgcagctgtccacagagcccaggggcccaggatcccctcccaggacacccccagcccccggtccacccagctttgaagagcagctgcgcctggccctggagttgtcttcacgggagcaggaggagcgggagcggcgcgggcagcaggaggaggaggacttacagcggatcctgcagctgtcactcactgagcactgagccatagccccgggagggctggccaggccactccctgcccgcttttgtaatttatttatttataaactctctgctgctgagcttggggcctggagccccaggaatgagcaggcaggggagactgagatggaaataaagagactgtcgcagca

SEQ ID NO: 21415 - protein, 518 aa, Homo sapiens
MVQLVLQYRDYQRATQRLAGIPELLNKLRQAPDFYVEMKWEFTSWVPLVSKMCPSDVYRVWKRGESLRVDTSLLGFEHMTWQRGRRSFIFKGQEAGALVMEVDHDRQVVHVETLGLTLQEPETLLAAMRPSEEHVASRLTSPIVSTHLDTRNVAFERNKCGIWGWRSEKMETVSGYEAKVYSATNVELVTRTRTEHLSDQDKSRSKAGKTPFQSFLGMAQQHSSHTGAPVQQAASPTNPTAISPEEYFDPNFSLESRNIGRPIEMSSKVQRFKATLWLSEEHPLSLGDQVTPIIDLMAISNAHFAKLRDFITLRLPPGFPVKIEIPLFHVLNARITFSNLCGCDEPLSSVWVPAPSSAVAASGNPFPCEVDPTVFEVPNGYSVLGMERNEPLRDEDDDLLQFAIQQSLLEAGTEAEQVTVWEALTNTRPGARPPPQATVYEEQLQLERALQESLQLSTEPRGPGSPPRTPPAPGPPSFEEQLRLALELSSREQEERERRGQQEEEDLQRILQLSLTEH

SEQ ID NO: 21416 - DNA, 2874 bp, Homo sapiens
gccaaccgcagcctctgcaaaagggactcgtgcggcgggcgaaggcagccgttcgccgcgggcggtcctccgccgggacggctctgccgctgcctgggcctgcgcccctctctccccgaactcctatccctgacttcagggccccgggggccgcctccccgcatcgctgggcctgcagacaccggccaggtcccaggggaaggtgcttcccgctcagccggcaagcacttagtggcgtctgctcgttgctcgtctccaggccgggtgaggggagccggggcgccccacttcacccgcacaccccagcagagtcggtgaccgcgggacctggggtaggaagaccggggcgagcaaggggatccgcgggggaaacgcaggcatcacggctgcagcaggaccgcggcccgccgcgcacgcgcgtgcactaccgaggggcccagtgcccgccccctccggccccgccttcctcttccggacccggctccgggggtctgcgcagggctcggggcgcctcctgcgggccgcgggcggagctgtaaccgggcaccgccctccaggccgccccagcggacccgggcccgaccgaggtcggggcgcagacccaaggccgggcatctcctcgggcgctcgcggttgctctgccgcgcgctggcctggccgcggttgccatggttgcggggggacgggggcgcgcgcgaagccccgccccggcccggcgcagccccgcccgctccgccgcccgccccgccctccctgccgcccgcgctgccgccgccgccgccgccgccgctactgctgcgggggccgcggggggcgcagctggggcgcggctcggaggggaggctagggggccgtgccaggcccgaagccgaggcggggccgggatgcggcgctgaggcccagcatggccggcccgggccccaccttcccgctgcaccggctcgtctgggcgaaccggcatcgcgaactggaggccgcactgcacagccaccagcacgacattgaacaggaggacccccgcgggcggaccccactggagctggccgtgtctctgggaaacctggagtctgtgagagtgctccttcgacacaatgccaacgtgggcaaagagaaccgccagggctgggcagtcctgcaggaggcagtcagcactggagaccccgagatggtgcagctggtgctccagtatcgggactaccagagggccacgcagaggctggcgggcattccggaactgctcaacaaacttcgccaggcccccgatttctacgttgagatgaagtgggagttcaccagctgggtgccccttgtgtctaagatgtgcccaagcgatgtgtaccgcgtgtggaagcggggtgagagcctgcgagtagacaccagtctcctgggcttcgagcacatgacctggcagcggggccggaggagcttcatcttcaagggccaggaggcaggagccctggtgatggaagtggaccatgaccggcaggtggtgcatgtggagacactggggctcactctgcaggagcccgaaacactgctggccgccatgcggcccagcgaggagcatgtggccagtcgcctcacctctcctatcgtctccacccacctggacactcgtaatgtggcctttgagaggaacaaatgtggtatctggggctggcggtctgagaagatggaaactgttagcggctacgaggccaaggtgtacagtgccaccaacgtggagctggtgacacgcacacgcacggagcacctctctgatcaggacaagtcgaggagcaaagcggggaagactccattccagtccttcctggggatggcgcagcagcattcctcccacaccggggcccccgtgcagcaggcagccagccccaccaaccccacagccatctcccctgaggagtacttcgaccccaacttcagcctggagtcacggaacattggccgccccatcgagatgtccagcaaagtacagaggttcaaggcaacactgtggctgagtgaagagcacccgctctccctgggtgaccaggtgacccccatcatcgacctaatggccatcagcaacgctcactttgccaagctgcgcgacttcatcactctgcgccttccacctggcttccccgtcaaaattgagattccccttttccacgtgctcaatgcccgcatcaccttcagcaacctgtgtggctgtgatgagcccctgagctccgtgtgggtgccggcccccagctctgctgttgccgcatcagggaaccctttcccgtgcgaggtggaccccaccgtgtttgaagtgcccaacgggtacagcgtgctgggcatggagcgcaacgagcccctccgggacgaggacgatgacctcctgcagttcgccatccagcagagcctgcttgaagcgggcactgaggcggagcaggtgaccgtctgggaagccctgaccaacacccggcccggtgcccgccctcctccccaggccacggtttatgaggaacagcttcagctggagcgggccctccaggaaagcctgcagctgtccacagagcccaggggcccaggatcccctcccaggacacccccagcccccggtccacccagctttgaagagcagctgcgcctggccctggagttgtcttcacgggagcaggaggagcgggagcggcgcgggcagcaggaggaggaggacttacagcggatcctgcagctgtcactcactgagcactgagccatagccccgggagggctggccaggccactccctgcccgcttttgtaatttatttatttataaactctctgctgctgagcttggggcctggagccccaggaatgagcaggcaggggagactgagatggaaataaagagactgtcgcagca

SEQ ID NO: 21417 - protein, 605 aa, Homo sapiens
MAGPGPTFPLHRLVWANRHRELEAALHSHQHDIEQEDPRGRTPLELAVSLGNLESVRVLLRHNANVGKENRQGWAVLQEAVSTGDPEMVQLVLQYRDYQRATQRLAGIPELLNKLRQAPDFYVEMKWEFTSWVPLVSKMCPSDVYRVWKRGESLRVDTSLLGFEHMTWQRGRRSFIFKGQEAGALVMEVDHDRQVVHVETLGLTLQEPETLLAAMRPSEEHVASRLTSPIVSTHLDTRNVAFERNKCGIWGWRSEKMETVSGYEAKVYSATNVELVTRTRTEHLSDQDKSRSKAGKTPFQSFLGMAQQHSSHTGAPVQQAASPTNPTAISPEEYFDPNFSLESRNIGRPIEMSSKVQRFKATLWLSEEHPLSLGDQVTPIIDLMAISNAHFAKLRDFITLRLPPGFPVKIEIPLFHVLNARITFSNLCGCDEPLSSVWVPAPSSAVAASGNPFPCEVDPTVFEVPNGYSVLGMERNEPLRDEDDDLLQFAIQQSLLEAGTEAEQVTVWEALTNTRPGARPPPQATVYEEQLQLERALQESLQLSTEPRGPGSPPRTPPAPGPPSFEEQLRLALELSSREQEERERRGQQEEEDLQRILQLSLTEH

SEQ ID NO: 21418 - DNA, 2983 bp, Homo sapiens
gccaaccgcagcctctgcaaaagggactcgtgcggcgggcgaaggcagccgttcgccgcgggcggtcctccgccgggacggctctgccgctgcctgggcctgcgcccctctctccccgaactcctatccctgacttcagggccccgggggccgcctccccgcatcgctgggcctgcagacaccggccaggtcccaggggaaggtgcttcccgctcagccggcaagcacttagtggcgtctgctcgttgctcgtctccaggccgggtgaggggagccggggcgccccacttcacccgcacaccccagcagagtcggtgaccgcgggacctggggtaggaagaccggggcgagcaaggggatccgcgggggaaacgcaggcatcacggctgcagcaggaccgcggcccgccgcgcacgcgcgtgcactaccgaggggcccagtgcccgccccctccggccccgccttcctcttccggacccggctccgggggtctgcgcagggctcggggcgcctcctgcgggccgcgggcggagctgtaaccgggcaccgccctccaggccgccccagcggacccgggcccgaccgaggtcggggcgcagacccaaggccgggcatctcctcgggcgctcgcggttgctctgccgcgcgctggcctggccgcggttgccatggttgcggggggacgggggcgcgcgcgaagccccgccccggcccggcgcagccccgcccgctccgccgcccgccccgccctccctgccgcccgcgctgccgccgccgccgccgccgccgctactgctgcgggggccgcggggggcgcagctggggcgcggctcggaggggaggctagggggccgtgccaggcccgaagccgaggcggggccgggatgcggcgctgaggcccagcatggccggcccgggccccaccttcccgctgcaccggctcgtctgggcgaaccggcatcgcgaactggaggccgcactgcacagccaccagcacgacattgaacaggaggacccccgcgggcggaccccactggagctggccgtgtctctgggaaacctggagtctgtgagagtgctccttcgacacaatgccaacgtgggcaaagagaaccgccagggctgggcaggtactgcagaggacaaggggctccccctgaggctggcaggcggggggcagtgagcagccaggcctggggtcatctggagggctcccctcagcagcctggtgcccgcagtcctgcaggaggcagtcagcactggagaccccgagatggtgcagctggtgctccagtatcgggactaccagagggccacgcagaggctggcgggcattccggaactgctcaacaaacttcgccaggcccccgatttctacgttgagatgaagtgggagttcaccagctgggtgccccttgtgtctaagatgtgcccaagcgatgtgtaccgcgtgtggaagcggggtgagagcctgcgagtagacaccagtctcctgggcttcgagcacatgacctggcagcggggccggaggagcttcatcttcaagggccaggaggcaggagccctggtgatggaagtggaccatgaccggcaggtggtgcatgtggagacactggggctcactctgcaggagcccgaaacactgctggccgccatgcggcccagcgaggagcatgtggccagtcgcctcacctctcctatcgtctccacccacctggacactcgtaatgtggcctttgagaggaacaaatgtggtatctggggctggcggtctgagaagatggaaactgttagcggctacgaggccaaggtgtacagtgccaccaacgtggagctggtgacacgcacacgcacggagcacctctctgatcaggacaagtcgaggagcaaagcggggaagactccattccagtccttcctggggatggcgcagcagcattcctcccacaccggggcccccgtgcagcaggcagccagccccaccaaccccacagccatctcccctgaggagtacttcgaccccaacttcagcctggagtcacggaacattggccgccccatcgagatgtccagcaaagtacagaggttcaaggcaacactgtggctgagtgaagagcacccgctctccctgggtgaccaggtgacccccatcatcgacctaatggccatcagcaacgctcactttgccaagctgcgcgacttcatcactctgcgccttccacctggcttccccgtcaaaattgagattccccttttccacgtgctcaatgcccgcatcaccttcagcaacctgtgtggctgtgatgagcccctgagctccgtgtgggtgccggcccccagctctgctgttgccgcatcagggaaccctttcccgtgcgaggtggaccccaccgtgtttgaagtgcccaacgggtacagcgtgctgggcatggagcgcaacgagcccctccgggacgaggacgatgacctcctgcagttcgccatccagcagagcctgcttgaagcgggcactgaggcggagcaggtgaccgtctgggaagccctgaccaacacccggcccggtgcccgccctcctccccaggccacggtttatgaggaacagcttcagctggagcgggccctccaggaaagcctgcagctgtccacagagcccaggggcccaggatcccctcccaggacacccccagcccccggtccacccagctttgaagagcagctgcgcctggccctggagttgtcttcacgggagcaggaggagcgggagcggcgcgggcagcaggaggaggaggacttacagcggatcctgcagctgtcactcactgagcactgagccatagccccgggagggctggccaggccactccctgcccgcttttgtaatttatttatttataaactctctgctgctgagcttggggcctggagccccaggaatgagcaggcaggggagactgagatggaaataaagagactgtcgcagcag

SEQ ID NO: 21419 - protein, 518 aa, Homo sapiens; identical to SEQ ID NO: 21415

SEQ ID NO: 21420 - DNA, 1263 bp, Homo sapiens
cgccagaccccggctctgcccctgccttccctcctgccccctcctctcccctgccaggacacgcaggccaccctctgccatctccctgcacgacattgaacaggaggacccccgcgggcggaccccactggagctggccgtgtctctgggaaacctggagtctgtgagagtgctccttcgacacaatgccaacgtgggcaaagagaaccgccagggctgggcagtcctgcaggaggcagtcagcactggagaccccgagatggtgcagctggtgctccagtatcgggactaccagagggccacgcagaggctggcgggcattccggaactgctcaacaaacttcgccagcccagggtcacgtaggaaagagagacggccaggctcacgtgggagagactggaccctttggaagagaagccttgccagctttgggcctcctgaagaatgcagattacctggagcagggacttcaggttgactcggtggattatggcctgaaaccctggaatacttgctactacgcacccttctggaagcacacggaggggcctggctggcagagcatactatctcataccccctaccccaggagcaggctcggagggagccactgtgccccctttacagagtaggactctgagacccagtggaaacaaaggctcccccagggctctgcacaggctcatggccaggttgaggctggccctccacctccaggtgcttacagcctcattgtctgaagaccactgtagtgccccacttggcccaccctctccagggcagagtggttgggcgtagctgagccatagcagtgcgtcaagacttgatgaagggccaggcgttgtggcttactcctgtaatcccagcgctttctgaggccaaagtgggcggatcacttgagcccaggaggtggagaccagcctgggcaacatggtgaaagccgtctctacaaaaagtacaaaaattagctgggagtggtggcacacacctgtggtcccagctactcgggaggctgaggtggaagaatcacctgagcccagggaggcagaggttgcagtgagccgagattgcaccactacactccagcctgggtgacagagcaagtctcaaaaaaaaaaaaaaaaaaaaaaaagacctgatgaagggctgggctggctgtggacaaggggctcccaggcctgctggagccagcagcaggcagggcgctgacaagcagctctggtttctcttaggcccccgatttctacgttgagatgaagtgg

SEQ ID NO: 21421 - protein, 97 aa, Homo sapiens
MPTWAKRTARAGQSCRRQSALETPRWCSWCSSIGTTRGPRRGWRAFRNCSTNFASPGSRRKERRPGSRGRDWTLWKRSLASFGPPEECRLPGAGTSG

SEQ ID NO: 21422 - DNA, 3168 bp, Homo sapiens
gagacagagtcttactctgtcacccaggctgaagtgcagtggcatgataagagctcactgcagccttgaactcctgggcttaggtgattcttcaacctcccaagtagctgggactgcaggcatgcaccaccaagcccagctaattttctttttttgtagagatgtggtctcactatgtcatccaggctgcttttgaactcctggcctcaaacaatcctcctgccttggcctcccaaagcactgacattacaggtgtgaaccaccgcccccagccaagtcttctctctctttttttgcccaccgtggtcaacctagctaaaggtttgtcaattttgttgatgttttcgaagagccagtttttggtttcattaattttctctattatttttctattctctatttcattaacctttactgtaatatttattatttctttctgttctttctggtttagtttgctctttttccattgtcttaacatggaaggttaggttaaggttattgatttgagatcttctttcttaatataggcattcacacatattacatttatacttctaggcatgtcttttctttttttgacatggggtctcactccatcgcccaggctggagtgcagtggtgtgatagctcactgcaacctccgcctcccaggctcaagtgatcctcccacctcagcctcctgagtagctgggaacacaggcgccagctaattttttctgtttttagtagagatggggtttcaccatgttgcacaggctggtctcgaactcctgtgctcaagcaatctgcctgtctcagcctcccaaagtgctgggattacaggcgtgagccaccgggcctggcctggcctttacctgtgtctcataagttttttggtttttttttttttttctgagagggagtcttgctctgtcgcccaggctggagtgcagtggcacgatctcggcttactgcaagctccgcctcccgggttcacgccattctcctggctcagcctcccgagtagctgggactataggcgcctgccaccacgcccggctaattttttgtatttttagtggagatggggtttcactgtgttagccaggatggtctccatctcctgaccttgtgatctgcctgcctcggcctcccaaagtgctgggattacaggcgtgagccaccgtgcccggccataagttttgatatgttgtgtctttattcctgtttatctcagagtattttctgatttctcttttgatttattatttgagacgttggctatttaggagtgtgttgtttactttctacatatttgtgaatttccaaagttttttttttctgctattgacttctaatttcattccattgtggttggaaaacatacattgtatgacttctatcctttcaattttattgaggttttctttttttttttttttttttttttttgagacggagtctcgctctgtcgcccaggctggagtgcagtggtactgtctgctcactgcgagctctgcctccgatgttcacgccattctcctgcctcagcctcccaagtaggtgggactacaggcgtccaccaccgtgcccggctaattttttgtattttttagtagagacggggtttcatcatgtttgccaggatggtctcgatctcctgacctcatgatccaccccccttggcttcccaaactgctgggattacaggcatgagccaccgcgcccggacttattgaggttttcttaatggcctagtgtatggccttgaagagtgttccgtgtgcgcgtgagaagcgtgtgtgtggttgttattgggtagagtgttctagcctgcttatgaagtccagctgtagtgttgttcttatcttctggttctttgttgatcttctagttgttctatcccttattgaaagtggggtactggagtctccaactgacatacttttcttttagctttttattttggaaaatttcaaacatatatgaaagaagagataatgtacttactcatcacccagcttcaacatttatcaacatcttgccaatcttactgaatctatccttccttaccttttttaaaaatgtttcctagagtgtgtcaaagctcatcccagatgtcctaatgtttctagtaaatgcttctgcacaattctaaaagacaaggatgtttttaaacccagccccgacactatcatacctcacaagattcatgctaattcctcagtgtcttctagtcccaagtccatgctcaagtgtccccccctgtccaggcaccctcttcaggggtcctccatgtttcatagcgagaaggggccctgagagttgggcaccccgggcaggctggctggagggggctttggaaaggaaggctttggccagcgtgtgagggtgcaggtctcaccagctcctgtttggtctgtttcaggaacaaatgtggtatctggggctggcggtctgagaagatggaaactgttagcggctacgaggccaaggcaggagaggctaggggtggggggctgggggtaggagatgaggtccaggaactcagctcctctccacatccatcccagagtagcccctgggctctggaaaccctgagcatttgtgggaactcagcgggcctgagtgcccagcccctgcggagtacacagggctcacccacatcatgggcccctacccagggtaccgagatcaaaagaggagtgtgttcctcttgaccctggggctgcatctcctcgttggtgacttcctggggttcagaccctcccgccctcctccccaggccacggtttatgaggaacagcttcagctggagcgggccctccaggaaagcctgcagctgtccacagagcccaggggcccaggatcccctcccaggacacccccagcccccggtccacccagctttgaagagcagctgcgcctggccctggagttgtcttcacgggagcaggaggagcgggagcggcgcgggcagcaggaggaggaggacttacagcggatcctgcagctgtcactcactgagcactgagccatagccccgggagggctggccaggccactccctgcccgcttttgtaatttatttatttataaactctctgctgctgagcttggggcctggagccccaggaatgagcaggcaggggagactgagatggaaataaagagactgtcgcagca

SEQ ID NO: 21423 - protein, 121 aa, Homo sapiens
MGPYPGYRDQKRSVFLLTLGLHLLVGDFLGFRPSRPPPQATVYEEQLQLERALQESLQLSTEPRGPGSPPRTPPAPGPPSFEEQLRLALELSSREQEERERRGQQEEEDLQRILQLSLTEH

SEQ ID NO: 21424 - DNA, 2814 bp, Homo sapiens
ttctttctggtttagtttgctctttttccattgtcttaacatggaaggttaggttaaggttattgatttgagatcttctttcttaatataggcattcacacatattacatttatacttctaggcatgtcttttctttttttgacatggggtctcactccatcgcccaggctggagtgcagtggtgtgatagctcactgcaacctccgcctcccaggctcaagtgatcctcccacctcagcctcctgagtagctgggaacacaggcgccagctaattttttctgtttttagtagagatggggtttcaccatgttgcacaggctggtctcgaactcctgtgctcaagcaatctgcctgtctcagcctcccaaagtgctgggattacaggcgtgagccaccgggcctggcctggcctttacctgtgtctcataagttttttggtttttttttttttttctgagagggagtcttgctctgtcgcccaggctggagtgcagtggcacgatctcggcttactgcaagctccgcctcccgggttcacgccattctcctggctcagcctcccgagtagctgggactataggcgcctgccaccacgcccggctaattttttgtatttttagtggagatggggtttcactgtgttagccaggatggtctccatctcctgaccttgtgatctgcctgcctcggcctcccaaagtgctgggattacaggcgtgagccaccgtgcccggccataagttttgatatgttgtgtctttattcctgtttatctcagagtattttctgatttctcttttgatttattatttgagacgttggctatttaggagtgtgttgtttactttctacatatttgtgaatttccaaagttttttttttctgctattgacttctaatttcattccattgtggttggaaaacatacattgtatgacttctatcctttcaattttattgaggttttctttttttttttttttttttttttttgagacggagtctcgctctgtcgcccaggctggagtgcagtggtactgtctgctcactgcgagctctgcctccgatgttcacgccattctcctgcctcagcctcccaagtaggtgggactacaggcgtccaccaccgtgcccggctaattttttgtattttttagtagagacggggtttcatcatgtttgccaggatggtctcgatctcctgacctcatgatccaccccccttggcttcccaaactgctgggattacaggcatgagccaccgcgcccggacttattgaggttttcttaatggcctagtgtatggccttgaagagtgttccgtgtgcgcgtgagaagcgtgtgtgtggttgttattgggtagagtgttctagcctgcttatgaagtccagctgtagtgttgttcttatcttctggttctttgttgatcttctagttgttctatcccttattgaaagtggggtactggagtctccaactgacatacttttcttttagctttttattttggaaaatttcaaacatatatgaaagaagagataatgtacttactcatcacccagcttcaacatttatcaacatcttgccaatcttactgaatctatccttccttaccttttttaaaaatgtttcctagagtgtgtcaaagctcatcccagatgtcctaatgtttctagtaaatgcttctgcacaattctaaaagacaaggatgtttttaaacccagccccgacactatcatacctcacaagattcatgctaattcctcagtgtcttctagtcccaagtccatgctcaagtgtccccccctgtccaggcaccctcttcaggggtcctccatgtttcatagcgagaaggggccctgagagttgggcaccccgggcaggctggctggagggggctttggaaaggaaggctttggccagcgtgtgagggtgcaggtctcaccagctcctgtttggtctgtttcaggaacaaatgtggtatctggggctggcggtctgagaagatggaaactgttagcggctacgaggccaaggcaggagaggctaggggtggggggctgggggtaggagatgaggtccaggaactcagctcctctccacatccatcccagagtagcccctgggctctggaaaccctgagcatttgtgggaactcagcgggcctgagtgcccagcccctgcggagtacacagggctcacccacatcatgggcccctacccagggtaccgagatcaaaagaggagtgtgttcctcttgaccctggggctgcatctcctcgttggtgacttcctggggttcagaccctgccacctcctccattttggggagcaagatctcatctgtctctgggacaggaggacctgggttctgcactggtgaggctgagtgtggggagcaggctctgagcccccagctccccgtgtcccctgctccccaggtgtacagtgccaccaacgtggagctggtgacacgcacacgcacggagcacctctctgatcaggacaagtcgaggagcaaaggtaaacccagctttgaagagcagctgcgcctggccctggagttgtcttcacgggagcaggaggagcgggagcggcgcgggcagcaggaggaggaggacttacagcggatcctgcagctgtcactcactgagcactgagccatagccccgggagggctggccaggccactccctgcccgcttttgtaatttatttatttataaactctctgctgctgagcttggggcctggagccccaggaatgagcaggcaggggagactgagatggaaataaagagactgtcgcagca

SEQ ID NO: 21425 - protein, 108 aa, Homo sapiens
MGFHHVAQAGLELLCSSNLPVSASQSAGITGVSHRAWPGLYLCLISFLVFFFFSERESCSVAQAGVQWHDLGLLQAPPPGFTPFSWLSLPSSWDYRRLPPRPANFLYF

SEQ ID NO: 21426 - DNA, 2769 bp, Homo sapiens
ctttctacatatttgtgaatttccaaagttttttttttctgctattgacttctaatttcattccattgtggttggaaaacatacattgtatgacttctatcctttcaattttattgaggttttctttttttttttttttttttttttttgagacggagtctcgctctgtcgcccaggctggagtgcagtggtactgtctgctcactgcgagctctgcctccgatgttcacgccattctcctgcctcagcctcccaagtaggtgggactacaggcgtccaccaccgtgcccggctaattttttgtattttttagtagagacggggtttcatcatgtttgccaggatggtctcgatctcctgacctcatgatccaccccccttggcttcccaaactgctgggattacaggcatgagccaccgcgcccggacttattgaggttttcttaatggcctagtgtatggccttgaagagtgttccgtgtgcgcgtgagaagcgtgtgtgtggttgttattgggtagagtgttctagcctgcttatgaagtccagctgtagtgttgttcttatcttctggttctttgttgatcttctagttgttctatcccttattgaaagtggggtactggagtctccaactgacatacttttcttttagctttttattttggaaaatttcaaacatatatgaaagaagagataatgtacttactcatcacccagcttcaacatttatcaacatcttgccaatcttactgaatctatccttccttaccttttttaaaaatgtttcctagagtgtgtcaaagctcatcccagatgtcctaatgtttctagtaaatgcttctgcacaattctaaaagacaaggatgtttttaaacccagccccgacactatcatacctcacaagattcatgctaattcctcagtgtcttctagtcccaagtccatgctcaagtgtccccccctgtccaggcaccctcttcaggggtcctccatgtttcatagcgagaaggggccctgagagttgggcaccccgggcaggctggctggagggggctttggaaaggaaggctttggccagcgtgtgagggtgcaggtctcaccagctcctgtttggtctgtttcaggaacaaatgtggtatctggggctggcggtctgagaagatggaaactgttagcggctacgaggccaaggcaggagaggctaggggtggggggctgggggtaggagatgaggtccaggaactcagctcctctccacatccatcccagagtagcccctgggctctggaaaccctgagcatttgtgggaactcagcgggcctgagtgcccagcccctgcggagtacacagggctcacccacatcatgggcccctacccagggtaccgagatcaaaagaggagtgtgttcctcttgaccctggggctgcatctcctcgttggtgacttcctggggttcagaccctgccacctcctccattttggggagcaagatctcatctgtctctgggacaggaggacctgggttctgcactggtgaggctgagtgtggggagcaggctctgagcccccagctccccgtgtcccctgctccccaggtgtacagtgccaccaacgtggagctggtgacacgcacacgcacggagcacctctctgatcaggacaagtcgaggagcaaagcggggaagactccattccagtccttcctggggatggcgcagcagcattcctcccacaccggggcccccgtgcagcaggcagccagccccaccaaccccacagccatctcccctgaggagtacttcgaccccaacttcagcctggagtcacggaacattggccgccccatcgagatgtccagcaaagtacagaggttcaaggcaacactgtggctgagtgaagagcacccgctctccctgggtgaccaggtgacccccatcatcgacctaatggccatcagcaacgctcactttgccaagctgcgcgacttcatcactctgcgccttccacctggcttccccgtcaaaattgagattccccttttccacgtgctcaatgcccgcatcaccttcagcaacctgtgtggctgtgatgagcccctgagctccgtgtgggtgccggcccccagctctgctgttgccgcatcagggaaccctttcccgtgcgaggtggaccccaccgtgtttgaagtgcccaacgggtacagcgtgctgggcatggagcgcaacgagcccctccgggacgaggacgatgacctcctgcagttcgccatccagcagagcctgcttgaagcgggcactgaggcggagcaggtgaccgtctgggaagccctgaccaacacccggcccggtgcccgccctcctccccaggccacggtttatgaggaacagcttcagctggagcgggccctccaggaaagcctgcagctgtccacagagcccaggggcccaggatcccctcccaggacacccccagcccccggtccacccagctttgaagagcagctgcgcctggccctggagttgtcttcacgggagcaggaggagcgggagcggcgcgggcagcaggaggaggaggacttacagcggatcctgcagctgtcactcactgagcactgagccatagccccgggagggctggccaggccactccctgcccgcttttgtaatttatttatttataaactctctgctgctgagcttggggcctggagccccaggaatgagcaggcaggggagactgagatggaaataaagagactgtcgcagca

SEQ ID NO: 21427 - protein, 301 aa, Homo sapiens
MAQQHSSHTGAPVQQAASPTNPTAISPEEYFDPNFSLESRNIGRPIEMSSKVQRFKATLWLSEEHPLSLGDQVTPIIDLMAISNAHFAKLRDFITLRLPPGFPVKIEIPLFHVLNARITFSNLCGCDEPLSSVWVPAPSSAVAASGNPFPCEVDPTVFEVPNGYSVLGMERNEPLRDEDDDLLQFAIQQSLLEAGTEAEQVTVWEALTNTRPGARPPPQATVYEEQLQLERALQESLQLSTEPRGPGSPPRTPPAPGPPSFEEQLRLALELSSREQEERERRGQQEEEDLQRILQLSLTEH

SEQ ID NO: 21428 - DNA, 1111 bp, Homo sapiens
ggagccccagcctgggcccagggaggagggcagcttgggccacgtggccaggacaccagctcccgggggaggcgggcagcggcatctgagcagagcagggcactccaggccaggcagaaggtgggtaaaggcagctgcccacgaaccagagggcagtcctcaatggaagggccaccagccgtgcctcacccatgtcctgtggtcggctgggcaggttcaaggcaacactgtggctgagtgaagagcacccgctctccctgggtgaccaggtgacccccatcatcgacctaatggccatcagcaacgctcactttgccaagctgcgcgacttcatcactctgcgccttccacctggcttccccgtcaaaattgagattccccttttccacgtgctcaatgcccgcatcaccttcagcaacctgtgtggctgtgatgagcccctgagctccgtgtgggtgccggcccccagctctgctgttgccgcatcagggaaccctttcccgtgcgaggtggaccccaccgtgtttgaagtgcccaacgggtacagcgtgctgggcatggagcgcaacgagcccctccgggacgaggacgatgacctcctgcagttcgccatccagcagagcctgcttgaagcgggcactgaggcggagcaggtgaccgtctgggaagccctgaccaacacccggcccggtgcccgccctcctccccaggccacggtttatgaggaacagcttcagctggagcgggccctccaggaaagcctgcagctgtccacagagcccaggggcccaggatcccctcccaggacacccccagcccccggtccacccagctttgaagagcagctgcgcctggccctggagttgtcttcacgggagcaggaggagcgggagcggcgcgggcagcaggaggaggaggacttacagcggatcctgcagctgtcactcactgagcactgagccatagccccgggagggctggccaggccactccctgcccgcttttgtaatttatttatttataaactctctgctgctgagcttggggcctggagccccaggaatgagcaggcaggggagactgagatggaaataaagagactgtcgcagca

SEQ ID NO: 21429 - protein, 255 aa, Homo sapiens
MSCGRLGRFKATLWLSEEHPLSLGDQVTPIIDLMAISNAHFAKLRDFITLRLPPGFPVKIEIPLFHVLNARITFSNLCGCDEPLSSVWVPAPSSAVAASGNPFPCEVDPTVFEVPNGYSVLGMERNEPLRDEDDDLLQFAIQQSLLEAGTEAEQVTVWEALTNTRPGARPPPQATVYEEQLQLERALQESLQLSTEPRGPGSPPRTPPAPGPPSFEEQLRLALELSSREQEERERRGQQEEEDLQRILQLSLTEH

SEQ ID NO: 21430 - DNA, 971 bp, Homo sapiens
gccaggacaccagctcccgggggaggcgggcagcggcatctgagcagagcagggcactccaggccaggcagaaggttcaaggcaacactgtggctgagtgaagagcacccgctctccctgggtgaccaggtgacccccatcatcgacctaatggccatcagcaacgctcactttgccaagctgcgcgacttcatcactctgcgccttccacctggcttccccgtcaaaattgagattccccttttccacgtgctcaatgcccgcatcaccttcagcaacctgtgtggctgtgatgagcccctgagctccgtgtgggtgccggcccccagctctgctgttgccgcatcagggaaccctttcccgtgcgaggtggaccccaccgtgtttgaagtgcccaacgggtacagcgtgctgggcatggagcgcaacgagcccctccgggacgaggacgatgacctcctgcagttcgccatccagcagagcctgcttgaagcgggcactgaggcggagcaggtgaccgtctgggaagccctgaccaacacccggcccggtgcccgccctcctccccaggccacggtttatgaggaacagcttcagctggagcgggccctccaggaaagcctgcagctgtccacagagcccaggggcccaggatcccctcccaggacacccccagcccccggtccacccagctttgaagagcagctgcgcctggccctggagttgtcttcacgggagcaggaggagcgggagcggcgcgggcagcaggaggaggaggacttacagcggatcctgcagctgtcactcactgagcactgagccatagccccgggagggctggccaggccactccctgcccgcttttgtaatttatttatttataaactctctgctgctgagcttggggcctggagccccaggaatgagcaggcaggggagactgagatggaaataaagagactgtcgcagca

SEQ ID NO: 21431 - protein, 222 aa, Homo sapiens [sequence omitted]

SEQ ID NO: 21432 - DNA, 2049 bp, Homo sapiens
ctggccctttaagggccgcccccgaggaggtgccaggcccgggtggcgccgtccgtccttcctggtcctgcgggtccaggactgtccgcggggttgagggaaggggccgtgcccggtgccagcccaggtgctcgcggcctggctccatggccctggtcacagtgagccgttcgcccccgggcagcggcgcctccacgcccgtggggccctgggaccaggcggtccagcgaaggagtcgactccagcgaaggcagagctttgcggtgctccgtggggctgtcctgggactgcaggatggaggggacaatgatgatgcagcagaggccagttctgagccaacagagaaggccccgagtgaggaggagctccacggggaccagacagacttcgggcaaggatcccagagtccccagaagcaggaggagcagaggcagcacctgcacctcatggtacagctgctgaggccgcaggatgacatccgcctggcagcccagctggaggcaccccggcctccccggctccgctacctgctggtagtttctacacgagaaggagaaggtctgagccaggatgagacggtcctcctgggcgtggatttccctgacagcagctcccccagctgcaccctgggcctggtcttgcccctctggagtgacacccaggtgtacttagatggagacgggggcttcagcgtgacgtctggtgggcaaagccggatcttcaagcccatctccatccagaccatgtgggccacactccaggtattgcaccaagcatgtgaggcagctctaggcagcggccttgtaccgggtggcagtgccctcacctgggccagccactaccaggagagactgaactccgaacagagctgcctcaatgagtggacggctatggccgacctggagtctctgcggcctcccagcgccgagcctggcgggtcctcagaacaggagcagatggagcaggcgatccgtgctgagctgtggaaagtgttggatctggagagcacctcagagaccagtgacatgccagaggtcttctcttcccacgagtcttcacatgaagagcctctgcagcccttcccacagcttgcaaggaccaagggaggccagcaggtggacagggggcctcagcctgccctgaagtcccgccagtcagtggttaccctccagggcagtgccgtggtggccaaccggacccaggccttccaggagcaggagcaggggcaggggcaggggcagggagagccctgcatttcctctacgcccaggttccggaaggtggtgagacaggccagcgtgcatgacagtggagaggagggcgaggcctgagccctcacacatgcccacgctcccctgacactgaagaggatccacaactccttggagaaacaccctcacgtctgttgccgcacacattcctctcagctccgccccatacccgtcactacagcctcacctcccacccctgtcactacggcctcacctcccacccctgtcactacagcctcacctcctacagccttaagtcccaggcccatgtctgcctgtccaagggctcaagactttctaactgggatgtggtagagggactgaaggtacctttgggggcaacagcaccctagtttcattctcaactctagccctgcacactcacctgtggcacggaatgaaaacagagcttcccgtgcaaaaagggtcacgcctcccacccccgccccctccctgcacctcctgtcctctcccagttcattcctggaaccagccaggccaggcaaccagtggcccccaaaggcaggcaggatcctcaggccccagccgcgggaggctggaagggctggcagatcgcttccctcatccacctccaccggtccaggtctttgctgctgtccccagacctcctgtgacaccacgccagatcacagggcaccaggccagagatagtcttctttttgtcctttctggcctctggctagtcagtttttcatagccttacagtatctggctttgtactgagaaataaaacacattttcatatttggttattttc

SEQ ID NO: 21433 - protein, 394 aa, Homo sapiens
MALVTVSRSPPGSGASTPVGPWDQAVQRRSRLQRRQSFAVLRGAVLGLQDGGDNDDAAEASSEPTEKAPSEEELHGDQTDFGQGSQSPQKQEEQRQHLHLMVQLLRPQDDIRLAAQLEAPRPPRLRYLLVVSTREGEGLSQDETVLLGVDFPDSSSPSCTLGLVLPLWSDTQVYLDGDGGFSVTSGGQSRIFKPISIQTMWATLQVLHQACEAALGSGLVPGGSALTWASHYQERLNSEQSCLNEWTAMADLESLRPPSAEPGGSSEQEQMEQAIRAELWKVLDLESTSETSDMPEVFSSHESSHEEPLQPFPQLARTKGGQQVDRGPQPALKSRQSVVTLQGSAVVANRTQAFQEQEQGQGQGQGEPCISSTPRFRKVVRQASVHDSGEEGEA

SEQ ID NO: 21434 - DNA, 2794 bp, Homo sapiens
gtccgtccttcctggtcctgcgggtccaggactgtccgcggggttgagggaaggggccgtgcccggtgccagcccaggtgctcgcggcctggctccatggccctggtcacagtgagccgttcgcccccgggcagcggcgcctccacgcccgtggggccctgggaccaggcggtccagcgaaggagtcgactccagcgaaggcagagctttgcggtgctccgtggggctgtcctgggactgcaggatggaggggacaatgatgatgcagcagaggccagttctgagccaacagagaaggccccgagtgaggaggagctccacggggaccagacagacttcgggcaaggatcccagagtccccagaagcaggaggagcagaggcagcacctgcacctcatggtacagctgctgaggccgcaggatgacatccgcctggcagcccagctggaggcaccccggcctccccggctccgctacctgctggtagtttctacacgagaaggagaaggtctgagccaggatgagacggtcctcctgggcgtggatttccctgacagcagctcccccagctgcaccctgggcctggtcttgcccctctggagtgacacccaggtgtacttagatggagacgggggcttcagcgtgacgtctggtgggcaaagccggatcttcaagcccatctccatccagaccatgtgggccacactccaggtattgcaccaagcatgtgaggcagctctaggcagcggccttgtaccgggtggcagtgccctcacctgggccagccactaccaggagagactgaactccgaacagagctgcctcaatgagtggacggctatggccgacctggagtctctgcggcctcccagcgccgagcctggcgggtcctcagaacaggagcagatggagcaggcgatccgtgctgagctgtggaaagtgttggatgtcagtgacctggagagtgtcacttccaaagagatccgccaggctctggagctgcgcctggggctccccctccagcagtaccgtgacttcatcgacaaccagatgctgctgctggtggcacagcgggaccgagcctcccgcatcttcccccacctctacctgggctcagagtggaacgcagcaaacctggaggagctgcagaggaacagggtcacccacatcttgaacatggcccgggagattgacaacttctaccctgagcgcttcacctaccacaatgtgcgcctctgggatgaggagtcggcccagctgctgccgcactggaaggagacgcaccgcttcattgaggctgcaagagcacagggcacccacgtgctggtccactgcaagatgggcgtcagccgctcagcggccacagtgctggcctatgccatgaagcagtacgaatgcagcctggagcaggccctgcgccacgtgcaggagctccggcccatcgcccgccccaaccctggcttcctgcgccagctgcagatctaccagggcatcctgacggccagccgccagagccatgtctgggagcagaaagtgggtggggtctccccagaggagcacccagcccctgaagtctctacaccattcccacctcttccgccagaacctgagggtggtggggaggagaaggttgtaggcatggaagagagccaggcagccccgaaagaagagcctgggccacggccacgtataaacctccgaggggtcatgaggtccatcagtcttctggagccctccttggagctggagagcacctcagagaccagtgacatgccagaggtcttctcttcccacgagtcttcacatgaagagcctctgcagcccttcccacagcttgcaaggaccaagggaggccagcaggtggacagggggcctcagcctgccctgaagtcccgccagtcagtggttaccctccagggcagtgccgtggtggccaaccggacccaggccttccaggagcaggagcaggggcaggggcaggggcagggagagccctgcatttcctctacgcccaggttccggaaggtggtgagacaggccagcgtgcatgacagtggagaggagggcgaggcctgagccctcacacatgcccacgctcccctgacactgaagaggatccacaactccttggagaaacaccctcacgtctgttgccgcacacattcctctcagctccgccccatacccgtcactacagcctcacctcccacccctgtcactacggcctcacctcccacccctgtcactacagcctcacctcctacagccttaagtcccaggcccatgtctgcctgtccaagggctcaagactttctaactgggatgtggtagagggactgaaggtacctttgggggcaacagcaccctagtttcattctcaactctagccctgcacactcacctgtggcacggaatgaaaacagagcttcccgtgcaaaaagggtcacgcctcccacccccgccccctccctgcacctcctgtcctctcccagttcattcctggaaccagccaggccaggcaaccagtggcccccaaaggcaggcaggatcctcaggccccagccgcgggaggctggaagggctggcagatcgcttccctcatccacctccaccggtccaggtctttgctgctgtccccagacctcctgtgacaccacgccagatcacagggcaccaggccagagatagtcttctttttgtcctttctggcctctggctagtcagtttttcatagccttacagtatctggctttgtactgagaaataaaacacattttcatatttggttattttc

SEQ ID NO: 21435 - protein, 659 aa, Homo sapiens
MALVTVSRSPPGSGASTPVGPWDQAVQRRSRLQRRQSFAVLRGAVLGLQDGGDNDDAAEASSEPTEKAPSEEELHGDQTDFGQGSQSPQKQEEQRQHLHLMVQLLRPQDDIRLAAQLEAPRPPRLRYLLVVSTREGEGLSQDETVLLGVDFPDSSSPSCTLGLVLPLWSDTQVYLDGDGGFSVTSGGQSRIFKPISIQTMWATLQVLHQACEAALGSGLVPGGSALTWASHYQERLNSEQSCLNEWTAMADLESLRPPSAEPGGSSEQEQMEQAIRAELWKVLDVSDLESVTSKEIRQALELRLGLPLQQYRDFIDNQMLLLVAQRDRASRIFPHLYLGSEWNAANLEELQRNRVTHILNMAREIDNFYPERFTYHNVRLWDEESAQLLPHWKETHRFIEAARAQGTHVLVHCKMGVSRSAATVLAYAMKQYECSLEQALRHVQELRPIARPNPGFLRQLQIYQGILTASRQSHVWEQKVGGVSPEEHPAPEVSTPFPPLPPEPEGGGEEKVVGMEESQAAPKEEPGPRPRINLRGVMRSISLLEPSLELESTSETSDMPEVFSSHESSHEEPLQPFPQLARTKGGQQVDRGPQPALKSRQSVVTLQGSAVVANRTQAFQEQEQGQGQGQGEPCISSTPRFRKVVRQASVHDSGEEGEA

SEQ ID NO: 21436 - DNA, 1717 bp, Homo sapiens
gtcctgcgggtccaggactgtccgcggggttgagggaaggggccgtgcccggtgccagcccaggtgctcgcggcctggctccatggccctggtcacagtgagccgttcgcccccgggcagcggcgcctccacgcccgtggggccctgggaccaggcggtccagcgaaggagtcgactccagcgaaggcagagctttgcggtgctccgtggggctgtcctgggactgcaggatggaggggacaatgatgatgcagcagaggccagttctgagccaacagatggcccgggagattgacaacttctaccctgagcgcttcacctaccacaatgtgcgcctctgggatgaggagtcggcccagctgctgccgcactggaaggagacgcaccgcttcattgaggctgcaagagcacagggcacccacgtgctggtccactgcaagatgggcgtcagccgctcagcggccacagtgctggcctatgccatgaagcagtacgaatgcagcctggagcaggccctgcgccacgtgcaggagctccggcccatcgcccgccccaaccctggcttcctgcgccagctgcagatctaccagggcatcctgacggccagaacctgagggtggtggggaggagaaggttgtaggcatggaagagagccaggcagccccgaaagaagagcctgggccacggccacgtataaacctccgaggggtcatgaggtccatcagtcttctggagccctccttggagctggagagcacctcagagaccagtgacatgccagaggtcttctcttcccacgagtcttcacatgaagagcctctgcagcccttcccacagcttgcaaggaccaagggaggccagcaggtggacagggggcctcagcctgccctgaagtcccgccagtcagtggttaccctccagggcagtgccgtggtggccaaccggacccaggccttccaggagcaggagcaggggcaggggcaggggcagggagagccctgcatttcctctacgcccaggttccggaaggtggtgagacaggccagcgtgcatgacagtggagaggagggcgaggcctgagccctcacacatgcccacgctcccctgacactgaagaggatccacaactccttggagaaacaccctcacgtctgttgccgcacacattcctctcagctccgccccatacccgtcactacagcctcacctcccacccctgtcactacggcctcacctcccacccctgtcactacagcctcacctcctacagccttaagtcccaggcccatgtctgcctgtccaagggctcaagactttctaactgggatgtggtagagggactgaaggtacctttgggggcaacagcaccctagtttcattctcaactctagccctgcactcctgtcctctcccagttcattcctggaaccagccaggccaggcaaccagtggcccccaaaggcaggcaggatcctcaggccccagccgcgggaggctggaagggctggcagatcgcttccctcatccacctccaccggtccaggtctttgctgctgtccccagacctcctgtgacaccacgccagatcacagggcaccaggccagagatagtcttctttttgtcctttctggcctctggctagtcagtttttcatagccttacagtatctggctttgtactgagaaataaaacacattttcatatttggttattttc

SEQ ID NO: 21437 - protein, 145 aa, Homo sapiens [sequence omitted]

SEQ ID NO: 21438 - DNA, 2256 bp, Homo sapiens
gtcctgcgggtccaggactgtccgcggggttgagggaaggggccgtgcccggtgccagcccaggtgctcgcggcctggctccatggccctggtcacagtgagccgttcgcccccgggcagcggcgcctccacgcccgtggggccctgggaccaggcggtccagcgaaggagtcgactccagcgaaggcagagctttgcggtgctccgtggggctgtcctgggactgcaggatggaggggacaatgatgatgcagcagaggccagttctgagccaacagatggcccgggagattgacaacttctaccctgagcgcttcacctaccacaatgtgcgcctctgggatgaggagtcggcccagctgctgccgcactggaaggagacgcaccgcttcattgaggctgcaagagcacagggcacccacgtgctggtccactgcaagatgggcgtcagccgctcagcggccacagtgctggcctatgccatgaagcagtacgaatgcagcctggagcaggccctgcgccacgtgcaggagctccggcccatcgcccgccccaaccctggcttcctgcgccagctgcagatctaccagggcatcctgacggccagaacctgagggtggtggggaggagaaggttgtaggcatggaagagagccaggcagccccgaaagaagagcctgggccacggccacgtataaacctccgaggggtcatgaggtccatcagtcttctggagccctccttggagctggagagcacctcagagaccagtgacatgccagaggtcttctcttcccacgagtcttcacatgaagagcctctgcagcccttcccacagcttgcaaggaccaagggaggccagcaggtggacagggggcctcagcctgccctgaagtcccgccagtcagtggttaccctccagggcagtgccgtggtggccaaccggacccaggccttccaggagcaggagcaggggcaggggcaggggcagggagagccctgcatttcctctacgcccaggttccggaaggtggtgagacaggccagcgtgcatgacagtggagaggagggcgaggcctgagccctcacacatgcccacgctcccctgacactgaagaggatccacaactccttggagaaacaccctcacgtctgttgccgcacacattcctctcagctccgccccatacccgtcactacagcctcacctcccacccctgtcactacggcctcacctcccacccctgtcactacagcctcacctcctacagccttaagtcccaggcccatgtctgcctgtccaagggctcaagactttctaactgggatgtggtagagggactgaaggtacctttgggggcaacagcaccctagtttcattctcaactctagccctgcactcctgtcctctcccagttcattcctggaaccagccaggccaggcaaccagtggcccccaaaggcaggcaggatcctcaggccccagccgcgggaggctggaagggctggcagatcgcttccctcatccacctccaccggtccaggtctttgctgctgtccccagacctcctgtgacaccacgccagatcacagggcaccaggccagagatagtcttctttttgtcctttctggcctctggctagtcagtttttcatagccttacagtatctggctttgtactgagaaataaaacacattttcatatttggttattttcaatgtgacgatgaagccatctgtgttgcagtcagacccttctctgctggctggggaaggtggccgccccttcctcccagcagtctcctcacaattccaaggtggctcgtgacagacctatttgggggagtgccgtgtttgggcgtggcgtgggaggaagattgggtaagagaagagaggaagtcagtgctatctccccatctcctggggcagggcctggtaaatatgacctgctcacacccacccgctcagacaggtcgggcaagggaagaagtcgtcagcgggcagcaggcatgtggctccactgtgagagctggaaggggttactcatgaggaagtgcctacctggacaggaccaagcctgttccaaaagcgaagcctccttgggacactcggcgccaggttctctggcatgttttgggtcccaagaatcaccttcctcctgctacaaagcaaagggcctgactttccaagccaggctattgcggcctgggaagaaggacccttggtgacacttcccctcctgcccaggggttcctt

SEQ ID NO: 21439 - protein, 145 aa, Homo sapiens [sequence omitted]

SEQ ID NO: 21440 - DNA, 2676 bp, Homo sapiens
cgggtccaggactgtccgcggggttgagggaaggggccgtgcccggtgccagcccaggtgctcgcggcctggctccatggccctggtcacagtgagccgttcgcccccgggcagcggcgcctccacgcccgtggggccctgggaccaggcggtccagcgaaggagtcgactccagcgaaggcagagctttgcggtgctccgtggggctgtcctgggactgcaggatggaggggacaatgatgatgcagcagaggccagttctgagccaacagagaaggccccgagtgaggaggagctccacggggaccagacagacttcgggcaaggatcccagagtccccagaagcaggaggagcagaggcagcacctgcacctcatggtacagctgctgaggccgcaggatgacatccgcctggcagcccagctggaggcaccccggcctccccggctccgctacctgctggtagtttctacacgagaaggagaaggtctgagccaggatgagacggtcctcctgggcgtggatttccctgacagcagctcccccagctgcaccctgggcctggtcttgcccctctggagtgacacccaggtgtacttagatggagacgggggcttcagcgtgacgtctggtgggcaaagccggatcttcaagcccatctccatccagaccatgtgggccacactccaggtattgcaccaagcatgtgaggcagctctaggcagcggccttgtaccgggtggcagtgccctcacctgggccagccactaccaggagagactgaactccgaacagagctgcctcaatgagtggacggctatggccgacctggagtctctgcggcctcccagcgccgagcctggcgggtcctcagaacaggagcagatggagcaggcgatccgtgctgagctgtggaaagtgttggatgtcagtgacctggagagtgtcacttccaaagagatccgccaggctctggagctgcgcctggggctccccctccagcagtaccgtgacttcatcgacaaccagatgctgctgctggtggcacagcgggaccgagcctcccgcatcttcccccacctctacctgggctcagagtggaacgcagcaaacctggaggagctgcagaggaacagggtcacccacatcttgaacatggcccgggagattgacaacttctaccctgagcgcttcacctaccacaatgtgcgcctctgggatgaggagtcggcccagctgctgccgcactggaaggagacgcaccgcttcattgaggctgcaagagcacagggcacccacgtgctggtccactgcaagatgggcgtcagccgctcagcggccacagtgctggcctatgccatgaagcagtacgaatgcagcctggagcaggccctgcgccacgtgcaggagctccggcccatcgcccgccccaaccctggcttcctgcgccagctgcagatctaccagggcatcctgacggccagaacctgagggtggtggggaggagaaggttgtaggcatggaagagagccaggcagccccgaaagaagagcctgggccacggccacgtataaacctccgaggggtcatgaggtccatcagtcttctggagccctccttggagctggagagcacctcagagaccagtgacatgccagaggtcttctcttcccacgagtcttcacatgaagagcctctgcagcccttcccacagcttgcaaggaccaagggaggccagcaggtggacagggggcctcagcctgccctgaagtcccgccagtcagtggttaccctccagggcagtgccgtggtggccaaccggacccaggccttccaggagcaggagcaggggcaggggcaggggcagggagagccctgcatttcctctacgcccaggttccggaaggtggtgagacaggccagcgtgcatgacagtggagaggagggcgaggcctgagccctcacacatgcccacgctcccctgacactgaagaggatccacaactccttggagaaacaccctcacgtctgttgccgcacacattcctctcagctccgccccatacccgtcactacagcctcacctcccacccctgtcactacggcctcacctcccacccctgtcactacagcctcacctcctacagccttaagtcccaggcccatgtctgcctgtccaagggctcaagactttctaactgggatgtggtagagggactgaaggtacctttgggggcaacagcaccctagtttcattctcaactctagccctgcacactcacctgtggcacggaatgaaaacagagcttcccgtgcaaaaagggtcacgcctcccacccccgccccctccctgcacctcctgtcctctcccagttcattcctggaaccagccaggccaggcaaccagtggcccccaaaggcaggcaggatcctcaggccccagccgcgggaggctggaagggctggcagatcgcttccctcatccacctccaccggtccaggtctttgctgctgtccccagacctcctgtgacaccacgccagatcacagggcaccaggccagagatagtcttctttttgtcctttctggcctctggctagtcagtttttcatagccttacagtatctggctttgtactgagaaataaaacacattttcatatttggttattttc

SEQ ID NO: 21441 - protein, 471 aa, Homo sapiens
MALVTVSRSPPGSGASTPVGPWDQAVQRRSRLQRRQSFAVLRGAVLGLQDGGDNDDAAEASSEPTEKAPSEEELHGDQTDFGQGSQSPQKQEEQRQHLHLMVQLLRPQDDIRLAAQLEAPRPPRLRYLLVVSTREGEGLSQDETVLLGVDFPDSSSPSCTLGLVLPLWSDTQVYLDGDGGFSVTSGGQSRIFKPISIQTMWATLQVLHQACEAALGSGLVPGGSALTWASHYQERLNSEQSCLNEWTAMADLESLRPPSAEPGGSSEQEQMEQAIRAELWKVLDVSDLESVTSKEIRQALELRLGLPLQQYRDFIDNQMLLLVAQRDRASRIFPHLYLGSEWNAANLEELQRNRVTHILNMAREIDNFYPERFTYHNVRLWDEESAQLLPHWKETHRFIEAARAQGTHVLVHCKMGVSRSAATVLAYAMKQYECSLEQALRHVQELRPIARPNPGFLRQLQIYQGILTART

SEQ ID NO: 21442 - DNA, 3313 bp, Homo sapiens
cgggtccaggactgtccgcggggttgagggaaggggccgtgcccggtgccagcccaggtgctcgcggcctggctccatggccctggtcacagtgagccgttcgcccccgggcagcggcgcctccacgcccgtggggccctgggaccaggcggtccagcgaaggagtcgactccagcgaaggcagagctttgcggtgctccgtggggctgtcctgggactgcaggatggaggggacaatgatgatgcagcagaggccagttctgagccaacagagaaggccccgagtgaggaggagctccacggggaccagacagacttcgggcaaggatcccagagtccccagaagcaggaggagcagaggcagcacctgcacctcatggtacagctgctgaggccgcaggatgacatccgcctggcagcccagctggaggcaccccggcctccccggctccgctacctgctggtagtttctacacgagaaggagaaggtctgagccaggatgagacggtcctcctgggcgtggatttccctgacagcagctcccccagctgcaccctgggcctggtcttgcccctctggagtgacacccaggtgtacttagatggagacgggggcttcagcgtgacgtctggtgggcaaagccggatcttcaagcccatctccatccagaccatgtgggccacactccaggtattgcaccaagcatgtgaggcagctctaggcagcggccttgtaccgggtggcagtgccctcacctgggccagccactaccaggagagactgaactccgaacagagctgcctcaatgagtggacggctatggccgacctggagtctctgcggcctcccagcgccgagcctggcgggtcctcagaacaggagcagatggagcaggcgatccgtgctgagctgtggaaagtgttggatgtcagtgacctggagagtgtcacttccaaagagatccgccaggctctggagctgcgcctggggctccccctccagcagtaccgtgacttcatcgacaaccagatgctgctgctggtggcacagcgggaccgagcctcccgcatcttcccccacctctacctgggctcagagtggaacgcagcaaacctggaggagctgcagaggaacagggtcacccacatcttgaacatggcccgggagattgacaacttctaccctgagcgcttcacctaccacaatgtgcgcctctgggatgaggagtcggcccagctgctgccgcactggaaggagacgcaccgcttcattgaggctgcaagagcacagggcacccacgtgctggtccactgcaagatgggcgtcagccgctcagcggccacagtgctggcctatgccatgaagcagtacgaatgcagcctggagcaggccctgcgccacgtgcaggagctccggcccatcgcccgccccaaccctggcttcctgcgccagctgcagatctaccagggcatcctgacggccagccgccagagccatgtctgggagcagaaagtgggtggggtctccccagaggagcacccagcccctgaagtctctacaccattcccacctcttccgccagaacctgagggtggtggggaggagaaggttgtaggcatggaagagagccaggcagccccgaaagaagagcctgggccacggccacgtataaacctccgaggggtcatgaggtccatcagtcttctggagccctccttggagctggagagcacctcagagaccagtgacatgccagaggtcttctcttcccacgagtcttcacatgaagagcctctgcagcccttcccacagcttgcaaggaccaagggaggccagcaggtggacagggggcctcagcctgccctgaagtcccgccagtcagtggttaccctccagggcagtgccgtggtggccaaccggacccaggccttccaggagcaggagcaggggcaggggcaggggcagggagagccctgcatttcctctacgcccaggttccggaaggtggtgagacaggccagcgtgcatgacagtggagaggagggcgaggcctgagccctcacacatgcccacgctcccctgacactgaagaggatccacaactccttggagaaacaccctcacgtctgttgccgcacacattcctctcagctccgccccatacccgtcactacagcctcacctcccacccctgtcactacggcctcacctcccacccctgtcactacagcctcacctcctacagccttaagtcccaggcccatgtctgcctgtccaagggctcaagactttctaactgggatgtggtagagggactgaaggtacctttgggggcaacagcaccctagtttcattctcaactctagccctgcacactcacctgtggcacggaatgaaaacagagcttcccgtgcaaaaagggtcacgcctcccacccccgccccctccctgcacctcctgtcctctcccagttcattcctggaaccagccaggccaggcaaccagtggcccccaaaggcaggcaggatcctcaggccccagccgcgggaggctggaagggctggcagatcgcttccctcatccacctccaccggtccaggtctttgctgctgtccccagacctcctgtgacaccacgccagatcacagggcaccaggccagagatagtcttctttttgtcctttctggcctctggctagtcagtttttcatagccttacagtatctggctttgtactgagaaataaaacacattttcatatttggttattttcaatgtgacgatgaagccatctgtgttgcagtcagacccttctctgctggctggggaaggtggccgccccttcctcccagcagtctcctcacaattccaaggtggctcgtgacagacctatttgggggagtgccgtgtttgggcgtggcgtgggaggaagattgggtaagagaagagaggaagtcagtgctatctccccatctcctggggcagggcctggtaaatatgacctgctcacacccacccgctcagacaggtcgggcaagggaagaagtcgtcagcgggcagcaggcatgtggctccactgtgagagctggaaggggttactcatgaggaagtgcctacctggacaggaccaagcctgttccaaaagcgaagcctccttgggacactcggcgccaggttctctggcatgttttgggtcccaagaatcaccttcctcctgctacaaagcaaagggcctgactttccaagccaggctattgcggcctgggaagaaggacccttggtgacacttcccctcctgcccaggggttcctt

SEQ ID NO: 21443 - protein, 659 aa, Homo sapiens; identical to SEQ ID NO: 21435

SEQ ID NO: 21444 - DNA, 2909 bp, Homo sapiens
gtccgcggggttgagggaaggggccgtgcccggtgccagcccaggtgctcgcggcctggctccatggccctggtcacagtgagccgttcgcccccgggcagcggcgcctccacgcccgtggggccctggaattcctgagagaggggaggggacagccctccccgccctcaccctgccctggggctgctctctccgcaggaccaggcggtccagcgaaggagtcgactccagcgaaggcagagctttgcggtgctccgtggggctgtcctgggactgcaggatggaggggacaatgatgatgcagcagaggccagttctgagccaacagagaaggccccgagtgaggaggagctccacggggaccagacagacttcgggcaaggatcccagagtccccagaagcaggaggagcagaggcagcacctgcacctcatggtacagctgctgaggccgcaggatgacatccgcctggcagcccagctggaggcaccccggcctccccggctccgctacctgctggtagtttctacacgagaaggagaaggtctgagccaggatgagacggtcctcctgggcgtggatttccctgacagcaggttcgagcagggagaggaaaggaggggcaaagaggtgagggacaggggggacaatggctttccctctgtcccctgccagctcccccagctgcaccctgggcctggtcttgcccctctggagtgacacccaggtgtacttagatggagacgggggcttcagcgtgacgtctggtgggcaaagccggatcttcaagcccatctccatccagaccatgtgggccacactccaggtattgcaccaagcatgtgaggcagctctaggcagcggccttgtaccgggtggcagtgccctcacctgggccagccactaccaggagagactgaactccgaacagagctgcctcaatgagtggacggctatggccgacctggagtctctgcggcctcccagcgccgagcctggcgggtcctcagaacaggagcagatggagcaggcgatccgtgctgagctgtggaaagtgttggatgtcagtgacctggagagtgtcacttccaaagagatccgccaggctctggagctgcgcctggggctccccctccagcagtaccgtgacttcatcgacaaccagatgctgctgctggtggcacagcgggaccgagcctcccgcatcttcccccacctctacctgggctcagagtggaacgcagcaaacctggaggagctgcagaggaacagggtcacccacatcttgaacatggcccgggagattgacaacttctaccctgagcgcttcacctaccacaatgtgcgcctctgggatgaggagtcggcccagctgctgccgcactggaaggagacgcaccgcttcattgaggctgcaagagcacagggcacccacgtgctggtccactgcaagatgggcgtcagccgctcagcggccacagtgctggcctatgccatgaagcagtacgaatgcagcctggagcaggccctgcgccacgtgcaggagctccggcccatcgcccgccccaaccctggcttcctgcgccagctgcagatctaccagggcatcctgacggccagccgccagagccatgtctgggagcagaaagtgggtggggtctccccagaggagcacccagcccctgaagtctctacaccattcccacctcttccgccagaacctgagggtggtggggaggagaaggttgtaggcatggaagagagccaggcagccccgaaagaagagcctgggccacggccacgtataaacctccgaggggtcatgaggtccatcagtcttctggagccctccttggagctggagagcacctcagagaccagtgacatgccagaggtcttctcttcccacgagtcttcacatgaagagcctctgcagcccttcccacagcttgcaaggaccaagggaggccagcaggtggacagggggcctcagcctgccctgaagtcccgccagtcagtggttaccctccagggcagtgccgtggtggccaaccggacccaggccttccaggagcaggagcaggggcaggggcaggggcagggagagccctgcatttcctctacgcccaggttccggaaggtggtgagacaggccagcgtgcatgacagtggagaggagggcgaggcctgagccctcacacatgcccacgctcccctgacactgaagaggatccacaactccttggagaaacaccctcacgtctgttgccgcacacattcctctcagctccgccccatacccgtcactacagcctcacctcccacccctgtcactacggcctcacctcccacccctgtcactacagcctcacctcctacagccttaagtcccaggcccatgtctgcctgtccaagggctcaagactttctaactgggatgtggtagagggactgaaggtacctttgggggcaacagcaccctagtttcattctcaactctagccctgcacactcacctgtggcacggaatgaaaacagagcttcccgtgcaaaaagggtcacgcctcccacccccgccccctccctgcacctcctgtcctctcccagttcattcctggaaccagccaggccaggcaaccagtggcccccaaaggcaggcaggatcctcaggccccagccgcgggaggctggaagggctggcagatcgcttccctcatccacctccaccggtccaggtctttgctgctgtccccagacctcctgtgacaccacgccagatcacagggcaccaggccagagatagtcttctttttgtcctttctggcctctggctagtcagtttttcatagccttacagtatctggctttgtactgagaaataaaacacattttcatatttggttattttc

SEQ ID NO: 21445 - protein, 513 aa, Homo sapiens
MAFPLSPASSPSCTLGLVLPLWSDTQVYLDGDGGFSVTSGGQSRIFKPISIQTMWATLQVLHQACEAALGSGLVPGGSALTWASHYQERLNSEQSCLNEWTAMADLESLRPPSAEPGGSSEQEQMEQAIRAELWKVLDVSDLESVTSKEIRQALELRLGLPLQQYRDFIDNQMLLLVAQRDRASRIFPHLYLGSEWNAANLEELQRNRVTHILNMAREIDNFYPERFTYHNVRLWDEESAQLLPHWKETHRFIEAARAQGTHVLVHCKMGVSRSAATVLAYAMKQYECSLEQALRHVQELRPIARPNPGFLRQLQIYQGILTASRQSHVWEQKVGGVSPEEHPAPEVSTPFPPLPPEPEGGGEEKVVGMEESQAAPKEEPGPRPRINLRGVMRSISLLEPSLELESTSETSDMPEVFSSHESSHEEPLQPFPQLARTKGGQQVDRGPQPALKSRQSVVTLQGSAVVANRTQAFQEQEQGQGQGQGEPCISSTPRFRKVVRQASVHDSGEEGEA

SEQ ID NO: 21446 - DNA, 3448 bp, Homo sapiens
gtccgcggggttgagggaaggggccgtgcccggtgccagcccaggtgctcgcggcctggctccatggccctggtcacagtgagccgttcgcccccgggcagcggcgcctccacgcccgtggggccctggaattcctgagagaggggaggggacagccctccccgccctcaccctgccctggggctgctctctccgcaggaccaggcggtccagcgaaggagtcgactccagcgaaggcagagctttgcggtgctccgtggggctgtcctgggactgcaggatggaggggacaatgatgatgcagcagaggccagttctgagccaacagagaaggccccgagtgaggaggagctccacggggaccagacagacttcgggcaaggatcccagagtccccagaagcaggaggagcagaggcagcacctgcacctcatggtacagctgctgaggccgcaggatgacatccgcctggcagcccagctggaggcaccccggcctccccggctccgctacctgctggtagtttctacacgagaaggagaaggtctgagccaggatgagacggtcctcctgggcgtggatttccctgacagcaggttcgagcagggagaggaaaggaggggcaaagaggtgagggacaggggggacaatggctttccctctgtcccctgccagctcccccagctgcaccctgggcctggtcttgcccctctggagtgacacccaggtgtacttagatggagacgggggcttcagcgtgacgtctggtgggcaaagccggatcttcaagcccatctccatccagaccatgtgggccacactccaggtattgcaccaagcatgtgaggcagctctaggcagcggccttgtaccgggtggcagtgccctcacctgggccagccactaccaggagagactgaactccgaacagagctgcctcaatgagtggacggctatggccgacctggagtctctgcggcctcccagcgccgagcctggcgggtcctcagaacaggagcagatggagcaggcgatccgtgctgagctgtggaaagtgttggatgtcagtgacctggagagtgtcacttccaaagagatccgccaggctctggagctgcgcctggggctccccctccagcagtaccgtgacttcatcgacaaccagatgctgctgctggtggcacagcgggaccgagcctcccgcatcttcccccacctctacctgggctcagagtggaacgcagcaaacctggaggagctgcagaggaacagggtcacccacatcttgaacatggcccgggagattgacaacttctaccctgagcgcttcacctaccacaatgtgcgcctctgggatgaggagtcggcccagctgctgccgcactggaaggagacgcaccgcttcattgaggctgcaagagcacagggcacccacgtgctggtccactgcaagatgggcgtcagccgctcagcggccacagtgctggcctatgccatgaagcagtacgaatgcagcctggagcaggccctgcgccacgtgcaggagctccggcccatcgcccgccccaaccctggcttcctgcgccagctgcagatctaccagggcatcctgacggccagccgccagagccatgtctgggagcagaaagtgggtggggtctccccagaggagcacccagcccctgaagtctctacaccattcccacctcttccgccagaacctgagggtggtggggaggagaaggttgtaggcatggaagagagccaggcagccccgaaagaagagcctgggccacggccacgtataaacctccgaggggtcatgaggtccatcagtcttctggagccctccttggagctggagagcacctcagagaccagtgacatgccagaggtcttctcttcccacgagtcttcacatgaagagcctctgcagcccttcccacagcttgcaaggaccaagggaggccagcaggtggacagggggcctcagcctgccctgaagtcccgccagtcagtggttaccctccagggcagtgccgtggtggccaaccggacccaggccttccaggagcaggagcaggggcaggggcaggggcagggagagccctgcatttcctctacgcccaggttccggaaggtggtgagacaggccagcgtgcatgacagtggagaggagggcgaggcctgagccctcacacatgcccacgctcccctgacactgaagaggatccacaactccttggagaaacaccctcacgtctgttgccgcacacattcctctcagctccgccccatacccgtcactacagcctcacctcccacccctgtcactacggcctcacctcccacccctgtcactacagcctcacctcctacagccttaagtcccaggcccatgtctgcctgtccaagggctcaagactttctaactgggatgtggtagagggactgaaggtacctttgggggcaacagcaccctagtttcattctcaactctagccctgcacactcacctgtggcacggaatgaaaacagagcttcccgtgcaaaaagggtcacgcctcccacccccgccccctccctgcacctcctgtcctctcccagttcattcctggaaccagccaggccaggcaaccagtggcccccaaaggcaggcaggatcctcaggccccagccgcgggaggctggaagggctggcagatcgcttccctcatccacctccaccggtccaggtctttgctgctgtccccagacctcctgtgacaccacgccagatcacagggcaccaggccagagatagtcttctttttgtcctttctggcctctggctagtcagtttttcatagccttacagtatctggctttgtactgagaaataaaacacattttcatatttggttattttcaatgtgacgatgaagccatctgtgttgcagtcagacccttctctgctggctggggaaggtggccgccccttcctcccagcagtctcctcacaattccaaggtggctcgtgacagacctatttgggggagtgccgtgtttgggcgtggcgtgggaggaagattgggtaagagaagagaggaagtcagtgctatctccccatctcctggggcagggcctggtaaatatgacctgctcacacccacccgctcagacaggtcgggcaagggaagaagtcgtcagcgggcagcaggcatgtggctccactgtgagagctggaaggggttactcatgaggaagtgcctacctggacaggaccaagcctgttccaaaagcgaagcctccttgggacactcggcgccaggttctctggcatgttttgggtcccaagaatcaccttcctcctgctacaaagcaaagggcctgactttccaagccaggctattgcggcctgggaagaaggacccttggtgacacttcccctcctgcccaggggttcctt

SEQ ID NO: 21447 - protein, 513 aa, Homo sapiens; identical to SEQ ID NO: 21445

SEQ ID NO: 21448 - DNA, 821 bp, Homo sapiens
ctccccgccctcaccctgccctggggctgctctctccgcaggaccaggcggtccagcgaaggagtcgactccagcgaaggcagagctttgcggtgctccgtggggctgtcctgggatgctgtccccagacctcctgtgacaccacgccagatcacagggcaccaggccagagatagtcttctttttgtcctttctggcctctggctagtcagtttttcatagccttacagtatctggctttgtactgagaaataaaacacattttcatatttggttattttcaatgtgacgatgaagccatctgtgttgcagtcagacccttctctgctggctggggaaggtggccgccccttcctcccagcagtctcctcacaattccaaggtggctcgtgacagacctatttgggggagtgccgtgtttgggcgtggcgtgggaggaagattgggtaagagaagagaggaagtcagtgctatctccccatctcctggggcagggcctggtaaatatgacctgctcacacccacccgctcagacaggtcgggcaagggaagaagtcgtcagcgggcagcaggcatgtggctccactgtgagagctggaaggggttactcatgaggaagtgcctacctggacaggaccaagcctgttccaaaagcgaagcctccttgggacactcggcgccaggttctctggcatgttttgggtcccaagaatcaccttcctcctgctacaaagcaaagggcctgactttccaagccaggctattgcggcctgggaagaaggacccttggtgacacttcccctcctgcccaggggttcctt

SEQ ID NO: 21449 - protein, 72 aa, Homo sapiens
MWLHCESWKGLLMRKCLPGQDQACSKSEASLGHSAPGSLACFGSQESPSSCYKAKGLTFQARLLRPGKKDPW

SEQ ID NO: 21450 - DNA, 521 bp, Homo sapiens
ccagaagcaggaggagcagaggcagcacctgcacctcatggtacagctgctgaggccgcaggatgacatccgcctggcagcccagctggaggcaccccggcctccccggctccgctacctgctggtagtttctacacgagaaggagaaggtctgagccaggatgagacggtcctcctgggcgtggatttccctgacagcaggttcgagcagggagaggaaaggaggggcaaagaggtgagggacaggggggacaatggctttccctctgtcccctgccagctcccccagctgcaccctgggcctggtcttgcccctctggagtgacacccaggtgtacttagatggagtccaggtctttgctgctgtccccagacctcctgtgacaccacgccagatcacagggcaccaggccagagatagtcttctttttgtcctttctggcctctggctagtcagtttttcatagccttacagtatctggctttgtactgagaaataaaacacattttcatatttggtt

SEQ ID NO: 21451 - protein, 95 aa, Homo sapiens
MVQLLRPQDDIRLAAQLEAPRPPRLRYLLVVSTREGEGLSQDETVLLGVDFPDSRFEQGEERRGKEVRDRGDNGFPSVPCQLPQLHPGPGLAPLE

SEQ ID NO: 21452 - DNA, 1066 bp, Homo sapiens
ccagaagcaggaggagcagaggcagcacctgcacctcatggtacagctgctgaggccgcaggatgacatccgcctggcagcccagctggaggcaccccggcctccccggctccgctacctgctggtagtttctacacgagaaggagaaggtctgagccaggatgagacggtcctcctgggcgtggatttccctgacagcaggttcgagcagggagaggaaaggaggggcaaagaggtgagggacaggggggacaatggctttccctctgtcccctgccagctcccccagctgcaccctgggcctggtcttgcccctctggagtgacacccaggtgtacttagatggagtccaggtctttgctgctgtccccagacctcctgtgacaccacgccagatcacagggcaccaggccagagatagtcttctttttgtcctttctggcctctggctagtcagtttttcatagccttacagtatctggctttgtactgagaaataaaacacattttcatatttggttattttcaatgtgacgatgaagccatctgtgttgcagtcagacccttctctgctggctggggaaggtggccgccccttcctcccagcagtctcctcacaattccaaggtggctcgtgacagacctatttgggggagtgccgtgtttgggcgtggcgtgggaggaagattgggtaagagaagagaggaagtcagtgctatctccccatctcctggggcagggcctggtaaatatgacctgctcacacccacccgctcagacaggtcgggcaagggaagaagtcgtcagcgggcagcaggcatgtggctccactgtgagagctggaaggggttactcatgaggaagtgcctacctggacaggaccaagcctgttccaaaagcgaagcctccttgggacactcggcgccaggttctctggcatgttttgggtcccaagaatcaccttcctcctgctacaaagcaaagggcctgactttccaagccaggctattgcggcctgggaagaaggacccttggtgacacttcccctcctgcccaggggttcctt

SEQ ID NO: 21453 - protein, 95 aa, Homo sapiens; identical to SEQ ID NO: 21451

SEQ ID NO: 21454 - DNA, 2393 bp, Homo sapiens
ggccagcccccgcccactctcctcccccatccacactgtgaaacaaggacagaaacaaagggcctcagccacgccaagacgagaagcagcagcgcatactgctgtaactgccttggacaagcagaaaaaggctcctcttgaatgcgcctgtgggcccagctacttgggaggctgaggcaggaggatcgcttgagccctggagattgaggccgcagtgagccgtgatcacgccactgcactccagcctgggcaacagagagagaccctgtctctaaaaaataagaaaaaagaaagagagaaaaagccttttctccaccttgccctgtctcagggaagaaggaactgcccttctccccgtggggacctggctgcctgctctgacaggtacctgtcatctgcccaccatgggcttctgggacctgctgtagcccctgccacccactgctgcagacccacccactctcagcttagctcaaaagctgttctctaactcatttctgagaataactgaagggctggagttgcagttggcccagctgtctggaccagatggggaaacaagcccagcagggcaagatgattggtctaaggtcgcagccaggtgacagctgggtcacttctcctcccactgtcactgctgcctccatctgacttgaaactcagagctaaagcgaggcccaggggctgccaggtccgattgccagtgggcctggtacctctgcccacatcagcctggccttgggccctctgggacagggtcacccacatcttgaacatggcccgggagattgacaacttctaccctgagcgcttcacctaccacaatgtgcgcctctgggatgaggagtcggcccagctgctgccgcactggaaggagacgcaccgcttcattgaggctgcaagagcacagggcacccacgtgctggtccactgcaagatgggcgtcagccgctcagcggccacagtgctggcctatgccatgaagcagtacgaatgcagcctggagcaggccctgcgccacgtgcaggagctccggcccatcgcccgccccaaccctggcttcctgcgccagctgcagatctaccagggcatcctgacggccagccgccagagccatgtctgggagcagaaagtgggtggggtctccccagaggagcacccagcccctgaagtctctacaccattcccacctcttccgccagaacctgagggtggtggggaggagaaggttgtaggcatggaagagagccaggcagccccgaaagaagagcctgggccacggccacgtataaacctccgaggggtcatgaggtccatcagtcttctggagccctccttggagctggagagcacctcagagaccagtgacatgccagaggtcttctcttcccacgagtcttcacatgaagagcctctgcagcccttcccacagcttgcaaggaccaagggaggccagcaggtggacagggggcctcagcctgccctgaagtcccgccagtcagtggttaccctccagggcagtgccgtggtggccaaccggacccaggccttccaggagcaggagcaggggcaggggcaggggcagggagagccctgcatttcctctacgcccaggttccggaaggtggtgagacaggccagcgtgcatgacagtggagaggagggcgaggcctgagccctcacacatgcccacgctcccctgacactgaagaggatccacaactccttggagaaacaccctcacgtctgttgccgcacacattcctctcagctccgccccatacccgtcactacagcctcacctcccacccctgtcactacggcctcacctcccacccctgtcactacagcctcacctcctacagccttaagtcccaggcccatgtctgcctgtccaagggctcaagactttctaactgggatgtggtagagggactgaaggtacctttgggggcaacagcaccctagtttcattctcaactctagccctgcacactcacctgtggcacggaatgaaaacagagcttcccgtgcaaaaagggtcacgcctcccacccccgccccctccctgcacctcctgtcctctcccagttcattcctggaaccagccaggccaggcaaccagtggcccccaaaggcaggcaggatcctcaggccccagccgcgggaggctggaagggctggcagatcgcttccctcatccacctccaccggtccaggtctttgctgctgtccccagacctcctgtgacaccacgccagatcacagggcaccaggccagagatagtcttctttttgtcctttctggcctctggctagtcagtttttcatagccttacagtatctggctttgtactgagaaataaaacacattttcatatttggttattttc

SEQ ID NO: 21455 - protein, 299 aa, Homo sapiens
MAREIDNFYPERFTYHNVRLWDEESAQLLPHWKETHRFIEAARAQGTHVLVHCKMGVSRSAATVLAYAMKQYECSLEQALRHVQELRPIARPNPGFLRQLQIYQGILTASRQSHVWEQKVGGVSPEEHPAPEVSTPFPPLPPEPEGGGEEKVVGMEESQAAPKEEPGPRPRINLRGVMRSISLLEPSLELESTSETSDMPEVFSSHESSHEEPLQPFPQLARTKGGQQVDRGPQPALKSRQSVVTLQGSAVVANRTQAFQEQEQGQGQGQGEPCISSTPRFRKVVRQASVHDSGEEGEA

SEQ ID NO: 21456 - DNA, 2932 bp, Homo sapiens
ggccagcccccgcccactctcctcccccatccacactgtgaaacaaggacagaaacaaagggcctcagccacgccaagacgagaagcagcagcgcatactgctgtaactgccttggacaagcagaaaaaggctcctcttgaatgcgcctgtgggcccagctacttgggaggctgaggcaggaggatcgcttgagccctggagattgaggccgcagtgagccgtgatcacgccactgcactccagcctgggcaacagagagagaccctgtctctaaaaaataagaaaaaagaaagagagaaaaagccttttctccaccttgccctgtctcagggaagaaggaactgcccttctccccgtggggacctggctgcctgctctgacaggtacctgtcatctgcccaccatgggcttctgggacctgctgtagcccctgccacccactgctgcagacccacccactctcagcttagctcaaaagctgttctctaactcatttctgagaataactgaagggctggagttgcagttggcccagctgtctggaccagatggggaaacaagcccagcagggcaagatgattggtctaaggtcgcagccaggtgacagctgggtcacttctcctcccactgtcactgctgcctccatctgacttgaaactcagagctaaagcgaggcccaggggctgccaggtccgattgccagtgggcctggtacctctgcccacatcagcctggccttgggccctctgggacagggtcacccacatcttgaacatggcccgggagattgacaacttctaccctgagcgcttcacctaccacaatgtgcgcctctgggatgaggagtcggcccagctgctgccgcactggaaggagacgcaccgcttcattgaggctgcaagagcacagggcacccacgtgctggtccactgcaagatgggcgtcagccgctcagcggccacagtgctggcctatgccatgaagcagtacgaatgcagcctggagcaggccctgcgccacgtgcaggagctccggcccatcgcccgccccaaccctggcttcctgcgccagctgcagatctaccagggcatcctgacggccagccgccagagccatgtctgggagcagaaagtgggtggggtctccccagaggagcacccagcccctgaagtctctacaccattcccacctcttccgccagaacctgagggtggtggggaggagaaggttgtaggcatggaagagagccaggcagccccgaaagaagagcctgggccacggccacgtataaacctccgaggggtcatgaggtccatcagtcttctggagccctccttggagctggagagcacctcagagaccagtgacatgccagaggtcttctcttcccacgagtcttcacatgaagagcctctgcagcccttcccacagcttgcaaggaccaagggaggccagcaggtggacagggggcctcagcctgccctgaagtcccgccagtcagtggttaccctccagggcagtgccgtggtggccaaccggacccaggccttccaggagcaggagcaggggcaggggcaggggcagggagagccctgcatttcctctacgcccaggttccggaaggtggtgagacaggccagcgtgcatgacagtggagaggagggcgaggcctgagccctcacacatgcccacgctcccctgacactgaagaggatccacaactccttggagaaacaccctcacgtctgttgccgcacacattcctctcagctccgccccatacccgtcactacagcctcacctcccacccctgtcactacggcctcacctcccacccctgtcactacagcctcacctcctacagccttaagtcccaggcccatgtctgcctgtccaagggctcaagactttctaactgggatgtggtagagggactgaaggtacctttgggggcaacagcaccctagtttcattctcaactctagccctgcacactcacctgtggcacggaatgaaaacagagcttcccgtgcaaaaagggtcacgcctcccacccccgccccctccctgcacctcctgtcctctcccagttcattcctggaaccagccaggccaggcaaccagtggcccccaaaggcaggcaggatcctcaggccccagccgcgggaggctggaagggctggcagatcgcttccctcatccacctccaccggtccaggtctttgctgctgtccccagacctcctgtgacaccacgccagatcacagggcaccaggccagagatagtcttctttttgtcctttctggcctctggctagtcagtttttcatagccttacagtatctggctttgtactgagaaataaaacacattttcatatttggttattttcaatgtgacgatgaagccatctgtgttgcagtcagacccttctctgctggctggggaaggtggccgccccttcctcccagcagtctcctcacaattccaaggtggctcgtgacagacctatttgggggagtgccgtgtttgggcgtggcgtgggaggaagattgggtaagagaagagaggaagtcagtgctatctccccatctcctggggcagggcctggtaaatatgacctgctcacacccacccgctcagacaggtcgggcaagggaagaagtcgtcagcgggcagcaggcatgtggctccactgtgagagctggaaggggttactcatgaggaagtgcctacctggacaggaccaagcctgttccaaaagcgaagcctccttgggacactcggcgccaggttctctggcatgttttgggtcccaagaatcaccttcctcctgctacaaagcaaagggcctgactttccaagccaggctattgcggcctgggaagaaggacccttggtgacacttcccctcctgcccaggggttcctt

SEQ ID NO: 21457 - protein, 299 aa, Homo sapiens; identical to SEQ ID NO: 21455

SEQ ID NO: 21458 - DNA, 280 bp, Homo sapiens
gagctggagagcacctcagagaccagtgacatgccagaggtcttctcttcccacgagtcttcacatgaagaggctggcagatcgcttccctcatccacctccaccggtccaggtctttgctgctgtccccagacctcctgtgacaccacgccagatcacagggcaccaggccagagatagtcttctttttgtcctttctggcctctggctagtcagtttttcatagccttacagtatctggctttgtactgagaaataaaacacattttcatatttggtt

SEQ ID NO: 21459 - protein, 53 aa, Homo sapiens
MKRLADRFPHPPPPVQVFAAVPRPPVTPRQITGHQARDSLLFVLSGLWLVSFS

SEQ ID NO: 21460 - DNA, 1045 bp, Homo sapiens
agcacctcagagaccagtgacatgccagaggtcttctcttcccacgagtcttcacatgaagagcctctgcagcccttcccacagcttgcaaggaccaagggaggccagcaggtggacagggggcctcagcctgccctgaagtcccgccagtcagtggttaccctccagggcagtgccgtggtggccaaccggacccaggccttccaggagcaggagcaggggcaggggcaggggcagggagagccctgcatttcctctacgcccaggttccggaaggtggtgagacaggccagcgtgcatgacagtggagaggagggcgaggcctgagccctcacacatgcccacgctcccctgacactgaagaggatccacaactccttggagaaacaccctcacgtctgttgccgcacacattcctctcagctccgccccatacccgtcactacagcctcacctcccacccctgtcactacggcctcacctcccacccctgtcactacagcctcacctcctacagccttaagtcccaggcccatgtctgcctgtccaagggctcaagactttctaactgggatgtggtagagggactgaaggtacctttgggggcaacagcaccctagtttcattctcaactctagccctgcacactcacctgtggcacggaatgaaaacagagcttcccgtgcaaaaagggtcacgcctcccacccccgccccctccctgcacctcctgtcctctcccagttcattcctggaaccagccaggccaggcaaccagtggcccccaaaggcaggcaggatcctcaggccccagccgcgggaggctggaagggctggcagatcgcttccctcatccacctccaccggtccaggtctttgctgctgtccccagacctcctgtgacaccacgccagatcacagggcaccaggccagagatagtcttctttttgtcctttctggcctctggctagtcagtttttcatagccttacagtatctggctttgtactgagaaataaaacacattttcatatttggttattttc

SEQ ID NO: 21461 - protein, 101 aa, Homo sapiens
MPEVFSSHESSHEEPLQPFPQLARTKGGQQVDRGPQPALKSRQSVVTLQGSAVVANRTQAFQEQEQGQGQGQGEPCISSTPRFRKVVRQASVHDSGEEGEA

SEQ ID NO: 21462 - DNA, 1584 bp, Homo sapiens
agcacctcagagaccagtgacatgccagaggtcttctcttcccacgagtcttcacatgaagagcctctgcagcccttcccacagcttgcaaggaccaagggaggccagcaggtggacagggggcctcagcctgccctgaagtcccgccagtcagtggttaccctccagggcagtgccgtggtggccaaccggacccaggccttccaggagcaggagcaggggcaggggcaggggcagggagagccctgcatttcctctacgcccaggttccggaaggtggtgagacaggccagcgtgcatgacagtggagaggagggcgaggcctgagccctcacacatgcccacgctcccctgacactgaagaggatccacaactccttggagaaacaccctcacgtctgttgccgcacacattcctctcagctccgccccatacccgtcactacagcctcacctcccacccctgtcactacggcctcacctcccacccctgtcactacagcctcacctcctacagccttaagtcccaggcccatgtctgcctgtccaagggctcaagactttctaactgggatgtggtagagggactgaaggtacctttgggggcaacagcaccctagtttcattctcaactctagccctgcacactcacctgtggcacggaatgaaaacagagcttcccgtgcaaaaagggtcacgcctcccacccccgccccctccctgcacctcctgtcctctcccagttcattcctggaaccagccaggccaggcaaccagtggcccccaaaggcaggcaggatcctcaggccccagccgcgggaggctggaagggctggcagatcgcttccctcatccacctccaccggtccaggtctttgctgctgtccccagacctcctgtgacaccacgccagatcacagggcaccaggccagagatagtcttctttttgtcctttctggcctctggctagtcagtttttcatagccttacagtatctggctttgtactgagaaataaaacacattttcatatttggttattttcaatgtgacgatgaagccatctgtgttgcagtcagacccttctctgctggctggggaaggtggccgccccttcctcccagcagtctcctcacaattccaaggtggctcgtgacagacctatttgggggagtgccgtgtttgggcgtggcgtgggaggaagattgggtaagagaagagaggaagtcagtgctatctccccatctcctggggcagggcctggtaaatatgacctgctcacacccacccgctcagacaggtcgggcaagggaagaagtcgtcagcgggcagcaggcatgtggctccactgtgagagctggaaggggttactcatgaggaagtgcctacctggacaggaccaagcctgttccaaaagcgaagcctccttgggacactcggcgccaggttctctggcatgttttgggtcccaagaatcaccttcctcctgctacaaagcaaagggcctgactttccaagccaggctattgcggcctgggaagaaggacccttggtgacacttcccctcctgcccaggggttcctt

SEQ ID NO: 21463 - protein, 101 aa, Homo sapiens; identical to SEQ ID NO: 21461

SEQ ID NO: 21464 - DNA, 806 bp, Homo sapiens
agagcctctgcagcccttcccacagcttgcaaggaccaagggaggctggaagggctggcagatcgcttccctcatccacctccaccggtccaggtctttgctgctgtccccagacctcctgtgacaccacgccagatcacagggcaccaggccagagatagtcttctttttgtcctttctggcctctggctagtcagtttttcatagccttacagtatctggctttgtactgagaaataaaacacattttcatatttggttattttcaatgtgacgatgaagccatctgtgttgcagtcagacccttctctgctggctggggaaggtggccgccccttcctcccagcagtctcctcacaattccaaggtggctcgtgacagacctatttgggggagtgccgtgtttgggcgtggcgtgggaggaagattgggtaagagaagagaggaagtcagtgctatctccccatctcctggggcagggcctggtaaatatgacctgctcacacccacccgctcagacaggtcgggcaagggaagaagtcgtcagcgggcagcaggcatgtggctccactgtgagagctggaaggggttactcatgaggaagtgcctacctggacaggaccaagcctgttccaaaagcgaagcctccttgggacactcggcgccaggttctctggcatgttttgggtcccaagaatcaccttcctcctgctacaaagcaaagggcctgactttccaagccaggctattgcggcctgggaagaaggacccttggtgacacttcccctcctgcccaggggttcctt

SEQ ID NO: 21465 - protein, 72 aa, Homo sapiens; identical to SEQ ID NO: 21449

SEQ ID NO: 21466 - DNA, 2954 bp, Homo sapiens
gttgccatgggaacctcgccccttctagagtcctggccgcttgactcagctaagcgcgaaggtgttgtttcttcctgaggtgcgctggggctgggacccggtctgcagaaggtccaggggatggcgtcgggggattgaggagaggagaccaagccggccttgcctccgggaccagcgcttccaaattctctggggcgtcccggcgcgcacacgctcctgaggcctcggcgttctgaggaaaggggctggcgtggcgacccgggtcctcgaggccgagatctggctgtggcccgcgaagccccgcttgcccgcgccagcgtcttgtcaccccgagccgagggcctgcgcgcggccgacagatatgggatgctggaggacatctgggggccacaaatgctccttctcctggagacgcaactcaagggtcctcaaggtcatagaaccccataaccccattaggtgtcaggggcagaaacaggactgtgtgaagattcacagcctccacctcccttgccttcacggagcttcggcatctacccttattccaggcggctgctcaggggcaccgttctacccctttctgcctggagaaactgccgtttttccttaaaggatcctcgaagccggaaggagcagccacctcccactcccggctgctgcaagcaagctgctttgacttctttctagagttggggattgctgctggagtccgagtctcaggcccagagtgggtgcgatggtcttgcttgcaccctgtatcccccggcagacgcccgggaactctactaagtgggtgaccccagagagctcgcccccacactccgactccgagtccagcactcggtccactgcacagggacctcgcgccccacagctgcgtcctctctgaccttcgcaatccggtgcgcggcccgcggaacgccccgatctccaggggcacggaaggccgaggcgtgccgggggagccaggagcagctggctggcgggcgccgcgggcctccccggtcacgtgacaccccggacaacgtgcgccgtcacgtgacggcagagcctgtgagcgtttttctcacgtgacggaggcgcctgcacgtggaccaatggggaggcgggggcggggccggcaggggcggtgcgcgggaagggaccccggacccggaggtcgcggagagctgggcagtgttggccgctggcggagcgctggggcagcatgaagtgcctggtcacgggcggcaacgtgaagggtgagtgcaggtcggcctggcagcggcggtgcagcagccgcggagccgccagcctaacccccttccgctcttctccccgcagtgctcggcaaggccgtccactccctgtcccgcatcggggacgagctctacctggaacccttggaggacggggtgaggggctagggtgtggggggcgggtgggactccagccgggagcgggtaacccggactagagtctcgcccccactaggcgggatgaccgctggcagatttgtcggcaaagtttcagtttcttagtctggcggctgtcatcttcccaggccggtgtgtgaattgaggaaagctgtcctgcgagctcccagggggtgacgtgcacttagagaaactcggggaaggcctgggtgtgcgacccctcctctgcggcagcagcgccggggccgactctgaaggcttccatggggaaaggagggtttttcagcaggtggtggcggagcgggaggacgatagggcaagtgtgtgagcagaagcagccagagggctgggtctgtggctgccccctgaccacgtccctctccctgctcttcgtggcccagctctccctccggacggtgaactcctcccgctctgcctatgcctgctttctctttgccccgctcttcttccagcaataccaggcagccacccctggtcaggacctgctgcgctgtaagatcctgatgaaggtgaggcccttccctcagcagtggcactactccaccccaggaatctccaccagctgtgcctctgccctggggtactcagtagatgctaagtggggagagagacacgtgcaagcccaatccatgcaaaacacagggagggccatggtaaaagcatcacagcggggacctgagagggtggtgacgctcaagttcgtcaagaaaggtaagcacgtcttttggccgggcgcggtggctcacgcctgtaatcccagcactttgggaggccgaggcaggcggatcacgaggtcaggagttcgagaccagcctggccaacatggcgaaaccccgtctctactaaaaatacaaaaattagctgggcgtggtggcacgcgcctgtaatcccagctactcgggaggctgaggcaggagaattgcttgaatccgggaggtggaggttgcagtgagctgagatcgcaccactgcactccagcctgggtgacagagcgagactccatctcaaaaaaaaaaaaaaaaaaggtaagcaggtctttcaaggcattccaagcataaggaagagcatgaatgaggcctagaaggatgccagtgcccgaggtgacgtgggagcccttttcccagagttacatgctgggcccatgatgggtgtgggcctgcatgggacaggagagcttgttgcagagatgtgatgctaggctgaggtgtcttatcccatgcagtctttcctgtctgtcttccgctcactggcgatgctggagaagacggtggaaaaatgctgcatctccctgaatggccggagcagccgcctggtggtccagctgcattgcaagttcggtgagtgggcagccggccagccaaggggtgcctcagcagggaggtcggcgaggcccactgagaccctatcgcccatccaggggtgcggaagactcacaacctgtccttccaggactgtgagtccctgcaggccgtcttcgacccagcctcgtgcccccacatgctccgcgccccagcacgg

SEQ ID NO: 21467 - protein, 82 aa, Homo sapiens
MGCWRTSGGHKCSFSWRRNSRVLKVIEPHNPIRCQGQKQDCVKIHSLHLPCLHGASASTLIPGGCSGAPFYPFLPGETAVFP

SEQ ID NO: 21468 - DNA, 647 bp, Homo sapiens
ccgcttgactcagctaagcgcgaaggtgttgtttcttcctgaggtgcgctggggctgggacccggtctgcagaaggtccaggggatggcgtcgggggattgaggagaggagaccaagccggccttgcctccgggaccagcgcttccaaattctctggggcgtcccggcgcgcacacgctcctgaggcctcggcgttctgaggaaaggggctggcgtggcgacccgggtcctcgaggccgagatctggctgtggcccgcgaagccccgcttgcccgcgccagcgtcttgtcaccccgagccgagggcctgcgcgcggccgacagatatgggatgctggaggacatctgggggccacaaatgctccttctcctggagacgcaactcaagttctcatggagttttcattgtctcgtgcaatgccatcgaccttgaatttcagcataggacccatatgaagtgccactgttaatgctgggagcactccaggaagcagagaaaagttatgacatttcaagaaaaatctgaattgcttgatatgttccacagattgaggtctgtacctatggttgcccactatttcaatagtcagtgtaaggactattgtaaaaaaaaaaaaaaaaaaaaataaaggaaattggtgaagctat

SEQ ID NO: 21469 - protein, 47 aa, Homo sapiens
MGCWRTSGGHKCSFSWRRNSSSHGVFIVSCNAIDLEFQHRTHMKCHC

SEQ ID NO: 21470 - DNA, 1515 bp, Homo sapiens
cgtgcttttgggggtgggggaggcgtccctccctggaccccggcgacttcctctctcggggaggagccccagccccgcgacgaggaggaagcggagctggagctgctgaggcagtttgacctggcctggcagtacgggccctgcaccgggatcacacggctgcagcgctggtgtcgggccaagcagatgggcttggagcctcccccagaggtgtggcaggtgctgaagacccaccccggagacccccgcttccagtgcagtctctggcatctctatcccctatgaggcaccacgtaagacctcctgcccttagctctcttgctcaccacccaagaacctcaggacagaagcgagagcccattgctcctgctcagctcagcccggctgcggaggaacccttggcaggcagaacctggaggtgtcagaggctcaactcctccatctaaccagcaggctcccagagtccccggaagagcctgcgcagctgaagcagagtgcttctagatggagagtggtcactggggaaaaggacctggccatcaccttccaatacctgctgcctgtctccctgacccatgatctggcaagttaggcacagtcagacatggacagttgatccatgaggaaaagatgctctcccacctaaggccaggaatctgagagcaggactggctgagctcccagggcaaggggttcactaatgcttatcaataaagaatattgagcctggaatcctgaccttcagtcctttactgtggccctgctttgactggcagtccctagcaagttaggagatgagagaggcaccactacagctcttttccttcaagaaagtcctaggccgaagagggaggagacagtcatcttgagacggatcaagtcctcggaagagctgagcgacctctggtgccccctggtggcccacagggaaactactcatgactcaccttctggagcagccagggaaaacctacctgactagccagccacctgccttgctaagcggtgcccacctcacaaacatgggtgctttgccagagaaggacccctggggtccatagctcatgaagtccaaacatatctatacattcccagcaagcacctctggcttcccacatcgggggccaccttgatccaaagcagggctggcgagggtctcaacttgcaggacctgctcagacatgaccatcatctgaggggctttggtaagaaactgatggctgggcgcggtggctcacacctgtaatcccagcactttgggaggccaaggagggcggatcacgaggtcaagagatcgagaccatcctggctaacatggtgaaaccccatctctactaaaaatacaaaaaattagccaggtgtagtcccagctactcaggaggctgaggcaggagaatggcgtgaacccgggaggcagagctggcagtgagctgagaccgcatcactgcactccagcctgggtgacagagagagaccccgtctcaaaaaataaaaaaatacaaaataaaggctggg

SEQ ID NO: 21471 - protein, 32 aa, Homo sapiens
MGLEPPPEVWQVLKTHPGDPRFQCSLWHLYPL

SEQ ID NO: 21472 - DNA, 362 bp, Homo sapiens
cttccacagtctctggcatctctatcccctatgaggcagaacctggaggtgtcagaggctcaactcctccatctaaccagcaggctcccagagtccccggaagagcctgcgcagctgaagcagagtgcttctagatggagagtggtcactggggaaaaggacctggccatcaccttccaatacctgctgcctgtctccctgacccatgatctggcaagttaggcacagtcagacatggacagttgatccatgaggaaaagatgctctcccacctaaggccaggaatctgagagcaggactggctgagctcccagggcaaggggttcactaatgcttatcaataaagaatattgagcctggaa

SEQ ID NO: 21473 - protein, 63 aa, Homo sapiens [sequence omitted]

SEQ ID NO: 21474 - DNA, 670 bp, Homo sapiens
gagaaatggatggagggttggaaggccttgctgaacaggcaagaagattctatgaggtgcctggctcaggaggacacgccactataataatttcttacctctacaagctagtggggggcaaaggtacacccaggacccaaggaactatctatttagaactgaggggtttcccaaggactatgggcatggccaagaataagtctggcatctctatcccctatgaggcaccacgtaagacctcctgcccttagctctcttgctcaccacccaagaacctcaggacagaagcgagagcccattgctcctgctcagctcagcccggctgcggaggaacccttggcaggcagaacctggaggtgtcagaggctcaactcctccatctaaccagcaggctcccagagtccccggaagagcctgcgcagctgaagcagagtgcttctagatggagagtggtcactggggaaaaggacctggccatcaccttccaatacctgctgcctgtctccctgacccatgatctggcaagttaggcacagtcagacatggacagttgatccatgaggaaaagatgctctcccacctaaggccaggaatctgagagcaggactggctgagctcccagggcaaggggttcactaatgcttatcaataaagaatattgagcctggaa

SEQ ID NO: 21475 - protein, 81 aa, Homo sapiens
MDGGLEGLAEQARRFYEVPGSGGHATIIISYLYKLVGGKGTPRTQGTIYLELRGFPRTMGMAKNKSGISIPYEAPRKTSCP

SEQ ID NO: 21476 - DNA, 721 bp, Homo sapiens
ccgccgctggcctggccccgtctgtctctctcagcagctgtctttctcgcgcccactggccggtctctcctcttccccgcagttgcctccttctctgcctgcctgggtggccgccatgggccggaagcggctcatcactgattcacggctgcagcgctggtgtcgggccaagcagatgggcttggagcctcccccagaggtgtggcaggtgctgaagacccaccccggagacccccgcttccagtgcagtctctggcatctctatcccctatgaggcaccacgtaagacctcctgcccttagctctcttgctcaccacccaagaacctcaggacagaagcgagagcccattgctcctgctcagctcagcccggctgcggaggaacccttggcaggcagaacctggaggtgtcagaggctcaactcctccatctaaccagcaggctcccagagtccccggaagagcctgcgcagctgaagcagagtgcttctagatggagagtggtcactggggaaaaggacctggccatcaccttccaatacctgctgcctgtctccctgacccatgatctggcaagttaggcacagtcagacatggacagttgatccatgaggaaaagatgctctcccacctaaggccaggaatctgagagcaggactggctgagctcccagggcaaggggttcactaatgcttatcaataaagaatattgagcctggaa

SEQ ID NO: 21477 - protein, 52 aa, Homo sapiens
MGRKRLITDSRLQRWCRAKQMGLEPPPEVWQVLKTHPGDPRFQCSLWHLYPL

SEQ ID NO: 21478 - DNA, 1573 bp, Homo sapiens
gggtcatcttgtctgcccgccgctggcctggccccgtctgtctctctcagcagctgtctttctcgcgcccactggccggtctctcctcttccccgcagttgcctccttctctgcctgcctgggtggccgccatgggccggaagcggctcatcactgattcctacccggttgtgaagaggagggaggggcccgctgggcacagcaagggggagctggcacccgagctaggggaggagccccagccccgcgacgaggaggaagcggagctggagctgctgaggcagtttgacctggcctggcagtacgggccctgcaccgggatcacacggctgcagcgctggtgtcgggccaagcagatgggcttggagcctcccccagaggtgtggcaggtgctgaagacccaccccggagacccccgcttccagtgcaggtcagagacaggccgggagggctttcaggggagccagggccttctccaggcactgtcaccctgctgtcctgacctgagggagaaatggatggagggttggaaggccttgctgaacaggcaagaagattctatgaggtgcctggctcaggaggacacgccactataataattctttttttttgagacagagtcttgctctgttgcccaggctggagtgcagtggcgcgatctcggctcactgcaaactccgcctctcgggttcacgccattctcctgtctcagcctcccaagtagctgggactacaggcgcccgccaacacgcccggctaattttttctatttttagtagagacagggtttcaccgtgttagccaggatggtcttgatctcctgacctcgtgatcccacccacctcagcctcccaaagtgctgggattacaggcgtgagccaccacacccggccaataattcttacctctacaagctagtggggggcaaaggtacacccaggacccaaggaactatctatttagaactgaggggtttcccaaggactatgggcatggccaagaataagctggtgaaatcagatccagggactcaacaactgattctctgtttctctctctctctctctggggtatccctccctcccaccccatcttccacagtctctggcatctctatcccctatgaggcaccacgtaagacctcctgcccttagctctcttgctcaccacccaagaacctcaggacagaagcgagagcccattgctcctgctcagctcagcccggctgcggaggaacccttggcaggcagaacctggaggtgtcagaggctcaactcctccatctaaccagcaggctcccagagtccccggaagagcctgcgcagctgaagcagagtgcttctagatggagagtggtcactggggaaaaggacctggccatcaccttccaatacctgctgcctgtctccctgacccatgatctggcaagttaggcacagtcagacatggacagttgatccatgaggaaaagatgctctcccacctaaggccaggaatctgagagcaggactggctgagctcccagggcaaggggttcactaatgcttatcaataaagaatattgagcctggaa

SEQ ID NO: 21479 - protein, 154 aa, Homo sapiens
MGRKRLITDSYPVVKRREGPAGHSKGELAPELGEEPQPRDEEEAELELLRQFDLAWQYGPCTGITRLQRWCRAKQMGLEPPPEVWQVLKTHPGDPRFQCRSETGREGFQGSQGLLQALSPCCPDLREKWMEGWKALLNRQEDSMRCLAQEDTPL

SEQ ID NO: 21480 - DNA, 790 bp, Homo sapiens
gggtcatcttgtctgcccgccgctggcctggccccgtctgtctctctcagcagctgtctttctcgcgcccactggccggtctctcctcttccccgcagttgcctccttctctgcctgcctgggtggccgccatgggccggaagcggctcatcactgattcctacccggttgtgaagaggagggaggggcccgctgggcacagcaagggggagctggcacccgagctaggggaggagccccagccccgcgacgaggaggaagcggagctggagctgctgaggcagtttgacctggcctggcagtacgggccctgcaccgtctctggcatctctatcccctatgaggcaccacgtaagacctcctgcccttagctctcttgctcaccacccaagaacctcaggacagaagcgagagcccattgctcctgctcagctcagcccggctgcggaggaacccttggcaggcagaacctggaggtgtcagaggctcaactcctccatctaaccagcaggctcccagagtccccggaagagcctgcgcagctgaagcagagtgcttctagatggagagtggtcactggggaaaaggacctggccatcaccttccaatacctgctgcctgtctccctgacccatgatctggcaagttaggcacagtcagacatggacagttgatccatgaggaaaagatgctctcccacctaaggccaggaatctgagagcaggactggctgagctcccagggcaaggggttcactaatgcttatcaataaagaatattgagcctggaa

SEQ ID NO: 21481 - protein, 79 aa, Homo sapiens
MGRKRLITDSYPVVKRREGPAGHSKGELAPELGEEPQPRDEEEAELELLRQFDLAWQYGPCTVSGISIPYEAPRKTSCP

SEQ ID NO: 21482 - DNA, 843 bp, Homo sapiens
ctgggtcatcttgtctgcccgccgctggcctggccccgtctgtctctctcagcagctgtctttctcgcgcccactggccggtctctcctcttccccgcagttgcctccttctctgcctgcctgggtggccgccatgggccggaagcggctcatcactgattcctacccggggaggagccccagccccgcgacgaggaggaagcggagctggagctgctgaggcagtttgacctggcctggcagtacgggccctgcaccgggatcacacggctgcagcgctggtgtcgggccaagcagatgggcttggagcctcccccagaggtgtggcaggtgctgaagacccaccccggagacccccgcttccagtgcagtctctggcatctctatcccctatgaggcaccacgtaagacctcctgcccttagctctcttgctcaccacccaagaacctcaggacagaagcgagagcccattgctcctgctcagctcagcccggctgcggaggaacccttggcaggcagaacctggaggtgtcagaggctcaactcctccatctaaccagcaggctcccagagtccccggaagagcctgcgcagctgaagcagagtgcttctagatggagagtggtcactggggaaaaggacctggccatcaccttccaatacctgctgcctgtctccctgacccatgatctggcaagttaggcacagtcagacatggacagttgatccatgaggaaaagatgctctcccacctaaggccaggaatctgagagcaggactggctgagctcccagggcaaggggttcactaatgcttatcaataaagaatattgagcctggaa

SEQ ID NO: 21483 - protein, 32 aa, Homo sapiens; identical to SEQ ID NO: 21471

SEQ ID NO: 21484 - DNA, 1091 bp, Homo sapiens
gtctgggtcatcttgtctgcccgccgctggcctggccccgtctgtctctctcagcagctgtctttctcgcgcccactggccggtctctcctcttccccgcagttgcctccttctctgcctgcctgggtggccgccatgggccggaagcggctcatcactgattcctacccggttgtgaagaggagggaggggcccgctgggcacagcaagggggagctggcacccgagctaggggaggagccccagccccgcgacgaggaggaagcggagctggagctgctgaggcagtttgacctggcctggcagtacgggccctgcaccggtgagaacccacccagccccacggaggcgcctctcccagccagtcacccacacgtctctgaagtcacccaagcgcttgcgtgactctgaccctcaggaactgtctccccccaacacacacattctccagctcagactctaccccaccccccacaagtctccagagtcttcttcccaccctggcagggatcacacggctgcagcgctggtgtcgggccaagcagatgggcttggagcctcccccagaggtgtggcaggtgctgaagacccaccccggagacccccgcttccagtgcagtctctggcatctctatcccctatgaggcaccacgtaagacctcctgcccttagctctcttgctcaccacccaagaacctcaggacagaagcgagagcccattgctcctgctcagctcagcccggctgcggaggaacccttggcaggcagaacctggaggtgtcagaggctcaactcctccatctaaccagcaggctcccagagtccccggaagagcctgcgcagctgaagcagagtgcttctagatggagagtggtcactggggaaaaggacctggccatcaccttccaatacctgctgcctgtctccctgacccatgatctggcaagttaggcacagtcagacatggacagttgatccatgaggaaaagatgctctcccacctaaggccaggaatctgagagcaggactggctgagctcccagggcaaggggttcactaatgcttatcaataaagaatattgagcctggaa

SEQ ID NO: 21485 - protein, 89 aa, Homo sapiens
MGRKRLITDSYPVVKRREGPAGHSKGELAPELGEEPQPRDEEEAELELLRQFDLAWQYGPCTGENPPSPTEAPLPASHPHVSEVTQALA

SEQ ID NO: 21486 - DNA, 1133 bp, Homo sapiens
ttgtctgggtcatcttgtctgcccgccgctggcctggccccgtctgtctctctcagcagctgtctttctcgcgcccactggccggtctctcctcttccccgcagttgcctccttctctgcctgcctgggtggccgccatgggccggaagcggctcatcactgattcctacccggttgtgaagaggagggaggggcccgctgggcacagcaagggggagctggcacccgagctaggtctctgaggtgtgagggaggcaggaggagtggacacggaggggcctagaggaggcccctagaggggcggaggggccgatggaaagggaaaggtggcctgtcctcccctcccgacaccaggtctagctgcggggtggcagaggcaaagcggtggtgaggaaggctgggaggtgaggggcaggagactgaagccaacctcgtactgaagagcagctgtcattgcaggggaggagccccagccccgcgacgaggaggaagcggagctggagctgctgaggcagtttgacctggcctggcagtacgggccctgcaccgggatcacacggctgcagcgctggtgtcgggccaagcagatgggcttggagcctcccccagaggtgtggcaggtgctgaagacccaccccggagacccccgcttccagtgcagtctctggcatctctatcccctatgaggcaccacgtaagacctcctgcccttagctctcttgctcaccacccaagaacctcaggacagaagcgagagcccattgctcctgctcagctcagcccggctgcggaggaacccttggcaggcagaacctggaggtgtcagaggctcaactcctccatctaaccagcaggctcccagagtccccggaagagcctgcgcagctgaagcagagtgcttctagatggagagtggtcactggggaaaaggacctggccatcaccttccaatacctgctgcctgtctccctgacccatgatctggcaagttaggcacagtcagacatggacagttgatccatgaggaaaagatgctctcccacctaaggccaggaatctgagagcaggactggctgagctcccagggcaaggggttcactaatgcttatcaataaagaatattgagcctggaa

SEQ ID NO: 21487 - protein, 32 aa, Homo sapiens; identical to SEQ ID NO: 21471

SEQ ID NO: 21488 - DNA, 1028 bp, Homo sapiens
ttgtctgggtcatcttgtctgcccgccgctggcctggccccgtctgtctctctcagcagctgtctttctcgcgcccactggccggtctctcctcttccccgcagttgcctccttctctgcctgcctgggtggccgccatgggccggaagcggctcatcactgattcctacccggttgtgaagaggagggaggggcccgctgggcacagcaagggggagctggcacccgagctaggtctctgaggtgtgagggaggcaggaggagtggacacggaggggcctagaggaggcccctagaggggcggaggggccgatggaaagggaaaggtggcctgtcctcccctcccgacaccaggggaggagccccagccccgcgacgaggaggaagcggagctggagctgctgaggcagtttgacctggcctggcagtacgggccctgcaccgggatcacacggctgcagcgctggtgtcgggccaagcagatgggcttggagcctcccccagaggtgtggcaggtgctgaagacccaccccggagacccccgcttccagtgcagtctctggcatctctatcccctatgaggcaccacgtaagacctcctgcccttagctctcttgctcaccacccaagaacctcaggacagaagcgagagcccattgctcctgctcagctcagcccggctgcggaggaacccttggcaggcagaacctggaggtgtcagaggctcaactcctccatctaaccagcaggctcccagagtccccggaagagcctgcgcagctgaagcagagtgcttctagatggagagtggtcactggggaaaaggacctggccatcaccttccaatacctgctgcctgtctccctgacccatgatctggcaagttaggcacagtcagacatggacagttgatccatgaggaaaagatgctctcccacctaaggccaggaatctgagagcaggactggctgagctcccagggcaaggggttcactaatgcttatcaataaagaatattgagcctggaa

SEQ ID NO: 21489 - protein, 32 aa, Homo sapiens; identical to SEQ ID NO: 21471

SEQ ID NO: 21490 - DNA, 1804 bp, Homo sapiens
ttgtctgggtcatcttgtctgcccgccgctggcctggccccgtctgtctctctcagcagctgtctttctcgcgcccactggccggtctctcctcttccccgcagttgcctccttctctgcctgcctgggtggccgccatgggccggaagcggctcatcactgattcctacccggttgtgaagaggagggaggggcccgctgggcacagcaagggggagctggcacccgagctaggtctctgaggtgtgagggaggcaggaggagtggacacggaggggcctagaggaggcccctagaggggcggaggggccgatggaaagggaaaggtggcctgtcctcccctcccgacaccaggtctagctgcggggtggcagaggcaaagcggtggtgaggaaggctgggaggtgaggggcaggagactgaagccaacctcgtactgaagagcagctgtcattgcaggggaggagccccagccccgcgacgaggaggaagcggagctggagctgctgaggcagtttgacctggcctggcagtacgggccctgcaccgggatcacacggctgcagcgctggtgtcgggccaagcagatgggcttggagcctcccccagaggtgtggcaggtgctgaagacccaccccggagacccccgcttccagtgcaggtcagagacaggccgggagggctttcaggggagccagggccttctccaggcactgtcaccctgctgtcctgacctgagggagaaatggatggagggttggaaggccttgctgaacaggcaagaagattctatgaggtgcctggctcaggaggacacgccactataataattctttttttttgagacagagtcttgctctgttgcccaggctggagtgcagtggcgcgatctcggctcactgcaaactccgcctctcgggttcacgccattctcctgtctcagcctcccaagtagctgggactacaggcgcccgccaacacgcccggctaattttttctatttttagtagagacagggtttcaccgtgttagccaggatggtcttgatctcctgacctcgtgatcccacccacctcagcctcccaaagtgctgggattacaggcgtgagccaccacacccggccaataattcttacctctacaagctagtggggggcaaaggtacacccaggacccaaggaactatctatttagaactgaggggtttcccaaggactatgggcatggccaagaataagctggtgaaatcagatccagggactcaacaactgattctctgtttctctctctctctctctggggtatccctccctcccaccccatcttccacagtctctggcatctctatcccctatgaggcaccacgtaagacctcctgcccttagctctcttgctcaccacccaagaacctcaggacagaagcgagagcccattgctcctgctcagctcagcccggctgcggaggaacccttggcaggcagaacctggaggtgtcagaggctcaactcctccatctaaccagcaggctcccagagtccccggaagagcctgcgcagctgaagcagagtgcttctagatggagagtggtcactggggaaaaggacctggccatcaccttccaatacctgctgcctgtctccctgacccatgatctggcaagttaggcacagtcagacatggacagttgatccatgaggaaaagatgctctcccacctaaggccaggaatctgagagcaggactggctgagctcccagggcaaggggttcactaatgcttatcaataaagaatattgagcctggaa

SEQ ID NO: 21491 - protein, 79 aa, Homo sapiens [sequence omitted]

SEQ ID NO: 21492 - DNA, 1322 bp, Homo sapiens
cggtttgtctgggtcatcttgtctgcccgccgctggcctggccccgtctgtctctctcagcagctgtctttctcgcgcccactggccggtctctcctcttccccgcagttgcctccttctctgcctgcctgggtggccgccatgggccggaagcggctcatcactgattcctacccggttgtgaagaggagggaggggcccgctgggcacagcaagggggagctggcacccgagctaggtctctgaggtgtgagggaggcaggaggagtggacacggaggggcctagaggaggcccctagaggggcggaggggccgatggaaagggaaaggtggcctgtcctcccctcccgacaccaggtctagctgcggggtggcagaggcaaagcggtggtgaggaaggctgggaggtgaggggcaggagactgaagccaacctcgtactgaagagcagctgtcattgcaggggaggagccccagccccgcgacgaggaggaagcggagctggagctgctgaggcagtttgacctggcctggcagtacgggccctgcaccggtgagaacccacccagccccacggaggcgcctctcccagccagtcacccacacgtctctgaagtcacccaagcgcttgcgtgactctgaccctcaggaactgtctccccccaacacacacattctccagctcagactctaccccaccccccacaagtctccagagtcttcttcccaccctggcagggatcacacggctgcagcgctggtgtcgggccaagcagatgggcttggagcctcccccagaggtgtggcaggtgctgaagacccaccccggagacccccgcttccagtgcagtctctggcatctctatcccctatgaggcaccacgtaagacctcctgcccttagctctcttgctcaccacccaagaacctcaggacagaagcgagagcccattgctcctgctcagctcagcccggctgcggaggaacccttggcaggcagaacctggaggtgtcagaggctcaactcctccatctaaccagcaggctcccagagtccccggaagagcctgcgcagctgaagcagagtgcttctagatggagagtggtcactggggaaaaggacctggccatcaccttccaatacctgctgcctgtctccctgacccatgatctggcaagttaggcacagtcagacatggacagttgatccatgaggaaaagatgctctcccacctaaggccaggaatctgagagcaggactggctgagctcccagggcaaggggttcactaatgcttatcaataaagaatattgagcctggaa

SEQ ID NO: 21493 - protein, 32 aa, Homo sapiens; identical to SEQ ID NO: 21471

SEQ ID NO: 21494 - DNA, 1155 bp, Homo sapiens
cggtttgtctgggtcatcttgtctgcccgccgctggcctggccccgtctgtctctctcagcagctgtctttctcgcgcccactggccggtctctcctcttccccgcagttgcctccttctctgcctgcctgggtggccgccatgggccggaagcggctcatcactgattcctacccggttgtgaagaggagggaggggcccgctgggcacagcaagggggagctggcacccgagctaggtctctgaggtgtgagggaggcaggaggagtggacacggaggggcctagaggaggcccctagaggggcggaggggccgatggaaagggaaaggtggcctgtcctcccctcccgacaccaggtctagctgcggggtggcagaggcaaagcggtggtgaggaaggctgggaggtgaggggcaggagactgaagccaacctcgtactgaagagcagctgtcattgcaggggaggagccccagccccgcgacgaggaggaagcggagctggagctgctgaggcagtttgacctggcctggcagtacgggccctgcaccggtgagaacccacccagccccacggaggcgcctctcccagccagtcacccacacgtctctgaagtcacccaagcgcttgcgtgactctgaccctcaggaactgtctccccccaacacacacattctccagctcagactctaccccaccccccacaagtctccagagtcttcttcccaccctggcagggatcacacggctgcagcgctggtgtcgggccaagcagatgggcttggagcctcccccagaggtgtggcaggtgctgaagacccaccccggagacccccgcttccagtgcaggctcaactcctccatctaaccagcaggctcccagagtccccggaagagcctgcgcagctgaagcagagtgcttctagatggagagtggtcactggggaaaaggacctggccatcaccttccaatacctgctgcctgtctccctgacccatgatctggcaagttaggcacagtcagacatggacagttgatccatgaggaaaagatgctctcccacctaaggccaggaatctgagagcaggactggctgagctcccagggcaaggggttcactaatgcttatcaataaagaatattgagcctggaa

SEQ ID NO: 21495 - protein, 30 aa, Homo sapiens
MGLEPPPEVWQVLKTHPGDPRFQCRLNSSI

SEQ ID NO: 21496 - DNA, 509 bp, Homo sapiens
ctctctcggtttgtctgggtcatcttgtctgcccgccgctggcctggccccgtctgtctctctcagcagctgtctttctcctgcccttagctctcttgctcaccacccaagaacctcaggacagaagcgagagcccattgctcctgctcagctcagcccggctgcggaggaacccttggcaggcagaacctggaggtgtcagaggctcaactcctccatctaaccagcaggctcccagagtccccggaagagcctgcgcagctgaagcagagtgcttctagatggagagtggtcactggggaaaaggacctggccatcaccttccaatacctgctgcctgtctccctgacccatgatctggcaagttaggcacagtcagacatggacagttgatccatgaggaaaagatgctctcccacctaaggccaggaatctgagagcaggactggctgagctcccagggcaaggggttcactaatgcttatcaataaagaatattgagcctggaa

SEQ ID NO: 21497 - protein, 92 aa, Homo sapiens
LSVCLGHLVCPPLAWPRLSLSAAVFLLPLALLLTTQEPQDRSESPLLLLSSARLRRNPWQAEPGGVRGSTPPSNQQAPRVPGRACAAEAECF

SEQ ID NO: 21498 - DNA, 852 bp, Homo sapiens
gacttcctctctcggtttgtctgggtcatcttgtctgcccgccgctggcctggccccgtctgtctctctcagcagctgtctttctcgcgcccactggccggtctctcctcttccccgcagttgcctccttctctgcctgcctgggtggccgccatgggccggaagcggctcatcactgattcctacccggttgtgaagaggagggaggggcccgctgggcacagcaagggggagctggcacccgagctaggggaggagccccagccccgcgacgaggaggaagcggagctggagctgctgaggcagtttgacctggcctggcagtacgggccctgcaccgggatcacacggctgcagcgctggtgtcgggccaagcagatgggcttggagcctcccccagaggtgtggcaggtgctgaagacccaccccggagacccccgcttccagtgcagtctctggcatctctatcccctatgaggcaccacgtaagacctcctgcccttagctctcttgctcaccacccaagaacctcaggacagaagcgagagcccattgctcctgctcagctcacaggctcccagagtccccggaagagcctgcgcagctgaagcagagtgcttctagatggagagtggtcactggggaaaaggacctggccatcaccttccaatacctgctgcctgtctccctgacccatgatctggcaagttaggcacagtcagacatggacagttgatccatgaggaaaagatgctctcccacctaaggccaggaatctgagagcaggactggctgagctcccagggcaaggggttcactaatgcttatcaataaagaatattgagcctggaa

SEQ ID NO: 21499 - protein, 107 aa, Homo sapiens
MGRKRLITDSYPVVKRREGPAGHSKGELAPELGEEPQPRDEEEAELELLRQFDLAWQYGPCTGITRLQRWCRAKQMGLEPPPEVWQVLKTHPGDPRFQCSLWHLYPL

SEQ ID NO: 21500 - DNA, 1789 bp, Homo sapiens
gaccccggcgacttcctctctcggtttgtctgggtcatcttgtctgcccgccgctggcctggccccgtctgtctctctcagcagctgtctttctcgcgcccactggccggtctctcctcttccccgcagttgcctccttctctgcctgcctgggtggccgccatgggccggaagcggctcatcactgattcctacccggttgtgaagaggagggaggggcccgctgggcacagcaagggggagctggcacccgagctaggggaggagccccagccccgcgacgaggaggaagcggagctggagctgctgaggcagtttgacctggcctggcagtacgggccctgcaccggtgagaacccacccagccccacggaggcgcctctcccagccagtcacccacacgtctctgaagtcacccaagcgcttgcgtgactctgaccctcaggaactgtctccccccaacacacacattctccagctcagactctaccccaccccccacaagtctccagagtcttcttcccaccctggcagggatcacacggctgcagcgctggtgtcgggccaagcagatgggcttggagcctcccccagaggtgtggcaggtgctgaagacccaccccggagacccccgcttccagtgcaggtcagagacaggccgggagggctttcaggggagccagggccttctccaggcactgtcaccctgctgtcctgacctgagggagaaatggatggagggttggaaggccttgctgaacaggcaagaagattctatgaggtgcctggctcaggaggacacgccactataataattctttttttttgagacagagtcttgctctgttgcccaggctggagtgcagtggcgcgatctcggctcactgcaaactccgcctctcgggttcacgccattctcctgtctcagcctcccaagtagctgggactacaggcgcccgccaacacgcccggctaattttttctatttttagtagagacagggtttcaccgtgttagccaggatggtcttgatctcctgacctcgtgatcccacccacctcagcctcccaaagtgctgggattacaggcgtgagccaccacacccggccaataattcttacctctacaagctagtggggggcaaaggtacacccaggacccaaggaactatctatttagaactgaggggtttcccaaggactatgggcatggccaagaataagctggtgaaatcagatccagggactcaacaactgattctctgtttctctctctctctctctggggtatccctccctcccaccccatcttccacagtctctggcatctctatcccctatgaggcaccacgtaagacctcctgcccttagctctcttgctcaccacccaagaacctcaggacagaagcgagagcccattgctcctgctcagctcagcccggctgcggaggaacccttggcaggcagaacctggaggtgtcagaggctcaactcctccatctaaccagcaggctcccagagtccccggaagagcctgcgcagctgaagcagagtgcttctagatggagagtggtcactggggaaaaggacctggccatcaccttccaatacctgctgcctgtctccctgacccatgatctggcaagttaggcacagtcagacatggacagttgatccatgaggaaaagatgctctcccacctaaggccaggaatctgagagcaggactggctgagctcccagggcaaggggttcactaatgcttatcaataaagaatattgagcctggaa

SEQ ID NO: 21501 - protein, 89 aa, Homo sapiens; identical to SEQ ID NO: 21485

SEQ ID NO: 21502 - DNA, 951 bp, Homo sapiens
gggaggcgtccctccctggaccccggcgacttcctctctcggtttgtctgggtcatcttgtctgcccgccgctggcctggccccgtctgtctctctcagcagctgtctttctcgcgcccactggccggtctctcctcttccccgcagttgcctccttctctgcctgcctgggtggccgccatgggccggaagcggctcatcactgattcctacccggttgtgaagaggagggaggggcccgctgggcacagcaagggggagctggcacccgagctaggggaggagccccagccccgcgacgaggaggaagcggagctggagctgctgaggcagtttgacctggcctggcagtacgggccctgcaccgggatcacacggctgcagcgctggtgtcgggccaagcagatgggcttggagcctcccccagaggtgtggcaggtgctgaagacccaccccggagacccccgcttccagtgcagtctctggcatctctatcccctatgaggcaccacgtaagacctcctgcccttagctctcttgctcaccacccaagaacctcaggacagaagcgagagcccattgctcctgctcagctcagcccggctgcggaggaacccttggcaggcagaacctggaggtgtcagaggctcaactcctccatctaaccagcaggctcccagagtccccggaagagcctgcgcagctgaagcagagtgcttctagatggagagtggtcactggggaaaaggacctggccatcaccttccaatacctgctgcctgtctccctgacccatgatctggcaagttaggcacagtcagacatggacagttgatccatgaggaaaagatgctctcccacctaaggccaggaatctgagagcaggactggctgagctcccagggcaaggggttcactaatgcttatcaataaagaatattgagcctggaa

SEQ ID NO: 21503 - protein, 107 aa, Homo sapiens; identical to SEQ ID NO: 21499

SEQ ID NO: 21504 - DNA, 889 bp, Homo sapiens
tgaaagaggaggtgactagagaagaaggtgtggagggtggtaggagcaggacagaagatgcagtggtagaaaaacccagagaccccatcctttccactcaagctgctgcgatggaagcacattaggccagagaacctggaccaggggaagagggagtgtctgggaaggcagtgagggactaggaaggactgcctgaaagaattctggcccacagggggaggagccccagccccgcgacgaggaggaagcggagctggagctgctgaggcagtttgacctggcctggcagtacgggccctgcaccgggatcacacggctgcagcgctggtgtcgggccaagcagatgggcttggagcctcccccagaggtgtggcaggtgctgaagacccaccccggagacccccgcttccagtgcagtctctggcatctctatcccctatgaggcaccacgtaagacctcctgcccttagctctcttgctcaccacccaagaacctcaggacagaagcgagagcccattgctcctgctcagctcagcccggctgcggaggaacccttggcaggcagaacctggaggtgtcagaggctcaactcctccatctaaccagcaggctcccagagtccccggaagagcctgcgcagctgaagcagagtgcttctagatggagagtggtcactggggaaaaggacctggccatcaccttccaatacctgctgcctgtctccctgacccatgatctggcaagttaggcacagtcagacatggacagttgatccatgaggaaaagatgctctcccacctaaggccaggaatctgagagcaggactggctgagctcccagggcaaggggttcactaatgcttatcaataaagaatattgagcctggaa

SEQ ID NO: 21505 - protein, 32 aa, Homo sapiens; identical to SEQ ID NO: 21471

SEQ ID NO: 21506 - DNA, 730 bp, Homo sapiens
cgtgcttttgggggtgggggaggcgtccctccctggaccccggcgacttcctctctcggggaggagccccagccccgcgacgaggaggaagcggagctggagctgctgaggcagtttgacctggcctggcagtacgggccctgcaccgggatcacacggctgcagcgctggtgtcgggccaagcagatgggcttggagcctcccccagaggtgtggcaggtgctgaagacccaccccggagacccccgcttccagtgcagtctctggcatctctatcccctatgaggcaccacgtaagacctcctgcccttagctctcttgctcaccacccaagaacctcaggacagaagcgagagcccattgctcctgctcagctcagcccggctgcggaggaacccttggcaggcagaacctggaggtgtcagaggctcaactcctccatctaaccagcaggctcccagagtccccggaagagcctgcgcagctgaagcagagtgcttctagatggagagtggtcactggggaaaaggacctggccatcaccttccaatacctgctgcctgtctccctgacccatgatctggcaagttaggcacagtcagacatggacagttgatccatgaggaaaagatgctctcccacctaaggccaggaatctgagagcaggactggctgagctcccagggcaaggggttcactaatgcttatcaataaagaatattgagcctgg

SEQ ID NO: 21507 - protein, 32 aa, Homo sapiens; identical to SEQ ID NO: 21471

SEQ ID NO: 21508 - DNA, 527 bp, Homo sapiens
gcctatgcggggcggggccctggcgctagccaatggcaaatgttcttttcagcttcgctaatccccgtggccagtttgtaactccctagagtccagctggagccttcactcggtcctttggcccgccccgccttgtgggggcaggtctggaggtctgaagagagtttgggctaatccaggccccttcccggctcccacccaacccccactggccccaggagacctggctggagaagcccatgggttctgaaacctcctttctcacagtctgtgcccaaagatgctgcccactcttagtccgagtaagtgtttgccgttttgactctcctggggtcccaagtcgtgtccggcccgccccaccagtcaggaagattccatactgagtaggaaggcagagcaagggtctggtccccccaccacaatgtgtttggatccctagttcttcactggcaaaatctgccctgtctctcacaataatgtgagtctgagcagaaaatattaataataaacctaacactcattgcacg

SEQ ID NO: 21509 - protein, 47 aa, Homo sapiens
MGSETSFLTVCAQRCCPLLVRVSVCRFDSPGVPSRVRPAPPVRKIPY

SEQ ID NO: 21510 - DNA, 1847 bp, Homo sapiens
acacgtcagaaaaaaaaaaaaaaagtttgcagaatgtcccacaccgaaaaaaaaaaaaaatccgaaaccgagcgaaaaaaacctgcgagtgggcctggcggatgggattattaaagcttcgccggagccgcggctcgccctcccactccgccagcctccgggagaggagccgcacccggccggcccggccccagccccatggacctccgagcaggggactcgtgggggatgttagcgtgcctgtgcacggtgctctggcacctccctgcagtgccagctctcaatcgcacaggggacccagggcctggcccctccatccagaaaacctatgacctcacccgctacctggagcaccaactccgcagcttggctgggacctatctgaactacctgggcccccctttcaacgagccagacttcaaccctccccgcctgggggcagagactctgcccagggccactgttgacttggaggtgtggcgaagcctcaatgacaaactgcggctgacccagaactacgaggcctacagccaccttctgtgttacttgcgtggcctcaaccgtcaggctgccactgctgagctgcgccgcagcctggcccacttctgcaccagcctccagggcctgctgggcagcattgcgggcgtcatggcagctctgggctacccactgccccagccgctgcctgggactgaacccacttggactcctggccctgcccacagtgacttcctccagaagatggacgacttctggctgctgaaggagctgcagacctggctgtggcgctcggccaaggacttcaaccggctcaagaagaagatgcagcctccagcagctgcagtcaccctgcacctgggggctcatggcttctgacttctgaccttctcctcttcgctcccccttcaaaccctgctcccactttgtgagagccagccctgtatgccaacacctgttgagccaggagacagaagctgtgagcctctggccctttcctggaccggctgggcgtgtgatgcgatcagccctgtctcctccccacctcccaaaggtctaccgagctggggaggaggtacagtaggccctgtcctgtcctgtttctacaggaagtcatgctcgagggagtgtgaagtggttcaggttggtgcagaggcgctcatggcctcctgcttcttgcctaccacttggccagtgcccacccagcccctcaggtggcacatctggagggcaggggttgaggggccaccaccacacatgcctttctggggtgaagccctttggctgccccactctccttggatgggtgttgctcccttatccccaaatcactctatacatccaattcaggaaacaaacatggtggcaattctacacaaaaagagatgagattaacagtgcagggttggggtctgcattggaggtgccctataaaccagaagagaaaatactgaaagcacaggggcagggacagaccagaccagacccaggagtctccaaagcacagagtggcaaacaaaacccgagctgagcatcaggaccttgcctcgaattgtcttccagtattacggtgcctcttctctgccccctttcccagggtatctgtgggttgccaggctggggagggcaaccatagccacaccacaggatttcctgaaagtttacaatgcagtagcattttggggtgtagggtggcagctccccaaggccctgccccccagccccacccactcatgactctaagtgtgttgtattaatatttatttatttggagatgttatttattagatgatatttattgcagaatttctattcttgtattaacaaataaaatgcttgccccagaactt

SEQ ID NO: 21511 - protein, 225 aa, Homo sapiens; identical to SEQ ID NO: 2765

SEQ ID NO: 21512 - DNA, 1692 bp, Homo sapiens
gaaggttagagatgaggaggcagaggtagggtgggagcagggacctcgcacaggcagaggggactcgtgggggatgttagcgtgcctgtgcacggtgctctggcacctccctgcagtgccagctctcaatcgcacaggggacccagggcctggcccctccatccagaaaacctatgacctcacccgctacctggagcaccaactccgcagcttggctgggacctatctgaactacctgggcccccctttcaacgagccagacttcaaccctccccgcctgggggcagagactctgcccagggccactgttgacttggaggtgtggcgaagcctcaatgacaaactgcggctgacccagaactacgaggcctacagccaccttctgtgttacttgcgtggcctcaaccgtcaggctgccactgctgagctgcgccgcagcctggcccacttctgcaccagcctccagggcctgctgggcagcattgcgggcgtcatggcagctctgggctacccactgccccagccgctgcctgggactgaacccacttggactcctggccctgcccacagtgacttcctccagaagatggacgacttctggctgctgaaggagctgcagacctggctgtggcgctcggccaaggacttcaaccggctcaagaagaagatgcagcctccagcagctgcagtcaccctgcacctgggggctcatggcttctgacttctgaccttctcctcttcgctcccccttcaaaccctgctcccactttgtgagagccagccctgtatgccaacacctgttgagccaggagacagaagctgtgagcctctggccctttcctggaccggctgggcgtgtgatgcgatcagccctgtctcctccccacctcccaaaggtctaccgagctggggaggaggtacagtaggccctgtcctgtcctgtttctacaggaagtcatgctcgagggagtgtgaagtggttcaggttggtgcagaggcgctcatggcctcctgcttcttgcctaccacttggccagtgcccacccagcccctcaggtggcacatctggagggcaggggttgaggggccaccaccacacatgcctttctggggtgaagccctttggctgccccactctccttggatgggtgttgctcccttatccccaaatcactctatacatccaattcaggaaacaaacatggtggcaattctacacaaaaagagatgagattaacagtgcagggttggggtctgcattggaggtgccctataaaccagaagagaaaatactgaaagcacaggggcagggacagaccagaccagacccaggagtctccaaagcacagagtggcaaacaaaacccgagctgagcatcaggaccttgcctcgaattgtcttccagtattacggtgcctcttctctgccccctttcccagggtatctgtgggttgccaggctggggagggcaaccatagccacaccacaggatttcctgaaagtttacaatgcagtagcattttggggtgtagggtggcagctccccaaggccctgccccccagccccacccactcatgactctaagtgtgttgtattaatatttatttatttggagatgttatttattagatgatatttattgcagaatttctattcttgtattaacaaataaaatgcttgccccagaactt

SEQ ID NO: 21513 - protein, 215 aa, Homo sapiens
MLACLCTVLWHLPAVPALNRTGDPGPGPSIQKTYDLTRYLEHQLRSLAGTYLNYLGPPFNEPDFNPPRLGAETLPRATVDLEVWRSLNDKLRLTQNYEAYSHLLCYLRGLNRQAATAELRRSLAHFCTSLQGLLGSIAGVMAALGYPLPQPLPGTEPTWTPGPAHSDFLQKMDDFWLLKELQTWLWRSAKDFNRLKKKMQPPAAAVTLHLGAHGF

SEQ ID NO: 21514 - DNA, 895 bp, Homo sapiens
gacaacgccatccccagcacacatccacctggggcagccagaaagcactggtttgcaggaactgagggctgcagctctgaaacagggacccaggccagggtcctcaaggtcatagaaccccataaccccattaggtgtcaggggcagaaacaggactgtgtgaagattcacagcctccacctcccttgccttcacggagcttcggcatctacccttattccaggcggctgctcaggggcaccgttctacccctttctgcctggagaaactgccgtttttccttaaaggatcctcgaagccggaaggagcagccacctcccactcccggctgctgcaagcaagctgctttgacttctttctagagttggggattgctgctggagtccgagtctcaggcccagagtgggtgcgatggtcttgcttgcaccctgtatcccccggcagacgcccgggaactctactaagtgggtgaccccagagagctcgcccccacactccgactccgagtccagcactcggtccactgcacagggacctcgcgccccacagctgcgtcctctctgaccttcgcaatccggtgcgcggcccgcggaacgccccgatctccaggggcacggaaggccgaggcgtgccgggggagccaggagcagctggctggcgggcgccgcgggcctccccggtcacgtgacaccccggacaacgtgcgccgtcacgtgacggcagagcctgtgagcgtttttctcacgtgacggaggcgcctgcacgtggaccaatggggaggcgggggcggggccggcaggggcggtgcgcgggaagggaccccggacccggaggtcgcggagagctgggcagtgttggccgctggcggagcgctggggcagcatgaagtgcctgg

SEQ ID NO: 21515 - protein, 50 aa, Homo sapiens
MVLLAPCIPRQTPGNSTKWVTPESSPPHSDSESSTRSTAQGPRAPQLRPL

SEQ ID NO: 21516 - DNA, 355 bp, Homo sapiens
ccattagcagtggcctcgtataagcaggtgggcatgtaagtatgtgtgaatgtgttggggggcagatatggaatggaagcttgagaccctaatgctcactcattcattcaacatatattcattcaacatatcctggatgcacttttttaactatgggaaagacagcacaggacaaaaatcctggccggatgcggtggctcacacctgtaatcccagcacttttgggaggccagtgtgggcagattgcttgagtccaggagttcaagaccagcctaggcaacatggtttctaccaaaaatacaaaaattagccaaagaatcatcaaggtaaatatgaaattacacctttgagaagg

SEQ ID NO: 21517 - protein, 86 aa, Homo sapiens
MCWGADMEWKLETLMLTHSFNIYSFNISWMHFFNYGKDSTGQKSWPDAVAHTCNPSTFGRPVWADCLSPGVQDQPRQHGFYQKYKN

SEQ ID NO: 21518 - DNA, 2130 bp, Homo sapiens
gcgggggcggggccggcaggggcggtgcgcgggaagggaccccggacccggaggtcgcggagagctgggcagtgttggccgctggcggagcgctggggcagcatgaagtgcctggtcacgggcggcaacgtgaaggtgctcggcaaggccgtccactccctgtcccgcatcggggacgagctctacctggaacccttggaggacgggctctccctccggacggtgaactcctcccgctctgcctatgcctgctttctctttgccccgctcttcttccagcaataccaggcagccacccctggtcaggacctgctgcgctgtaagatcctgatgaagtctttcctgtctgtcttccgctcactggcgatgctggagaagacggtggaaaaatgctgcatctccctgaatggccggagcagccgcctggtggtccagctgcattgcaagttcggggtgcggaagactcacaacctgtccttccaggactgtgagtccctgcaggccgtcttcgacccagcctcgtgcccccacatgctccgcgccccagcacgggttctgggggaggctgttctgcccttctctcctgcactggctgaagtgacgctgggcattggccgtggccgcagggtcatcctgcgcagctaccacgaggaggaggcagacagcactgccaaagccatggtgactgagatgtgccttggagaggaggatttccagcagctgcaggcccaggaaggggtggccatcactttctgcctcaaggaattccgggggctcctgagctttgcagagtcagcaaacttgaatcttagcattcattttgatgctccaggcaggcccgccatcttcaccatcaaggactctttgctggacggccactttgtcttggccacactctcagacaccgactcgcactcccaggacctgggctccccagagcgtcaccagccagtgcctcagctccaggctcacagcacaccccacccggacgactttgccaatgacgacattgactcttacatgatcgccatggaaaccactataggcaatgagggctcgcgggtgctgccctccatttccctttcacctggcccccagccccccaagagccccggtccccactccgaggaggaagatgaggctgagcccagtacagtgcctgggactcccccacccaagaagttccgctcactgttcttcggctccatcctggcccctgtacgctccccccagggccccagccctgtgctggcggaagacagtgagggtgaaggctgaaccaagaacctgaagcctgtacccagaggccttggactagacgaagccccagccagtggcagaactgggtctctcagccctggggatcagaaaggtgggcttgctggagctgagctgtttcactgcctctcgcaggccccagctggctgtcactgtaaagctgtcccacagcggtcgggcctgggccgttatctccccacaacccccagccaatcaggactttccagacttggccctgaactactgacgttcctacctcttatttctcattgagcctcaggctatactccagctggccaaggctggaaacctgtctccctcaggctcaccttcctaaggaaaatgtcatagtaggtgctgctggcccctggtgatccagcttctctgccaatcatgacctgttccttcctgaagtcctgggcatgcatctgggacccccgtggagctgacaagttttccttgctttcctgatactctttggcgctgacttggaattctaagagccttggacccgagtgtgtggctagggttgccctggctggggcccggtgccgagactcccaagcggctctgtgcagaagagctgccaggcagtgtcttagatgtgagacggaggccatggcgagaatccagctttgacctttattcaagagaccagatgggttgccccaggatccggctgccagccctgaggccaagcacggctggagacccacgacctggcctgccgttgccctgagctgcagcctcggccccaggatcctgctcacagtcaccgcaggtgcaggcaggaagcagccctgggggactggacgctgctattgattcattaaaaaaagaaaagaaaaatac

SEQ ID NO: 21519 - protein, 391 aa, Homo sapiens; identical to SEQ ID NO: 2767

SEQ ID NO: 21520 - DNA, 2366 bp, Homo sapiens
gcgggggcggggccggcaggggcggtgcgcgggaagggaccccggacccggaggtcgcggagagctgggcagtgttggccgctggcggagcgctggggcagcatgaagtgcctggtcacgggcggcaacgtgaaggtgctcggcaaggccgtccactccctgtcccgcatcggggacgagctctacctggaacccttggaggacgggctctccctccggacggtgaactcctcccgctctgcctatgcctgctttctctttgccccgctcttcttccagcaataccaggcagccacccctggtcaggacctgctgcgctgtaagatcctgatgaagtctttcctgtctgtcttccgctcactggcgatgctggagaagacggtggaaaaatgctgcatctccctgaatggccggagcagccgcctggtggtccagctgcattgcaagttcggggtgcggaagactcacaacctgtccttccaggactgtgagtccctgcaggccgtcttcgacccagcctcgtgcccccacatgctccgcgccccagcacgggttctgggggaggctgttctgcccttctctcctgcactggctgaagtgacgctgggcattggccgtggccgcagggtcatcctgcgcagctaccacgaggaggaggcagacagcactgccaaagccatggtgactgagatgtgccttggagaggaggatttccagcagctgcaggcccaggaaggggtggccatcactttctgcctcaaggaattccgggggctcctgagctttgcagagtcagcaaacttgaatcttagcattcattttgatgctccaggcaggcccgccatcttcaccatcaaggactctttgctggacggccactttgtcttggccacactctcagacaccgactcgcactcccaggacctgggctccccagagcgtcaccagccagtgcctcagctccaggctcacagcacaccccacccggacgactttgccaatgacgacattgactcttacatgatcgccatggaaaccactataggcaatgagggctcgcgggtgctgccctccatttccctttcacctggcccccagccccccaagagccccggtccccactccgaggaggaagatgaggctgagcccagtacagtgcctgggactcccccacccaagaagttccgctcactgttcttcggctccatcctggcccctgtacgctccccccagggccccagccctgtgctggcggaagacagtgagggtgaaggctgaaccaagaacctgaagcctgtacccagaggccttggactagacgaagccccagccagtggcagaactgggtctctcagccctggggatcagaaaggtgggcttgctggagctgagctgtttcactgcctctcgcaggccccagctggctgtcactgtaaagctgtcccacagcggtcgggcctgggccgttatctccccacaacccccagccaatcaggactttccagacttggccctgaactactgacgttcctacctcttatttctcattgagcctcaggctatactccagctggccaaggctggaaacctgtctccctcaggctcaccttcctaaggaaaatgtcatagtaggtgctgctggcccctggtgatccagcttctctgccaatcatgacctgttccttcctgaagtcctgggcatgcatctgggacccccgtggagctgacaagttttccttgctttcctgatactctttggcgctgacttggaattctaagagccttggacccgagtgtgtggctagggttgccctggctggggcccggtgccgagactcccaagcggctctgtgcagaagagctgccaggcagtgtcttagatgtgagacggaggccatggcgagaatccagctttgacctttattcaagagaccagatgggttgccccaggatccggctgccagccctgaggccaagcacggctggagacccacgacctggcctgccgttgccctgagctgcagcctcggccccaggatcctgctcacagtcaccgcaggtgcaggcaggaagcagccctgggggactggacgctgctattgattcattaaaaaaagaaaagaaaaatacaccaaggctccatgttccccgtgacaggtgggcctgaggggtcggggtgacccccccccagcatggcagcatgatttctgtacaatcaatccatcatctggggcacagggtggtgtgcgggggctatttcttggctttggcggaattgcggggtggggtgatgggtcggcctccagggttcaggccactgaactgcccgtacttccccttgttcttgtcggcgggcttgaggatct

SEQ ID NO: 21521 - protein, 391 aa, Homo sapiens; identical to SEQ ID NO: 2767

SEQ ID NO: 21522 - DNA, 1477 bp, Homo sapiens
gaactcctcccgctctgcctatgcctgctttctctttgccccgctcttcttccagcaataccaggcactgcaggcccaggaaggggtggccatcactttctgcctcaaggaattccgggggctcctgagctttgcagagtcagcaaacttgaatcttagcattcattttgatgctccaggcaggcccgccatcttcaccatcaaggactctttgctggacggccactttgtcttggccacactctcagacaccgactcgcactcccaggacctgggctccccagagcgtcaccagccagtgcctcagctccaggctcacagcacaccccacccggacgactttgccaatgacgacattgactcttacatgatcgccatggaaaccactataggcaatgagggctcgcgggtgctgccctccatttccctttcacctggcccccagccccccaagagccccggtccccactccgaggaggaagatgaggctgagcccagtacagtgcctgggactcccccacccaagaagttccgctcactgttcttcggctccatcctggcccctgtacgctccccccagggccccagccctgtgctggcggaagacagtgagggtgaaggctgaaccaagaacctgaagcctgtacccagaggccttggactagacgaagccccagccagtggcagaactgggtctctcagccctggggatcagaaaggtgggcttgctggagctgagctgtttcactgcctctcgcaggccccagctggctgtcactgtaaagctgtcccacagcggtcgggcctgggccgttatctccccacaacccccagccaatcaggactttccagacttggccctgaactactgacgttcctacctcttatttctcattgagcctcaggctatactccagctggccaaggctggaaacctgtctccctcaggctcaccttcctaaggaaaatgtcatagtaggtgctgctggcccctggtgatccagcttctctgccaatcatgacctgttccttcctgaagtcctgggcatgcatctgggacccccgtggagctgacaagttttccttgctttcctgatactctttggcgctgacttggaattctaagagccttggacccgagtgtgtggctagggttgccctggctggggcccggtgccgagactcccaagcggctctgtgcagaagagctgccaggcagtgtcttagatgtgagacggaggccatggcgagaatccagctttgacctttattcaagagaccagatgggttgccccaggatccggctgccagccctgaggccaagcacggctggagacccacgacctggcctgccgttgccctgagctgcagcctcggccccaggatcctgctcacagtcaccgcaggtgcaggcaggaagcagccctgggggactggacgctgctattgattcattaaaaaaagaaaagaaaaatac

SEQ ID NO: 21523 - protein, 85 aa, Homo sapiens [sequence omitted]

SEQ ID NO: 21524 - DNA, 1713 bp, Homo sapiens
gaactcctcccgctctgcctatgcctgctttctctttgccccgctcttcttccagcaataccaggcactgcaggcccaggaaggggtggccatcactttctgcctcaaggaattccgggggctcctgagctttgcagagtcagcaaacttgaatcttagcattcattttgatgctccaggcaggcccgccatcttcaccatcaaggactctttgctggacggccactttgtcttggccacactctcagacaccgactcgcactcccaggacctgggctccccagagcgtcaccagccagtgcctcagctccaggctcacagcacaccccacccggacgactttgccaatgacgacattgactcttacatgatcgccatggaaaccactataggcaatgagggctcgcgggtgctgccctccatttccctttcacctggcccccagccccccaagagccccggtccccactccgaggaggaagatgaggctgagcccagtacagtgcctgggactcccccacccaagaagttccgctcactgttcttcggctccatcctggcccctgtacgctccccccagggccccagccctgtgctggcggaagacagtgagggtgaaggctgaaccaagaacctgaagcctgtacccagaggccttggactagacgaagccccagccagtggcagaactgggtctctcagccctggggatcagaaaggtgggcttgctggagctgagctgtttcactgcctctcgcaggccccagctggctgtcactgtaaagctgtcccacagcggtcgggcctgggccgttatctccccacaacccccagccaatcaggactttccagacttggccctgaactactgacgttcctacctcttatttctcattgagcctcaggctatactccagctggccaaggctggaaacctgtctccctcaggctcaccttcctaaggaaaatgtcatagtaggtgctgctggcccctggtgatccagcttctctgccaatcatgacctgttccttcctgaagtcctgggcatgcatctgggacccccgtggagctgacaagttttccttgctttcctgatactctttggcgctgacttggaattctaagagccttggacccgagtgtgtggctagggttgccctggctggggcccggtgccgagactcccaagcggctctgtgcagaagagctgccaggcagtgtcttagatgtgagacggaggccatggcgagaatccagctttgacctttattcaagagaccagatgggttgccccaggatccggctgccagccctgaggccaagcacggctggagacccacgacctggcctgccgttgccctgagctgcagcctcggccccaggatcctgctcacagtcaccgcaggtgcaggcaggaagcagccctgggggactggacgctgctattgattcattaaaaaaagaaaagaaaaatacaccaaggctccatgttccccgtgacaggtgggcctgaggggtcggggtgacccccccccagcatggcagcatgatttctgtacaatcaatccatcatctggggcacagggtggtgtgcgggggctatttcttggctttggcggaattgcggggtggggtgatgggtcggcctccagggttcaggccactgaactgcccgtacttccccttgttcttgtcggcgggcttgaggatct

SEQ ID NO: 21525 - protein, 85 aa, Homo sapiens [sequence omitted]

SEQ ID NO: 21526 - DNA, 310 bp, Homo sapiens
atcactttctgcctcaaggaattccgggggctcctgagctttgcagagtcagcaaacttgaatcttagcattcattttgatgctccaggcaggtagttcccagccttgggacagggaagggctctgggatggcaggagctgaatgggatgacctagcttgggccccctcccctgcccaggcccgccatcttcaccatcaaggactctttgctggacggccactttgtcttggccacactctcagacaccgactcgcactcccaggacctgggctccccagagcgtcaccagccagtgcctcagctccagg

SEQ ID NO: 21527 - protein, 59 aa, Homo sapiens
MAGAEWDDLAWAPSPAQARHLHHQGLFAGRPLCLGHTLRHRLALPGPGLPRASPASASA

SEQ ID NO: 21528 - DNA, 1784 bp, Homo sapiens
accccactgtgctgggctgcactcacttccttgatgtgtgtcctacatggagtgggcttgtctcctttctcccgggagctctgtgctcctgagggcagggatgcctttgtgcctgtttgggaacttgaaaaagctgaggggaaggggatgacttctgcctgtctaggcgcccaggagaccagtggcgggaccaggagggtggtgggaaaggtggggttcattggccaaggcttcctggagggaggatgtccttgtttgaggaagtgaccttcccccggccccccaggcctgtccccggacctgcagtctatggagcagattcggcggatcatgcggcccacagatgtgcctgaccagggcctgctgtgtgacctgctgtggtctgaccctgacaaggacgtgcagggctggggcgagaacgaccgtggcgtctcttttacctttggagccgaggtggtggccaagttcctccacaagcacgacttggacctcatctgccgagcacaccaggtgggctggtggctccggcctgcggcaggggaaggggagggccgtgcctgcgctcgggactgactgctcccatcctcgcccaggtggtagaagacggctacgagttctttgccaagcggcagctggtgacacttttctcagctcccaactactgtggcgagtttgacaatgctggcgccatgatgagtgtggacgagaccctcatgtgctctttccagatcctcaagcccgccgacaagaacaaggggaagtacgggcagttcagtggcctgaaccctggaggccgacccatcaccccaccccgcaattccgccaaagccaagaaatagcccccgcacaccaccctgtgccccagatgatggattgattgtacagaaatcatgctgccatgctgggggggggtcaccccgacccctcaggcccacctgtcacggggaacatggagccttggtgtatttttcttttctttttttaatgaatcaatagcagcgtccagtcccccagggctgcttcctgcctgcacctgcggtgactgtgagcaggatcctggggccgaggctgcagctcagggcaacggcaggccaggtcgtgggtctccagccgtgcttggcctcagggctggcagccggatcctggggcaacccatctggtctcttgaataaaggtcaaagctggattctcgccatggcctccgtctcacatctaagacactgcctggcagctcttctgcacagagccgcttgggagtctcggcaccgggccccagccagggcaaccctagccacacactcgggtccaaggctcttagaattccaagtcagcgccaaagagtatcaggaaagcaaggaaaacttgtcagctccacgggggtcccagatgcatgcccaggacttcaggaaggaacaggtcatgattggcagagaagctggatcaccaggggccagcagcacctactatgacattttccttaggaaggtgagcctgagggagacaggtttccagccttggccagctggagtatagcctgaggctcaatgagaaataagaggtaggaacgtcagtagttcagggccaagtctggaaagtcctgattggctgggggttgtggggagataacggcccaggcccgaccgctgtgggacagctttacagtgacagccagctggggcctgcgagaggcagtgaaacagctcagctccagcaagcccacctttctgatccccagggctgagagacccagttctgccactggctggggcttcgtctagtccaag

SEQ ID NO: 21529 - protein, 49 aa, Homo sapiens
MMSVDETLMCSFQILKPADKNKGKYGQFSGLNPGGRPITPPRNSAKAKK

SEQ ID NO: 21530 - DNA, 2087 bp, Homo sapiens
gcggggcgggcccgggaggcctggaggcggggccgcgggccgggggcggactggggcgggcggaaggagagccaggccggaaggaggctgccggagggcgggaggcaggagcgggccaggagctgctgggctggagcggcggcgccgccatgtccgacagcgagaagctcaacctggactcgatcatcgggcgcctgctggaagtgcagggctcgcggcctggcaagaatgtacagctgacagagaacgagatccgcggtctgtgcctgaaatcccgggagatttttctgagccagcccattcttctggagctggaggcacccctcaagatctgcggtgacatacacggccagtactacgaccttctgcgactatttgagtatggcggtttccctcccgagagcaactacctctttctgggggactatgtggacaggggcaagcagtccttggagaccatctgcctgctgctggcctataagatcaagtaccccgagaacttcttcctgctccgtgggaaccacgagtgtgccagcatcaaccgcatctatggtttctacgatgagtgcaagagacgctacaacatcaaactgtggaaaaccttcactgactgcttcaactgcctgcccatcgcggccatagtggacgaaaagatcttctgctgccacggaggcctgtccccggacctgcagtctatggagcagattcggcggatcatgcggcccacagatgtgcctgaccagggcctgctgtgtgacctgctgtggtctgaccctgacaaggacgtgcagggctggggcgagaacgaccgtggcgtctcttttacctttggagccgaggtggtggccaagttcctccacaagcacgacttggacctcatctgccgagcacaccaggtggtagaagacggctacgagttctttgccaagcggcagctggtgacacttttctcagctcccaactactgtggcgagtttgacaatgctggcgccatgatgagtgtggacgagaccctcatgtgctctttccagatcctcaagcccgccgacaagaacaaggggaagtacgggcagttcagtggcctgaaccctggaggccgacccatcaccccaccccgcaattccgccaaagccaagaaatagcccccgcacaccaccctgtgccccagatgatggattgattgtacagaaatcatgctgccatgctgggggggggtcaccccgacccctcaggcccacctgtcacggggaacatggagccttggtgtatttttcttttctttttttaatgaatcaatagcagcgtccagtcccccagggctgcttcctgcctgcacctgcggtgactgtgagcaggatcctggggccgaggctgcagctcagggcaacggcaggccaggtcgtgggtctccagccgtgcttggcctcagggctggcagccggatcctggggcaacccatctggtctcttgaataaaggtcaaagctggattctcgccatggcctccgtctcacatctaagacactgcctggcagctcttctgcacagagccgcttgggagtctcggcaccgggccccagccagggcaaccctagccacacactcgggtccaaggctcttagaattccaagtcagcgccaaagagtatcaggaaagcaaggaaaacttgtcagctccacgggggtcccagatgcatgcccaggacttcaggaaggaacaggtcatgattggcagagaagctggatcaccaggggccagcagcacctactatgacattttccttaggaaggtgagcctgagggagacaggtttccagccttggccagctggagtatagcctgaggctcaatgagaaataagaggtaggaacgtcagtagttcagggccaagtctggaaagtcctgattggctgggggttgtggggagataacggcccaggcccgaccgctgtgggacagctttacagtgacagccagctggggcctgcgagaggcagtgaaacagctcagctccagcaagcccacctttctgatccccagggctgagagacccagttctgccactggctggggcttcgtctagtccaag

SEQ ID NO: 21531 - protein, 330 aa, Homo sapiens; identical to SEQ ID NO: 2771

SEQ ID NO: 21532 - DNA, 2857 bp, Homo sapiens
gttttccctccatgaggcagcgcgccgaccgccgaagcatggtctccaccagcggcgccgccaccgcctccgtcctcggcagggagttgtggtgccgtagagggcggtccccgcggcccacgccgcacaccacctgggcagggggagactcagggggaggcccacacactccctgccccccacgcacacccccaccgccttgtgccaaaattcagaccagacccctcactggacattcaagaagccccgtcctccaacgtgtcttaaattgcacacgagctctccctgccactccccatctggtccccagacctctccagggattctacctacccaggcttccaggcccagctggggtccccctccaggatggctcctgcagccctgggggcctgggccaccctggtgtgccccaccctagcatctccctggggcgcacctttccctaccccactggagctccctgagggcagggtcgaatctctccctctcagtgtagcctagagcggggtactcaggagggtccgtaagccttcctgactctccagcttagaggcccctcctgaaggcgtccaggcactagaggtttatcaggaggccctgggtcagcctctacgtgggcaagagctctctgggaagacggggaggtctaaggccagcacagagtggccagaaggccacaccaaactcccatccctggtcagcccaggtggctctcacctgagcagggcagctgggcaggtgggtacacagcctccaccaggacactctcctcctcctccagcttctccagcagcgccagcactgtgtccaccactgcacccagctctgcccgcgggtgcagacgccatgcctgccgcccccgccagcgccagccactgagcttcacagctacctgcagcaaggaggggaaaggggcctcctggacaccaccccaggtactgcagggtggggcacttccgccacaggagccgtgcagggctcgcggcctggcaagaatgtacagctgacagagaacgagatccgcggtctgtgcctgaaatcccgggagatttttctgagccagcccattcttctggagctggaggcacccctcaagatctgcggtgacatacacggccagtactacgaccttctgcgactatttgagtatggcggtttccctcccgagagcaactacctctttctgggggactatgtggacaggggcaagcagtccttggagaccatctgcctgctgctggcctataagatcaagtaccccgagaacttcttcctgctccgtgggaaccacgagtgtgccagcatcaaccgcatctatggtttctacgatgagtgcaagagacgctacaacatcaaactgtggaaaaccttcactgactgcttcaactgcctgcccatcgcggccatagtggacgaaaagatcttctgctgccacggaggcctgtccccggacctgcagtctatggagcagattcggcggatcatgcggcccacagatgtgcctgaccagggcctgctgtgtgacctgctgtggtctgaccctgacaaggacgtgcagggctggggcgagaacgaccgtggcgtctcttttacctttggagccgaggtggtggccaagttcctccacaagcacgacttggacctcatctgccgagcacaccaggtggtagaagacggctacgagttctttgccaagcggcagctggtgacacttttctcagctcccaactactgtggcgagtttgacaatgctggcgccatgatgagtgtggacgagaccctcatgtgctctttccagatcctcaagcccgccgacaagaacaaggggaagtacgggcagttcagtggcctgaaccctggaggccgacccatcaccccaccccgcaattccgccaaagccaagaaatagcccccgcacaccaccctgtgccccagatgatggattgattgtacagaaatcatgctgccatgctgggggggggtcaccccgacccctcaggcccacctgtcacggggaacatggagccttggtgtatttttcttttctttttttaatgaatcaatagcagcgtccagtcccccagggctgcttcctgcctgcacctgcggtgactgtgagcaggatcctggggccgaggctgcagctcagggcaacggcaggccaggtcgtgggtctccagccgtgcttggcctcagggctggcagccggatcctggggcaacccatctggtctcttgaataaaggtcaaagctggattctcgccatggcctccgtctcacatctaagacactgcctggcagctcttctgcacagagccgcttgggagtctcggcaccgggccccagccagggcaaccctagccacacactcgggtccaaggctcttagaattccaagtcagcgccaaagagtatcaggaaagcaaggaaaacttgtcagctccacgggggtcccagatgcatgcccaggacttcaggaaggaacaggtcatgattggcagagaagctggatcaccaggggccagcagcacctactatgacattttccttaggaaggtgagcctgagggagacaggtttccagccttggccagctggagtatagcctgaggctcaatgagaaataagaggtaggaacgtcagtagttcagggccaagtctggaaagtcctgattggctgggggttgtggggagataacggcccaggcccgaccgctgtgggacagctttacagtgacagccagctggggcctgcgagaggcagtgaaacagctcagctccagcaagcccacctttctgatccccagggctgagagacccagttctgccactggctggggcttcgtctagtccaag

SEQ ID NO: 21533 - protein, 151 aa, Homo sapiens
MRQRADRRSMVSTSGAATASVLGRELWCRRGRSPRPTPHTTWAGGDSGGGPHTPCPPRTPPPPCAKIQTRPLTGHSRSPVLQRVLNCTRALPATPHLVPRPLQGFYLPRLPGPAGVPLQDGSCSPGGLGHPGVPHPSISLGRTFPYPTGAP

SEQ ID NO: 21534 - DNA, 2278 bp, Homo sapiens
cttcttgctgacgccgccagcgccgaccaccagcagctgttttccctccatgaggcagcgcgccgaccgccgaagcatggtctccaccagcggcgccgccaccgcctcgtcggccgccggccccagccgcggcgcggcccacagcccctccagcgcgccgcacgcctccagacacaggccgccgttcagctccagggccactgggcttctccagcagcgccagcactgtgtccaccactgcacccagctctgcccgcgggtgcagacgccatgcctgccgcccccgccagcgccagccactgagcttcacagctacctgcagcaaggaggggaaaggggcctcctggacaccaccccaggtactgcagggtggggcacttccgccacaggagccgtgcagggctcgcggcctggcaagaatgtacagctgacagagaacgagatccgcggtctgtgcctgaaatcccgggagatttttctgagccagcccattcttctggagctggaggcacccctcaagatctgcggtgacatacacggccagtactacgaccttctgcgactatttgagtatggcggtttccctcccgagagcaactacctctttctgggggactatgtggacaggggcaagcagtccttggagaccatctgcctgctgctggcctataagatcaagtaccccgagaacttcttcctgctccgtgggaaccacgagtgtgccagcatcaaccgcatctatggtttctacgatgagtgcaagagacgctacaacatcaaactgtggaaaaccttcactgactgcttcaactgcctgcccatcgcggccatagtggacgaaaagatcttctgctgccacggaggcctgtccccggacctgcagtctatggagcagattcggcggatcatgcggcccacagatgtgcctgaccagggcctgctgtgtgacctgctgtggtctgaccctgacaaggacgtgcagggctggggcgagaacgaccgtggcgtctcttttacctttggagccgaggtggtggccaagttcctccacaagcacgacttggacctcatctgccgagcacaccaggtggtagaagacggctacgagttctttgccaagcggcagctggtgacacttttctcagctcccaactactgtggcgagtttgacaatgctggcgccatgatgagtgtggacgagaccctcatgtgctctttccagatcctcaagcccgccgacaagaacaaggggaagtacgggcagttcagtggcctgaaccctggaggccgacccatcaccccaccccgcaattccgccaaagccaagaaatagcccccgcacaccaccctgtgccccagatgatggattgattgtacagaaatcatgctgccatgctgggggggggtcaccccgacccctcaggcccacctgtcacggggaacatggagccttggtgtatttttcttttctttttttaatgaatcaatagcagcgtccagtcccccagggctgcttcctgcctgcacctgcggtgactgtgagcaggatcctggggccgaggctgcagctcagggcaacggcaggccaggtcgtgggtctccagccgtgcttggcctcagggctggcagccggatcctggggcaacccatctggtctcttgaataaaggtcaaagctggattctcgccatggcctccgtctcacatctaagacactgcctggcagctcttctgcacagagccgcttgggagtctcggcaccgggccccagccagggcaaccctagccacacactcgggtccaaggctcttagaattccaagtcagcgccaaagagtatcaggaaagcaaggaaaacttgtcagctccacgggggtcccagatgcatgcccaggacttcaggaaggaacaggtcatgattggcagagaagctggatcaccaggggccagcagcacctactatgacattttccttaggaaggtgagcctgagggagacaggtttccagccttggccagctggagtatagcctgaggctcaatgagaaataagaggtaggaacgtcagtagttcagggccaagtctggaaagtcctgattggctgggggttgtggggagataacggcccaggcccgaccgctgtgggacagctttacagtgacagccagctggggcctgcgagaggcagtgaaacagctcagctccagcaagcccacctttctgatccccagggctgagagacccagttctgccactggctggggcttcgtctagtccaag

SEQ ID NO: 21535 - protein, 427 aa, Homo sapiens
MRQRADRRSMVSTSGAATASSAAGPSRGAAHSPSSAPHASRHRPPFSSRATGLLQQRQHCVHHCTQLCPRVQTPCLPPPPAPATELHSYLQQGGERGLLDTTPGTAGWGTSATGAVQGSRPGKNVQLTENEIRGLCLKSREIFLSQPILLELEAPLKICGDIHGQYYDLLRLFEYGGFPPESNYLFLGDYVDRGKQSLETICLLLAYKIKYPENFFLLRGNHECASINRIYGFYDECKRRYNIKLWKTFTDCFNCLPIAAIVDEKIFCCHGGLSPDLQSMEQIRRIMRPTDVPDQGLLCDLLWSDPDKDVQGWGENDRGVSFTFGAEVVAKFLHKHDLDLICRAHQVVEDGYEFFAKRQLVTLFSAPNYCGEFDNAGAMMSVDETLMCSFQILKPADKNKGKYGQFSGLNPGGRPITPPRNSAKAKK

SEQ ID NO: 21536 - DNA, 1194 bp, Homo sapiens
accccactgtgctgggctgcactcacttccttgatgtgtgtcctacatggagtgggcttgtctcctttctcccgggagctctgtgctcctgagggcagggatgcctttgtgcctgtttgggaacttgaaaaagctgaggggaaggggatgacttctgcctgtctaggcgcccaggagaccagtggcgggaccaggagggtggtgggaaaggtggggttcattggccaaggcttcctggagggaggatgtccttgtttgaggaagtgaccttcccccggccccccaggcctgtccccggacctgcagtctatggagcagattcggcggatcatgcggcccacagatgtgcctgaccagggcctgctgtgtgacctgctgtggtctgaccctgacaaggacgtgcagggctggggcgagaacgaccgtggcgtctcttttacctttggagccgaggtggtggccaagttcctccacaagcacgacttggacctcatctgccgagcacaccaggtgggctggtggctccggcctgcggcaggggaaggggagggccgtgcctgcgctcgggactgactgctcccatcctcgcccaggtggtagaagacggctacgagttctttgccaagcggcagctggtgacacttttctcagctcccaactactgtggcgagtttgacaatgctggcgccatgatgagtgtggacgagaccctcatgtgctctttccagatcctcaagcccgccgacaagaacaaggggaagtacgggcagttcagtggcctgaaccctggaggccgacccatcaccccaccccgcaattccgccaaagccaagaaatagcccccgcacaccaccctgtgccccagatgatggattgattgtacagaaatcatgctgccatgctgggggggggtcaccccgacccctcaggcccacctgtcacggggaacatggagccttggtgtatttttcttttctttttttaatgaatcaatagcagcgtccagtcccccagggctgcttcctgcctgcacctgcggtgactgtgagcaggatcctggggccgaggctgcagctcagggcaacggcaggccaggtcgtgggtctccagccgtgcttggcctcagggctggcagccggatcctggggcaacccatctggtctcttgaataaaggtcaaagctggattctcgcc

SEQ ID NO: 21537 - protein, 49 aa, Homo sapiens; identical to SEQ ID NO: 21529

SEQ ID NO: 21538 - DNA, 1451 bp, Homo sapiens
gaaggaggctgccggagggcgggaggcaggagcgggccaggagctgctgggctggagcggcggcgccgccatgtccgacagcgagaagctcaacctggactcgatcatcgggcgcctgctggaagggtccagggtcctgacaccccattgcgccccagtgcagggctcgcggcctggcaagaatgtacagctgacagagaacgagatccgcggtctgtgcctgaaatcccgggagatttttctgagccagcccattcttctggagctggaggcacccctcaagatctgcggtgacatacacggccagtactacgaccttctgcgactatttgagtatggcggtttccctcccgagagcaactacctctttctgggggactatgtggacaggggcaagcagtccttggagaccatctgcctgctgctggcctataagatcaagtaccccgagaacttcttcctgctccgtgggaaccacgagtgtgccagcatcaaccgcatctatggtttctacgatgagtgcaagagacgctacaacatcaaactgtggaaaaccttcactgactgcttcaactgcctgcccatcgcggccatagtggacgaaaagatcttctgctgccacggaggcctgtccccggacctgcagtctatggagcagattcggcggatcatgcggcccacagatgtgcctgaccagggcctgctgtgtgacctgctgtggtctgaccctgacaaggacgtgcagggctggggcgagaacgaccgtggcgtctcttttacctttggagccgaggtggtggccaagttcctccacaagcacgacttggacctcatctgccgagcacaccaggtggtagaagacggctacgagttctttgccaagcggcagctggtgacacttttctcagctcccaactactgtggcgagtttgacaatgctggcgccatgatgagtgtggacgagaccctcatgtgctctttccagatcctcaagcccgccgacaagaacaaggggaagtacgggcagttcagtggcctgaaccctggaggccgacccatcaccccaccccgcaattccgccaaagccaagaaatagcccccgcacaccaccctgtgccccagatgatggattgattgtacagaaatcatgctgccatgctgggggggggtcaccccgacccctcaggcccacctgtcacggggaacatggagccttggtgtatttttcttttctttttttaatgaatcaatagcagcgtccagtcccccagggctgcttcctgcctgcacctgcggtgactgtgagcaggatcctggggccgaggctgcagctcagggcaacggcaggccaggtcgtgggtctccagccgtgcttggcctcagggctggcagccggatcctggggcaacccatctggtctcttgaataaaggtcaaagctggattctcgcc

SEQ ID NO: 21539 - protein, 341 aa, Homo sapiens; identical to SEQ ID NO: 2769

SEQ ID NO: 21540 - DNA, 1339 bp, Homo sapiens
gcggggccgcgggccgggggcggactggggcgggcggaaggagagccaggccggaaggaggctgccggagggcgggaggcaggagcgggccaggagctgctgggctggagcggcggcgccgccatgtccgacagcgagaagctcaacctggactcgatcatcgggcgcctgctggaaggtgacatacacggccagtactacgaccttctgcgactatttgagtatggcggtttccctcccgagagcaactacctctttctgggggactatgtggacaggggcaagcagtccttggagaccatctgcctgctgctggcctataagatcaagtaccccgagaacttcttcctgctccgtgggaaccacgagtgtgccagcatcaaccgcatctatggtttctacgatgagtgcaagagacgctacaacatcaaactgtggaaaaccttcactgactgcttcaactgcctgcccatcgcggccatagtggacgaaaagatcttctgctgccacggaggcctgtccccggacctgcagtctatggagcagattcggcggatcatgcggcccacagatgtgcctgaccagggcctgctgtgtgacctgctgtggtctgaccctgacaaggacgtgcagggctggggcgagaacgaccgtggcgtctcttttacctttggagccgaggtggtggccaagttcctccacaagcacgacttggacctcatctgccgagcacaccaggtggtagaagacggctacgagttctttgccaagcggcagctggtgacacttttctcagctcccaactactgtggcgagtttgacaatgctggcgccatgatgagtgtggacgagaccctcatgtgctctttccagatcctcaagcccgccgacaagaacaaggggaagtacgggcagttcagtggcctgaaccctggaggccgacccatcaccccaccccgcaattccgccaaagccaagaaatagcccccgcacaccaccctgtgccccagatgatggattgattgtacagaaatcatgctgccatgctgggggggggtcaccccgacccctcaggcccacctgtcacggggaacatggagccttggtgtatttttcttttctttttttaatgaatcaatagcagcgtccagtcccccagggctgcttcctgcctgcacctgcggtgactgtgagcaggatcctggggccgaggctgcagctcagggcaacggcaggccaggtcgtgggtctccagccgtgcttggcctcagggctggcagccggatcctggggcaacccatctggtctcttgaataaaggtcaaagctggattctcgcc

SEQ ID NO: 21541 - protein, 286 aa, Homo sapiens; identical to SEQ ID NO: 2773

SEQ ID NO: 21542 - DNA, 1497 bp, Homo sapiens
gcggggcgggcccgggaggcctggaggcggggccgcgggccgggggcggactggggcgggcggaaggagagccaggccggaaggaggctgccggagggcgggaggcaggagcgggccaggagctgctgggctggagcggcggcgccgccatgtccgacagcgagaagctcaacctggactcgatcatcgggcgcctgctggaagtgcagggctcgcggcctggcaagaatgtacagctgacagagaacgagatccgcggtctgtgcctgaaatcccgggagatttttctgagccagcccattcttctggagctggaggcacccctcaagatctgcggtgacatacacggccagtactacgaccttctgcgactatttgagtatggcggtttccctcccgagagcaactacctctttctgggggactatgtggacaggggcaagcagtccttggagaccatctgcctgctgctggcctataagatcaagtaccccgagaacttcttcctgctccgtgggaaccacgagtgtgccagcatcaaccgcatctatggtttctacgatgagtgcaagagacgctacaacatcaaactgtggaaaaccttcactgactgcttcaactgcctgcccatcgcggccatagtggacgaaaagatcttctgctgccacggaggcctgtccccggacctgcagtctatggagcagattcggcggatcatgcggcccacagatgtgcctgaccagggcctgctgtgtgacctgctgtggtctgaccctgacaaggacgtgcagggctggggcgagaacgaccgtggcgtctcttttacctttggagccgaggtggtggccaagttcctccacaagcacgacttggacctcatctgccgagcacaccaggtggtagaagacggctacgagttctttgccaagcggcagctggtgacacttttctcagctcccaactactgtggcgagtttgacaatgctggcgccatgatgagtgtggacgagaccctcatgtgctctttccagatcctcaagcccgccgacaagaacaaggggaagtacgggcagttcagtggcctgaaccctggaggccgacccatcaccccaccccgcaattccgccaaagccaagaaatagcccccgcacaccaccctgtgccccagatgatggattgattgtacagaaatcatgctgccatgctgggggggggtcaccccgacccctcaggcccacctgtcacggggaacatggagccttggtgtatttttcttttctttttttaatgaatcaatagcagcgtccagtcccccagggctgcttcctgcctgcacctgcggtgactgtgagcaggatcctggggccgaggctgcagctcagggcaacggcaggccaggtcgtgggtctccagccgtgcttggcctcagggctggcagccggatcctggggcaacccatctggtctcttgaataaaggtcaaagctggattctcgcc

SEQ ID NO: 21543 - protein, 330 aa, Homo sapiens; identical to SEQ ID NO: 2771

SEQ ID NO: 21544 - DNA, 2267 bp, Homo sapiens
gttttccctccatgaggcagcgcgccgaccgccgaagcatggtctccaccagcggcgccgccaccgcctccgtcctcggcagggagttgtggtgccgtagagggcggtccccgcggcccacgccgcacaccacctgggcagggggagactcagggggaggcccacacactccctgccccccacgcacacccccaccgccttgtgccaaaattcagaccagacccctcactggacattcaagaagccccgtcctccaacgtgtcttaaattgcacacgagctctccctgccactccccatctggtccccagacctctccagggattctacctacccaggcttccaggcccagctggggtccccctccaggatggctcctgcagccctgggggcctgggccaccctggtgtgccccaccctagcatctccctggggcgcacctttccctaccccactggagctccctgagggcagggtcgaatctctccctctcagtgtagcctagagcggggtactcaggagggtccgtaagccttcctgactctccagcttagaggcccctcctgaaggcgtccaggcactagaggtttatcaggaggccctgggtcagcctctacgtgggcaagagctctctgggaagacggggaggtctaaggccagcacagagtggccagaaggccacaccaaactcccatccctggtcagcccaggtggctctcacctgagcagggcagctgggcaggtgggtacacagcctccaccaggacactctcctcctcctccagcttctccagcagcgccagcactgtgtccaccactgcacccagctctgcccgcgggtgcagacgccatgcctgccgcccccgccagcgccagccactgagcttcacagctacctgcagcaaggaggggaaaggggcctcctggacaccaccccaggtactgcagggtggggcacttccgccacaggagccgtgcagggctcgcggcctggcaagaatgtacagctgacagagaacgagatccgcggtctgtgcctgaaatcccgggagatttttctgagccagcccattcttctggagctggaggcacccctcaagatctgcggtgacatacacggccagtactacgaccttctgcgactatttgagtatggcggtttccctcccgagagcaactacctctttctgggggactatgtggacaggggcaagcagtccttggagaccatctgcctgctgctggcctataagatcaagtaccccgagaacttcttcctgctccgtgggaaccacgagtgtgccagcatcaaccgcatctatggtttctacgatgagtgcaagagacgctacaacatcaaactgtggaaaaccttcactgactgcttcaactgcctgcccatcgcggccatagtggacgaaaagatcttctgctgccacggaggcctgtccccggacctgcagtctatggagcagattcggcggatcatgcggcccacagatgtgcctgaccagggcctgctgtgtgacctgctgtggtctgaccctgacaaggacgtgcagggctggggcgagaacgaccgtggcgtctcttttacctttggagccgaggtggtggccaagttcctccacaagcacgacttggacctcatctgccgagcacaccaggtggtagaagacggctacgagttctttgccaagcggcagctggtgacacttttctcagctcccaactactgtggcgagtttgacaatgctggcgccatgatgagtgtggacgagaccctcatgtgctctttccagatcctcaagcccgccgacaagaacaaggggaagtacgggcagttcagtggcctgaaccctggaggccgacccatcaccccaccccgcaattccgccaaagccaagaaatagcccccgcacaccaccctgtgccccagatgatggattgattgtacagaaatcatgctgccatgctgggggggggtcaccccgacccctcaggcccacctgtcacggggaacatggagccttggtgtatttttcttttctttttttaatgaatcaatagcagcgtccagtcccccagggctgcttcctgcctgcacctgcggtgactgtgagcaggatcctggggccgaggctgcagctcagggcaacggcaggccaggtcgtgggtctccagccgtgcttggcctcagggctggcagccggatcctggggcaacccatctggtctcttgaataaaggtcaaagctggattctcgcc

SEQ ID NO: 21545 - protein, 151 aa, Homo sapiens; identical to SEQ ID NO: 21533

SEQ ID NO: 21546 - DNA, 1688 bp, Homo sapiens
cttcttgctgacgccgccagcgccgaccaccagcagctgttttccctccatgaggcagcgcgccgaccgccgaagcatggtctccaccagcggcgccgccaccgcctcgtcggccgccggccccagccgcggcgcggcccacagcccctccagcgcgccgcacgcctccagacacaggccgccgttcagctccagggccactgggcttctccagcagcgccagcactgtgtccaccactgcacccagctctgcccgcgggtgcagacgccatgcctgccgcccccgccagcgccagccactgagcttcacagctacctgcagcaaggaggggaaaggggcctcctggacaccaccccaggtactgcagggtggggcacttccgccacaggagccgtgcagggctcgcggcctggcaagaatgtacagctgacagagaacgagatccgcggtctgtgcctgaaatcccgggagatttttctgagccagcccattcttctggagctggaggcacccctcaagatctgcggtgacatacacggccagtactacgaccttctgcgactatttgagtatggcggtttccctcccgagagcaactacctctttctgggggactatgtggacaggggcaagcagtccttggagaccatctgcctgctgctggcctataagatcaagtaccccgagaacttcttcctgctccgtgggaaccacgagtgtgccagcatcaaccgcatctatggtttctacgatgagtgcaagagacgctacaacatcaaactgtggaaaaccttcactgactgcttcaactgcctgcccatcgcggccatagtggacgaaaagatcttctgctgccacggaggcctgtccccggacctgcagtctatggagcagattcggcggatcatgcggcccacagatgtgcctgaccagggcctgctgtgtgacctgctgtggtctgaccctgacaaggacgtgcagggctggggcgagaacgaccgtggcgtctcttttacctttggagccgaggtggtggccaagttcctccacaagcacgacttggacctcatctgccgagcacaccaggtggtagaagacggctacgagttctttgccaagcggcagctggtgacacttttctcagctcccaactactgtggcgagtttgacaatgctggcgccatgatgagtgtggacgagaccctcatgtgctctttccagatcctcaagcccgccgacaagaacaaggggaagtacgggcagttcagtggcctgaaccctggaggccgacccatcaccccaccccgcaattccgccaaagccaagaaatagcccccgcacaccaccctgtgccccagatgatggattgattgtacagaaatcatgctgccatgctgggggggggtcaccccgacccctcaggcccacctgtcacggggaacatggagccttggtgtatttttcttttctttttttaatgaatcaatagcagcgtccagtcccccagggctgcttcctgcctgcacctgcggtgactgtgagcaggatcctggggccgaggctgcagctcagggcaacggcaggccaggtcgtgggtctccagccgtgcttggcctcagggctggcagccggatcctggggcaacccatctggtctcttgaataaaggtcaaagctggattctcgcc

SEQ ID NO: 21547 - protein, 427 aa, Homo sapiens; identical to SEQ ID NO: 21535

SEQ ID NO: 21548 - DNA, 901 bp, Homo sapiens
ccgggggcggactggggcgggcggaaggagagccaggccggaaggaggctgccggagggcgggaggcaggagcgggccaggagctgctgggctggagcggcggcgccgccatgtccgacagcgagaagctcaacctggactcgatcatcgggcgcctgctggaagtgcagggctcgcggcctggcaagaatgtacagctgacagagaacgagatccgcggtctgtgcctgaaatcccgggagatttttctgagccagcccattcttctggagctggaggcacccctcaagatctgcggtgacatacacggccagtactacgaccttctgcgactatttgagtatggcggtttccctcccgagagcaactacctctttctgggggactatgtggacaggggcaagcagtccttggagaccatctgcctgctgctggcctataagatcaagtaccccgagaacttcttcctgctccgtgggaaccacgagtgtgccagcatcaaccgcatctatggtttctacgatgagtgcaagagacgctacaacatcaaactgtggaaaaccttcactgactgcttcaactgcctgcccatcgcggccatagtggacgaaaagatcttctgctgccacggaggcctgtccccggacctgcagtctatggagcagattcggcggatcatgcggcccacagatgtgcctgaccagggcctgctgtgtgacctgctgtggtctgaccctgacaaggacgtgcagggctggggcgagaacgaccgtggcgtctcttttacctttggagccgaggtggtggccaagttcctccacaagcacgacttggacctcatctgccgagcacaccaggtgggttttctcagctcccaactactgtggcgagtttgacaatg

SEQ ID NO: 21549 - protein, 261 aa, Homo sapiens
MSDSEKLNLDSIIGRLLEVQGSRPGKNVQLTENEIRGLCLKSREIFLSQPILLELEAPLKICGDIHGQYYDLLRLFEYGGFPPESNYLFLGDYVDRGKQSLETICLLLAYKIKYPENFFLLRGNHECASINRIYGFYDECKRRYNIKLWKTFTDCFNCLPIAAIVDEKIFCCHGGLSPDLQSMEQIRRIMRPTDVPDQGLLCDLLWSDPDKDVQGWGENDRGVSFTFGAEVVAKFLHKHDLDLICRAHQVGFLSSQLLWRV

SEQ ID NO: 21550 - DNA, 702 bp, Homo sapiens
gagagccaggccggaaggaggctgccggagggcgggaggcaggagcgggccaggagctgctgggctggagcggcggcgccgccatgtccgacagcgagaagctcaacctggactcgatcatcgggcgcctgctggaaggtgacatacacggccagtactacgaccttctgcgactatttgagtatggcggtttccctcccgagagcaactacctctttctgggggactatgtggacaggggcaagcagtccttggagaccatctgcctgctgctggcctataagatcaagtaccccgagaacttcttcctgctccgtgggaaccacgagtgtgccagcatcaaccgcatctatggtttctacgatgagtgcaagagacgctacaacatcaaactgtggaaaaccttcactgactgcttcaactgcctgcccatcgcggccatagtggacgaaaagatcttctgctgccacggaggcctgtccccggacctgcagtctatggagcagattcggcggatcatgcggcccacagatgtgcctgaccagggcctgctgtgtgacctgctgtggtctgaccctgacaaggacgtgcagggctggggcgagaacgaccgtggcgtctcttttacctttggagccgaggtggtggccaagttcctccacaagcacgacttggacctcatctgccgagcacaccaggtgg

SEQ ID NO: 21551 - protein, 205 aa, Homo sapiens
MSDSEKLNLDSIIGRLLEGDIHGQYYDLLRLFEYGGFPPESNYLFLGDYVDRGKQSLETICLLLAYKIKYPENFFLLRGNHECASINRIYGFYDECKRRYNIKLWKTFTDCFNCLPIAAIVDEKIFCCHGGLSPDLQSMEQIRRIMRPTDVPDQGLLCDLLWSDPDKDVQGWGENDRGVSFTFGAEVVAKFLHKHDLDLICRAHQ

SEQ ID NO: 21552 - DNA, 1542 bp, Homo sapiens
ggaggaggaggaagtgagaggaggaggtgaggtgctgcgggaggccccgggcaccatggcccaggccctgggggaggacctggtgcagcctcccgagctgcaggatgactccagctccttggggtccgactcagagctcagcgggcctggcccatatcgccaggccgaccgctatggattcattgggggcagctcagcagagccagggccgggccacccacctgcagacctcatccgccaacgggagatgaagtgggtggagatgacctcgcactgggagaaaaccatgtcccggcggtacaagaaggtaaagatgcagtgccggaaaggcatcccgtctgccctgcgcgcccgatgctggcccctgttgtgtggggcccatgtgtgccagaagaacagccctggcacctatcaggagctggcagaggcccctggagacccacagtggatggagaccattggcagggacctgcaccgtcaattccctctgcacgagatgtttgtgtcgcctcagggccacgggcagcaggggctcctgcaggtgctcaaggcctacaccctgtatcgaccggagcagggctactgccaggcccaggggcccgtggctgctgtgctgctcatgcacctgcccccagaggaggccttctggtgcctggtgcagatctgtgaggtctacctccctgggtactacgggccccacatggtgccagagtactgttccgtgtggggctgacactggtgcgcctggcgctgggcactgcagagcagcgaggggcctgccctggcctcctggagacactgggagcccttcgagccatcccccccgcgcagctgcaggaggaggccttcatgtcacaggtgcacagcgtggtgctgtcagagcgggacctgcagcgggagatcaaggcccagctggcccagctgcccgattccgcgccgggacccccgccccggccacaggtccgcctcgccggggcccaagccatctttgaggcccagcagctggcaggagtgcgacgaggcgccaagcctgaggtgcctcggattgtggtgcagcccccggaggagcccagaccaccgcggcggaaaccccagacccgcggcaagactttccatgggctcctgactcgggcccggggcccccccatcgaggggccccccaggccccaacgaggctccacctccttcctggacacccgcttctgagaggaccatggacttagtgtcccccagtctcaattgcctgatggctgatgccggcccggcaaataggcaccgcactttactcttgggactcggggacttggcttccttcctggcaaggaccaggcagtggggaaggaggaggtcctccgtggtacatactgggtcaggcactagcatggaggagggtcacagagtggggcacgtgaggacccatggaaccgtcctggtgcccaggccctcacaagtaccaaagccagcaccaaaggagtcagggaaggggttggctgagtcaagggaccccagagggcaccaggaataaaatcttcttgaacagat

SEQ ID NO: 21553 - protein, 225 aa, Homo sapiens
MAQALGEDLVQPPELQDDSSSLGSDSELSGPGPYRQADRYGFIGGSSAEPGPGHPPADLIRQREMKWVEMTSHWEKTMSRRYKKVKMQCRKGIPSALRARCWPLLCGAHVCQKNSPGTYQELAEAPGDPQWMETIGRDLHRQFPLHEMFVSPQGHGQQGLLQVLKAYTLYRPEQGYCQAQGPVAAVLLMHLPPEEAFWCLVQICEVYLPGYYGPHMVPEYCSVWG

SEQ ID NO: 21554 - DNA, 1803 bp, Homo sapiens
gaggaggaggaagtgagaggaggaggtgaggtgctgcgggagccaggccccaggctggccgggagtggcccctcacactggttctccccactttctctgcctgtggcatcgaaggccccgggcaccatggcccaggccctgggggaggacctggtgcagcctcccgagctgcaggatgactccagctccttggggtccgactcagagctcagcgggcctggcccatatcgccaggccgaccgctatggattcattgggggcagctcagcagagccagggccgggccacccacctgcagacctcatccgccaacgggagatgaagtgggtggagatgacctcgcactgggagaaaaccatgtcccggcggtacaagaaggtaaagatgcagtgccggaaaggcatcccgtctgccctgcgcgcccgatgctggcccctgttgtgtggggcccatgtgtgccagaagaacagccctggcacctatcaggagctggcagaggcccctggagacccacagtggatggagaccattggcagggacctgcaccgtcaattccctctgcacgagatgtttgtgtcgcctcagggccacgggcagcaggggctcctgcaggtgctcaaggcctacaccctgtatcgaccggagcagggctactgccaggcccaggggcccgtggctgctgtgctgctcatgcacctgcccccagaggaggccttctggtgcctggtgcagatctgtgaggtctacctccctgggtactacgggccccacatggaggctgtgcggctggacgccgaggtgttcatggccctgctgcggcggctgcttccgcacgtgcacaagcacctgcagcaggtgggcgtcggacccctgctgtacctgcccgagtggttcctgtgcctcttcgcccgctccctgcccttccccacagtgctgcgtgtctgggatgccttcctcagtgagggtgccagagtactgttccgtgtggggctgacactggtgcgcctggcgctgggcactgcagagcagcgaggggcctgccctggcctcctggagacactgggagcccttcgagccatcccccccgcgcagctgcaggaggaggccttcatgtcacaggtgcacagcgtggtgctgtcagagcgggacctgcagcgggagatcaaggcccagctggcccagctgcccgattccgcgccgggacccccgccccggccacaggtccgcctcgccggggcccaagccatctttgaggcccagcagctggcaggagtgcgacgaggcgccaagcctgaggtgcctcggattgtggtgcagcccccggaggagcccagaccaccgcggcggaaaccccagacccgcggcaagactttccatgggctcctgactcgggcccggggcccccccatcgaggggccccccaggccccaacgaggctccacctccttcctggacacccgcttctgagaggaccatggacttagtgtcccccagtctcaattgcctgatggctgatgccggcccggcaaataggcaccgcactttactcttgggactcggggacttggcttccttcctggcaaggaccaggcagtggggaaggaggaggtcctccgtggtacatactgggtcaggcactagcatggaggagggtcacagagtggggcacgtgaggacccatggaaccgtcctggtgcccaggccctcacaagtaccaaagccagcaccaaaggagtcagggaaggggttggctgagtcaagggaccccagagggcaccaggaataaaatcttcttgaacagat

SEQ ID NO: 21555 - protein, 446 aa, Homo sapiens; identical to SEQ ID NO: 2775

SEQ ID NO: 21556 - DNA, 778 bp, Homo sapiens
gaagtgagaggaggaggtgaggtgctgcgggaggccccgggcaccatggcccaggccctgggggaggacctggtgcagcctcccgagctgcaggatgactccagctccttggggtccgactcagagctcagcgggcctggcccatatcgccaggccgaccgctatggattcattgggggcagctcagcagagccagggccgggccacccacctgcagacctcatccgccaacgggagatgaagtgggtggagatgacctcgcactgggagaaaaccatgtcccggcggtacaagaaggtaaagatgcagtgccggaaaggcatcccgtctgccctgcgcgcccgatgctggcccctgttgtgtggggcccatgtgtgccagaagaacagccctggcacctatcaggagctggcagaggcccctggagacccacagtggatggagaccattggcagggacctgcaccgtcaattccctctgcacgagatgtttgtgtcgcctcagggccacgggcagcaggggctcctgcaggtgctcaaggcctacaccctgtatcgaccggagcagggctactgccaggcccaggggcccgtggctgctgtgctgctcatgcacctgcccccagaggaggccttctggtgcctggtgcagatctgtgaggtctacctccctgggtactacgggccccacatggtgagaggctgacatgggggctggaggaaggaggggcaggggcccggtgagtgggtgggggtctggggactgagggaggttgagc

SEQ ID NO: 21557 - protein, 219 aa, Homo sapiens
MAQALGEDLVQPPELQDDSSSLGSDSELSGPGPYRQADRYGFIGGSSAEPGPGHPPADLIRQREMKWVEMTSHWEKTMSRRYKKVKMQCRKGIPSALRARCWPLLCGAHVCQKNSPGTYQELAEAPGDPQWMETIGRDLHRQFPLHEMFVSPQGHGQQGLLQVLKAYTLYRPEQGYCQAQGPVAAVLLMHLPPEEAFWCLVQICEVYLPGYYGPHMVRG

SEQ ID NO: 21558 - DNA, 1722 bp, Homo sapiens
gaagtgagaggaggaggtgaggtgctgcgggaggccccgggcaccatggcccaggccctgggggaggacctggtgcagcctcccgagctgcaggatgactccagctccttggggtccgactcagagctcagcgggcctggcccatatcgccaggccgaccgctatggattcattgggggcagctcagcagagccagggccgggccacccacctgcagacctcatccgccaacgggagatgaagtgggtggagatgacctcgcactgggagaaaaccatgtcccggcggtacaagaaggtaaagatgcagtgccggaaaggcatcccgtctgccctgcgcgcccgatgctggcccctgttgtgtggggcccatgtgtgccagaagaacagccctggcacctatcaggagctggcagaggcccctggagacccacagtggatggagaccattggcagggacctgcaccgtcaattccctctgcacgagatgtttgtgtcgcctcagggccacgggcagcaggggctcctgcaggtgctcaaggcctacaccctgtatcgaccggagcagggctactgccaggcccaggggcccgtggctgctgtgctgctcatgcacctgcccccagaggaggccttctggtgcctggtgcagatctgtgaggtctacctccctgggtactacgggccccacatggaggctgtgcggctggacgccgaggtgttcatggccctgctgcggcggctgcttccgcacgtgcacaagcacctgcagcaggtgggcgtcggacccctgctgtacctgcccgagtggttcctgtgcctcttcgcccgctccctgcccttccccacagtgctgcgtgtctgggatgccttcctcagtgagggtgccagagtactgttccgtgtggggctgacactggtgcgcctggcgctgggcactgcagagcagcgaggggcctgccctggcctcctggagacactgggagcccttcgagccatcccccccgcgcagctgcaggaggaggccttcatgtcacaggtgcacagcgtggtgctgtcagagcgggacctgcagcgggagatcaaggcccagctggcccagctgcccgattccgcgccgggacccccgccccggccacaggtccgcctcgccggggcccaagccatctttgaggcccagcagctggcaggagtgcgacgaggcgccaagcctgaggtgcctcggattgtggtgcagcccccggaggagcccagaccaccgcggcggaaaccccagacccgcggcaagactttccatgggctcctgactcgggcccggggcccccccatcgaggggccccccaggccccaacgaggctccacctccttcctggacacccgcttctgagaggaccatggacttagtgtcccccagtctcaattgcctgatggctgatgccggcccggcaaataggcaccgcactttactcttgggactcggggacttggcttccttcctggcaaggaccaggcagtggggaaggaggaggtcctccgtggtacatactgggtcaggcactagcatggaggagggtcacagagtggggcacgtgaggacccatggaaccgtcctggtgcccaggccctcacaagtaccaaagccagcaccaaaggagtcagggaaggggttggctgagtcaagggaccccagagggcaccaggaataaaatcttcttgaacagat

SEQ ID NO: 21559 - protein, 446 aa, Homo sapiens; identical to SEQ ID NO: 2775

SEQ ID NO: 21560 - DNA, 4482 bp, Homo sapiens
ttggcaaaatgtacccaccctgtgtcccagcacctccggcctttgctccctgccacccaaagtgggcccctgcctgctgatgagctgtgcctggggcctgccagcaggagctatggaggctgcctagtggagcccttggcctcacccacaggtaaagatgcagtgccggaaaggcatcccgtctgccctgcgcgcccgatgctggcccctgttgtgtggggcccatgtgtgccagaagaacagccctggcacctatcaggagctggcagaggcccctggagacccacagtggatggagaccattggcagggacctgcaccgtcaattccctctgcacgagatgtttgtgtcgcctcagggccacgggtacgaggccggtgatgcccagggacccccagccccacaagccccaggtgctccagcccactttccctagcccagctctacagtcttgcatctcaggggacccaggaaggcccagggaggctgaggcctgggcagaggcccccagagggtggagaagggggtgcctgcaggactggccccttatggggtcttccggcacaggcagcaggggctcctgcaggtgctcaaggcctacaccctgtatcgaccggagcagggctactgccaggcccaggggcccgtggctgctgtgctgctcatgcacctgcccccagaggtgagtgaccttgaccctgctctgggaaccctagtgacctaggcccagggaaccccatccccaggaactgtggcctcagaaacctgcaatccttgattcctggaccctgtcctagtgacccaggtcctcatgactgccagcctcagtgaccttcaagcctaatgaccttgactccaggaacctgggacccttgaccccagccttgaccccagtcatctaggaatctggatgttatcaccttgaccccacgactcctgattctgaacttggggactgcgaccccaaccccaaagacccagaaacccaggacttgaactttgggacactcccaacccttggccagtgaaccccaaccctgtgaccttcaaatctaacaccatgagccctgtgatttccaacaccctaaacccctcagcagaccctgtcttgggcagaggagggggcttttgggaagggcttccaggaactgcgcaggttaggagtggccctgagtgcaggcccctgtggtgcccaggccctccccttcactcctttcccctgtcctgccttctcctccacggtcccttccttggtgagcacttacaggcctgtgccctgccccttccccaggaggccttctggtgcctggtgcagatctgtgaggtctacctccctgggtactacgggccccacatggtgagaggctgacatgggggctggaggaaggaggggcaggggcccggtgagtgggtgggggtctggggactgagggaggttgagcctgggctctgggggtggcggtgctggcctgctgatggacgtggccacaggaggctgtgcggctggacgccgaggtgttcatggccctgctgcggcggctgcttccgcacgtgcacaagcacctgcagcaggtgggcgtcggacccctgctgtacctgcccgagtggttcctgtgcctcttcgcccgctccctgcccttccccacagtgctgcgtgtctgggatgccttcctcagtgagggtgagtggggcagccagtggctggggcaggagccttggggtgtgggtggggaggtagctcaccagctccagggttccctttttgagcctcaaatcacaggactgggtgtgccgaaggtgatggcctggtgcctggcgctacatcacccatcacccatcacccaggcaccgcctggtgcagagctgggccagggaggcttccagaggaggcagatggggcaggagcagggtgatcacagcacatggaggcctgagcttctcagggacagtaggaggcgttcctccccagagcccgcaggcacctgctgggtgctcactggctccagacgtggatctgcagctgggaatcaagtgatcgagaccttcaattctggcgggggtggggatgggtggcgacagtaaccaaattcacaagatatttatagattgtcagaagtgtcatgaagaaaataaaacaagggatgtgacagggagtgtcaggggagtgcaggggcgatggctgcatttaagctccttctggctgctctgtgcaggaggaggactcacaggggtggctgtggaggcctggggccagagaggccactgtccccaggggccaggctacagtctacgaagcagggagggcttggagccatgaagccagagaggtggaggctgggggccaggccaagaacaggaggggagtcggagcagagccaagctggactccctgtgtctttgggactctgccttgatactgccatcggtaacccacctgcattctgttctatatgtgaggtctggaggttgcaccttaaaacgtggtagaaatcagtcagcatatgcatactgtgcatactgaatgcctgtcgtgtgctcagccggcttcctgccctccgcacagcggaggaccactggctgacttagagttctggccacaggtgtccaagtcgctatccatgcggtcaccttccaaccagccttagacctcgagagcagggctgggcagagctgggcagggcctgacctgcccacctgggggcaaacactacacaggctccctttatcagaaggacgatagtatgaatagtgattgttcctaccatcatcactcaacctcgctggtcccctggtggctcttctcagatcagaggctgccaggaaggaattttgaggctccaggactagcccaaactcacactgtggggagtgtgcactgagtgctatgctcctggcttagggaagagcagttctgcctaggatctttctagaatcagagggtcacagatccaagttggaaaggcccttaaagggctccacctgacctttcatcatggagatgagcaagctgaggcccagggagggcttggtgtgaaggcatcagtagccctgggctcctggcaggaagctggtggcttggaggggactggagccttggggtgtggacagggagctagctcaccagctccagggttcccttttggagcctcgagtcatgggaccaggtgtgctgaaggtgatggccctgtgcctggtggcacatcacctgtcacccggatgctgcctggggtaggagctgggtgatcatagcacatggaggcctgactggctcagggagggtaggaggtgctcctccccggagcccacaggcacctgctgggtgcttgctggctccagatatggatggcatctgagcatcaagtgatcaagaccttcattttggcgggggtggggatgggaggcgacagtaaccaaattcacaagatagtaactcttccccaaagcatctgtggctcttgaggctaacttggccagtacagcggcctgtgttacccgaaatgcaactccaccctctgtcattgttcctgaaccggggagggcagagctgcaggagagtgggaggcatatggctgagggcaggtttgggtgcagaactgtggaggggcagggccggcctcccagtgaataagcccccggcctgcaggtgccagagtactgttccgtgtggggctgacactggtgcgcctggcgctgggcactgcagagcagcgaggggcctgccctggcctcctggagacactgggagcccttcgagccatcccccccgcgcagctgcaggaggaggccttcatgtcacaggtgcacagcgtggtgctgtcagagcgggacctgcagcgggagatcaaggcccagctggcccagctgcccgattccgcgccgggacccccgccccggccacaggtccgcctcgccggggcccaagccatctttgaggcccagcagctggcaggagtgcgacgaggcgccaagcctgaggtgcctcggattgtggtgcagcccccggaggagcccagaccaccgcggcggaaaccccagacccgcggcaagactttccatgggctcctgactcgggcccggggcccccccatcgaggggccccccaggccccaacgaggctccacctccttcctggacacccgcttctgagaggaccatggacttagtgtcccccagtctcaattgcctgatggctgatgccggcccggcaaataggcaccgcactttactcttgggactcggggacttggcttccttcctggcaaggaccaggcagtggggaaggaggaggtcctccgtggtacatactgggtcaggcactagcatggaggagggtcacagagtggggcacgtgaggacccatggaaccgtcctggtgcccaggccctcacaagtaccaaagccagcaccaaaggagtcagggaaggggttggctgagtcaagggaccccagagggcaccaggaataaaatcttcttgaacagat

SEQ ID NO: 21561 - protein, 153 aa, Homo sapiens
MCARRTALAPIRSWQRPLETHSGWRPLAGTCTVNSLCTRCLCRLRATGTRPVMPRDPQPHKPQVLQPTFPSPALQSCISGDPGRPREAEAWAEAPRGWRRGCLQDWPLMGSSGTGSRGSCRCSRPTPCIDRSRATARPRGPWLLCCSCTCPQR

SEQ ID NO: 21562 - DNA, 533 bp, Homo sapiens
ggggagggcagagctgcaggagagtgggaggcatatggctgagggcaggtttgggtgcagaactgtggaggggcagggccggcctcccagtgaataagcccccggcctgcaggtgccagagtactgttccgtgtggggctgacactggtgcgcctggcgctgggcactgcagagcagcgaggggcctgccctggcctcctggagacactgggagcccttcgagccatcccccccgcgcagctgcaggaggaggccttcatgtcacaggtgcacagcgtggtgctgtcagagcgggacctgcagcgggagatcaaggaccaggcagtggggaaggaggaggtcctccgtggtacatactgggtcaggcactagcatggaggagggtcacagagtggggcacgtgaggacccatggaaccgtcctggtgcccaggccctcacaagtaccaaagccagcaccaaaggagtcagggaaggggttggctgagtcaagggaccccagagggcaccaggaataaaatcttcttgaacaga

SEQ ID NO: 21563 - protein, 37 aa, Homo sapiens
MSQVHSVVLSERDLQREIKDQAVGKEEVLRGTYWVRH

SEQ ID NO: 21564 - DNA, 767 bp, Homo sapiens
agcggcgccgcttgggccgggcgctgtgccactgccaccgccgccgccgctgcatcccgcccggtccgagtccgcccgccacgcccgccgagccgctgccgccgccagctctccctggatccatcgggtcccgagtgggattgcccactgggctccaaggacctggaggaagagggcccctggggagggggctctggcctgccgcccacaggctgcttccctggctcctggcgccaggacgtgggcctggactgcaagggatcccccgagggggccgaggcccgggcttggactgtctactactacagcctcctgcagagctgtctgcagcaagctggccttccggagactcaggaccgcggccaggtgccccgcacaggctgtcctggggcggaggtgaccttgtgcgttctgggctcccccagcacctttctgcctgtgctgctggagggtggggtccagagcccgggaaacatgctcctttgcctgtcccctgcttggctgatgaaggtgccagcacccgggcagccgggtgaggcagccctgctagtctccaaggctgtgagcttccaccctgggggcctgacattcctggatgactttgtccccccgcgccgtgccacctactttttggcaggcctgggcctggggcctggccggggccgagaggcagcagaactcgcccgtgacctgacctgccccacaggagcttcggctgagctggcccggctgctggaggaccggctgctgacaaggcagttgctggc

SEQ ID NO: 21565 - protein, 96 aa, Homo sapiens
MLLCLSPAWLMKVPAPGQPGEAALLVSKAVSFHPGGLTFLDDFVPPRRATYFLAGLGLGPGRGREAAELARDLTCPTGASAELARLLEDRLLTRQL

SEQ ID NO: 21566 - DNA, 5067 bp, Homo sapiens
cgagatggtgagtcttctgtggtccctcccccacaaggcccaagtccctgggcagagagtgggcccagaggacagcaggcagcacctaggacctaagcctgggagttgccccctgcagacagcttagacccacgaccagctcccccacccccaccctgcggctgcatcctgggaggtgggcactcttagtgccctgtgacattcattcattccatggcccctcagggagctcaccttctaggagacggcacagaggctctggccctggcaaactgggattcgagcccaggcatgaggcccagtcctctgccgtctgggccacagcacaccatctcccaacaaccaagagattctcttcgtcccagcctcatcagcccccaggggatgggagagggcaggcaccaggcaacaaggtccaaagagacctcacgacttgctcaaggtggccgagcctgtcccctggaggacagactcagctgccaggcctgtccaggcctggggactgcaaagaacaagaattccattcacacgaagcctcccagcagccccatattgggggggcgccagcctcagagaggggagggacgttaggtttcatccaaagaaagcatttccgtgactcaaaatatctgcaggggggatactgtctagcctcctaatgtttagcccagggctgggcacacagtagggcttcaagacctacgtggggatgacagtggaatcacatttaggtgtcagcacactccatgccgggtcatgagacagaaataagccacctcagagtgatggctgggttcgttcattcatctactcttcagtcaacaaacacttactgagaagtggctgtgtgccaggcacgctttaggtgctggggttgcctccatgaacaaaacaagcagaaaactctgctgctgtgaagcaagctaaggcggagcccagcatggcaggggcgggaggggctggctggcaagacattgcttcctgccctccccccaggggcaccacacagaacagtttacaaagcactcccacggttgcgttcccattaacaagccttcgcccccaacacaagcctttcctctcctagtccccgggacggtgtcagccctgaacatagcccaggctgggagagtggggggcttacacccttgggtgacttaatgtgcccactggcccaccctgcccaagacctaccacttctgccctctcagctctccctggatccatcgggtcccgagtgggattgcccactgggctccaaggacctggaggaagagggcccctggggagggggctctggcctgccgcccacaggctgcttccctggctcctggcgccaggacgtgggcctggactgcaagggatcccccgagggggccgaggcccgggcttggactgtctactactacagcctcctgcagagctgtctgcagcaagctggccttccggagactcaggaccgcggccaggtgccccgcacaggctgtcctggggcggaggtgaccttgtgcgttctgggctcccccagcacctttctgcctgtgctgctggagggtggggtccagagcccgggaaacatgctcctttgcctgtcccctgcttggctgatgaaggtgccagcacccgggcagccgggtgaggcagccctgctagtctccaaggctgtgagcttccaccctgggggcctgacattcctggatgactttgtccccccgcgccgtgccacctactttttggcaggcctgggcctggggcctggccggggccgagaggcagcagaactcgcccgtgacctgacctgccccacaggagcttcggctgagctggcccggctgctggaggaccggctgctgacaaggcagttgctggcccagcagggtggtgtggctgtgccagcaaccctggctttcacctacaagccgccggggctgctgcggggaggggatgccagcctagggctacggctggtggagctgagtggcaaagagggccaggagacgctggtgaaagaggaagtggaggcttttctgcgctccgaggccctgggtgatatcctgcaggtagctgtgaagctcagtggctggcgctggcgggggcggcaggcatggcgtctgcacccgcgggcagagctgggtgcagtggtggacacagtgctggcgctgctggagaagctggaggaggaggagagtgtcctggtggaggctgtgtacccacctgcccagctgccctgctcagatggtccttcacccggccccggcctggccgtgcgaatctgtgctgtggtgtgtcggacacagggtgataggccactgctgagcaaggtggtgtgcggcgtgggccgcggggaccgccctctacggcaccacaactccctgccgaggacgctggaggtggcgctggcccagtgcggcctgggcgaggaggcgcaggtggcggctgtgcggcagcgcgtcaaggcggcggccgaggccgcgctggccgccgtgctggctctggaggccggcctgagtgccgagcagcgcggcgggcgccgggcgcacacggacttcctgggcgtggatttcgcgctgacagcggccggcggcgtgctgaccccagtggccctggagctgaacggcggcctgtgtctggaggcgtgcggcgcgctggaggggctgtgggccgcgccgcggctggggccggcggccgacgaggcggtggcggcgccgctggtggagaccatgcttcggcggtcggcgcgctgcctcatggagggaaaacagctgctggtggtcggcgctggcggcgtcagcaagaagttcgtgtgggaggcggcgcgcgactacgggctccagctgcacctcgtggagtcagaccccaaccactttgcatcccagttggtacagaccttcatccactttgacatgacagagcaccggagggatgaggagaacgcacggctgctggcagagttggtgcgggctcgcggcctcaagctagatggctgcttctcctactgggatgactgcctggtgctcacagccctgctctgccaggagctaggtctgccctgcagctccccagctgccatgcgcctggctaagcagaagagcctcacccagctgcacctgttgcaccaccatggcccaccctggcctgcgccctccctccatgctgtgccctgctgcccactggagagtgaggctgatgtggagagggccgtgcaccaggtacccctgccaggtgtcatgaagctggagttcggggcaggtgcagtgggtgtccggctggtagaggatgcgccacagtgccatgagcacttttcccggattacccgagacttgcagggcgaggccgaccacccaggcattgggctgggctggggcaatgccatgctgctgatggagtttgtggagggcaccgagcacgacgtggacctggtgttgtttggtgggcggttgctggctgcctttgtctccgacaatggccctacgaggctgcctggcttcactgagacggcggcctgcatgcccaccgggctggcaccagagcaggaggcacagatggttcaggcagccttccgctgttgcctgggctgcgggttgctcgatggagtcttcaacgtggagctcaagctgaccggggctgggcctcggcttatcgagatcaacccccgcatgggtggcttctacctgcgtgattggatcctggagctctatggtgttgacctgctgctggctgctgttatggtggcctgtggcttgcgtcctgccctgcccacccgcccacgtgctcgtggccatctggtgggcgtcatgtgccttgtgtcccagcacctgcaggccctgagttccaccgccagccgtgagaccctgcaggccctgcacgaccgtggactgctacgcctcaatctgctggaggaggccctggtgcctggcgagtatgaggagccctactgcagtgtggcctgtgccggacccagccccaccgaggcccgtctccgcctgctgggcctctgccagggcctgggcatcgatgggcccagctaccctgttgcccacttcctgtctcacttcaaatagcactggggtcagggggcagggaagcagtgctgggtggaggcactgtggtgccctctgctccctggagctcttcctgcttctctccccatcaccatgccccagccccagcctggcccgctgcaatgcctaggtctgttccagagcagcagggcaatttagacaccaaggcatcctggactcaagggcctcttgccctcccgaaggccccagtccagcctacagcttccccagcattctagccttggagaaatgacaatggccacacacacacacacacacacacacacacacctctgacgccagctccccaggtgggagtgggcccaaacccagcccctcctgtccacctctccaggtctcactctcttcctgccatctacaagaggagaggacctggctgggccccaagccttggacaaatcctgggaaaacctgagactagaacccttgtcttcctcttacccaaattctaggatagctctgaagcctgctggaaacttggtggcatccaacctgcctcattcggcctgaccggtagaggcaggtggcctgtggacagaagtaatcctctttctgctcaccccaggcagacacaactgcctatgttcccccgatgagaggaaacaggctgagagaagaaaaatgactgctccaggattataccacagtggagagcgggtcacaggacatgatgcagggtccaggtttctgttttgatcaagtcttacatgcccattcagcttctaggcccccctcacctccctgccctcattcacaagtggccctgagacacgtgaacacctccctcctatgcatcacaaaccttctccaccgagctttggtgctttggcctctggcacacctaactagcattggcagaggagagtctacactctcttcctcattcagggaagatgctttaagaaatcctgcctctgtgcagcagaggagctggaggcagctccccaggcatccctccccaaataaaggcttatgtactggtgaa

SEQ ID NO: 21567 - protein, 966 aa, Homo sapiens; identical to SEQ ID NO: 2777

SEQ ID NO: 21568 - DNA, 832 bp, Homo sapiens
ggagagatgatgtttaggtccgggactgtcagtcagtgcgcggccaggtacgggccgacgggcccgcggggccggcgccgccatggcggccgtgtttgatttggatttggagacggaggaaggcagcgagggcgagggcgagccagagctcagccccgcggacgcatgtccccttgccgagttgagggcagctggcctagagcctgtgggacactatgaagaggtggagctgactgagaccagcgtgaacgttggcccagagcgcatcgggccccactgctttgagctgctgcgtgtgctgggcaaggggggctatggcaaggtgttccaggtgcgaaaggtgcaaggcaccaacttgggcaaaatatatgccatgaaagtcctaaggaaggccaaaattgtgcgcaatgccaaggacacagcacacacacgggctgagcggaacattctagagtcagtgaagcacccctttattgtggaactggcctatgccttccagactggtggcaaactctacctcatccttgagtgcctcagtggtggcgagctcttcacgcatctggagcgagagggcatcttcctggaagatacggcctgcttctacctggctgagatcacgctggccctgggccatctccactcccagggcatcatctaccgggacctcaagcccgagaacatcatgctcagcagccagggccacatcaaactgaccgactttggactctgcaaggagtctatccatgagggcgccgtcactcacaccttctgcggcaccattgagtacatccgcccttcaccgcagagaaccggaagaaaaccatggataaga

SEQ ID NO: 21569 - protein, 249 aa, Homo sapiens
MAAVFDLDLETEEGSEGEGEPELSPADACPLAELRAAGLEPVGHYEEVELTETSVNVGPERIGPHCFELLRVLGKGGYGKVFQVRKVQGTNLGKIYAMKVLRKAKIVRNAKDTAHTRAERNILESVKHPFIVELAYAFQTGGKLYLILECLSGGELFTHLEREGIFLEDTACFYLAEITLALGHLHSQGIIYRDLKPENIMLSSQGHIKLTDFGLCKESIHEGAVTHTFCGTIEYIRPSPQRTGRKPWI

SEQ ID NO: 21570 - DNA, 1028 bp, Homo sapiens
ggagagatgatgtttaggtccgggactgtcagtcagtgcgcggccaggtacgggccgacgggcccgcggggccggcgccgccatggcggccgtgtttgatttggatttggagacggaggaaggcagcgagggcgagggcgagccagagctcagccccgcggacgcatgtccccttgccgagttgagggcagctggcctagagcctgtgggacactatgaagaggtggagctgactgagaccagcgtgaacgttggcccagagcgcatcgggccccactgctttgagctgctgcgtgtgctgggcaaggggggctatggcaaggtgttccaggtgcgaaaggtgcaaggcaccaacttgggcaaaatatatgccatgaaagtcctaaggaaggccaaaattgtgcgcaatgccaaggacacagcacacacacgggctgagcggaacattctagagtcagtgaagcacccctttattgtggaactggcctatgccttccagactggtggcaaactctacctcatccttgagtgcctcagtggtggcgagctcttcacgcatctggagcgagagggcatcttcctggaagatacggcctgcttctacctggctgagatcacgctggccctgggccatctccactcccagggcatcatctaccgggacctcaagcccgagaacatcatgctcagcagccagggccacatcaaactgaccgactttggactctgcaaggagtctatccatgagggcgccgtcactcacaccttctgcggcaccattgagtacatggcccctgagattctggtgcgcagtggccacaaccgggctgtggactggtggagcctgggggccctgatccgcccttcaccgcagagaaccggaagaaaaccatggataagatcatcaggggcaagctggcactgcccccctacctcaccccagatgcccgggaccttgtcaaaaaggtgcagctcctgaaaggagcccagcggattgggggtggcccaggggatgctgctgatgtgca

SEQ ID NO: 21571 - protein, 298 aa, Homo sapiens
MAAVFDLDLETEEGSEGEGEPELSPADACPLAELRAAGLEPVGHYEEVELTETSVNVGPERIGPHCFELLRVLGKGGYGKVFQVRKVQGTNLGKIYAMKVLRKAKIVRNAKDTAHTRAERNILESVKHPFIVELAYAFQTGGKLYLILECLSGGELFTHLEREGIFLEDTACFYLAEITLALGHLHSQGIIYRDLKPENIMLSSQGHIKLTDFGLCKESIHEGAVTHTFCGTIEYMAPEILVRSGHNRAVDWWSLGALIRPSPQRTGRKPWIRSSGASWHCPPTSPQMPGTLSKRCSS

SEQ ID NO: 21572 - DNA, 1748 bp, Homo sapiens
ggagagatgatgtttaggtccgggactgtcagtcagtgcgcggccaggtacgggccgacgggcccgcggggccggcgccgccatggcggccgtgtttgatttggatttggagacggaggaaggcagcgagggcgagggcgagccagagctcagccccgcggacgcatgtccccttgccgagttgagggcagctggcctagagcctgtgggacactatgaagaggtggagctgactgagaccagcgtgaacgttggcccagagcgcatcgggccccactgctttgagctgctgcgtgtgctgggcaaggggggctatggcaaggtgttccaggtgcgaaaggtgcaaggcaccaacttgggcaaaatatatgccatgaaagtcctaaggaaggccaaaattgtgcgcaatgccaaggacacagcacacacacgggctgagcggaacattctagagtcagtgaagcacccctttattgtggaactggcctatgccttccagactggtggcaaactctacctcatccttgagtgcctcagtggtggcgagctcttcacgcatctggagcgagagggcatcttcctggaagatacggcctgcttctacctggctgagatcacgctggccctgggccatctccactcccagggcatcatctaccgggacctcaagcccgagaacatcatgctcagcagccagggccacatcaaactgaccgactttggactctgcaaggagtctatccatgagggcgccgtcactcacaccttctgcggcaccattgagtacatggcccctgagattctggtgcgcagtggccacaaccgggctgtggactggtggagcctgggggccctgatccgcccttcaccgcagagaaccggaagaaaaccatggataagatcatcaggggcaagctggcactgcccccctacctcaccccagatgcccgggaccttgtcaaaaagtttctgaaacggaatcccagccagcggattgggggtggcccaggggatgctgctgatgtgcagagacatccctttttccggcacatgaattgggacgaccttctggcctggcgtgtggacccccctttcaggccctgtctgcagtcagaggaggacgtgagccagtttgatacccgcttcacacggcagacgccggtggacagtcctgatgacacagccctcagcgagagtgccaaccaggccttcctgggcttcacatacgtggcgccgtctgtcctggacagcatcaaggagggcttctccttccagcccaagctgcgctcacccaggcgcctcaacagtagcccccgggcccccgtcagccccctcaagttctccccttttgaggggtttcggcccagccccagcctgccggagcccacggagctacctctacctccactcctgccaccgccgccgccctcgaccaccgcccctctccccatccgtcccccctcagggaccaagaagtccaagaggggccgtgggcgtccagggcgctaggaagccgggtgggggtgagggtagcccttgagccctgtccctgcggctgtgagagcagcaggaccctgggccagttccagagacctgggggtgtgtctgggggtggggtgtgagtgcgtatgaaagtgtgtgtctgctggggcagctgtgcccctgaatcatgggcacggagggccgcccgccacgccccgcgctcaactgctcccgtggaagattaaagggctgaatcatggtgctga

SEQ ID NO: 21573 - protein, 296 aa, Homo sapiens; identical to SEQ ID NO: 2781

SEQ ID NO: 21574 - DNA, 900 bp, Homo sapiens
gtttaggtccgggactgtcagtcagtgcgcggccaggtacgggccgacgggcccgcggggccggcgccgccatggcggccgtgtttgatttggatttggagacggaggaaggcagcgagggcgagggcgagccagagctcagccccgcggacgcatgtccccttgccgagttgagggcagctggcctagagcctgtgggacactatgaagaggtggagctgactgagaccagcgtgaacgttggcccagagcgcatcgggccccactgctttgagctgctgcgtgtgctgggcaaggggggctatggcaaggtgttccaggtgcgaaaggtgcaaggcaccaacttgggcaaaatatatgccatgaaagtcctaaggaaggccaaaattgtgcgcaatgccaaggacacagcacacacacgggctgagcggaacattctagagtcagtgaagcacccctttattgtggaactggcctatgccttccagactggtggcaaactctacctcatccttgagtgcctcagtggtatgagtgcgggcccaggcaggggtgctgggggtcgcgggggggcagcgagccagcaaaggaagctctggggggaagctcttgagagatgagtctgtgggggttggctagggggcccccactctgtcctacccatccatccatccatccgtgcatccgtcccatcattcattcattcagcaaacgtctgtccagcacctactgtgtccctcacgtgtgttgggggtggatgggcatggtgcgaatttggatagaagtccagaggatggttgagtctcttcctactcccctccctgtcttgttcttctctcccgtgtgccctgcatcctgtcaggtccccagcccaactggttcattctctgtagtgtcctc

SEQ ID NO: 21575 - protein, 182 aa, Homo sapiens
MAAVFDLDLETEEGSEGEGEPELSPADACPLAELRAAGLEPVGHYEEVELTETSVNVGPERIGPHCFELLRVLGKGGYGKVFQVRKVQGTNLGKIYAMKVLRKAKIVRNAKDTAHTRAERNILESVKHPFIVELAYAFQTGGKLYLILECLSGMSAGPGRGAGGRGGAASQQRKLWGEALER

SEQ ID NO: 21576 - DNA, 987 bp, Homo sapiens
gtttaggtccgggactgtcagtcagtgcgcggccaggtacgggccgacgggcccgcggggccggcgccgccatggcggccgtgtttgatttggatttggagacggaggaaggcagcgagggcgagggcgagccagagctcagccccgcggacgcatgtccccttgccgagttgagggcagctggcctagagcctgtgggacactatgaagaggtggagctgactgagaccagcgtgaacgttggcccagagcgcatcgggccccactgctttgagctgctgcgtgtgctgggcaaggggggctatggcaaggtgttccaggtgcgaaaggtgcaaggcaccaacttgggcaaaatatatgccatgaaagtcctaaggaaggccaaaattgtgcgcaatgccaaggacacagcacacacacgggctgagcggaacattctagagtcagtgaagcacccctttattgtggaactggcctatgccttccagactggtggcaaactctacctcatccttgagtgcctcagtgactgagcgtcctgagggcagtggctgggtctcttcatcctgtccccagcttcacccagcacagggccaggcaccgagtaggcgtcggtagatgtttgctgaattgaattgaatccccacggcagctctgtgaggcaggtggcgagctcttcacgcatctggagcgagagggcatcttcctggaagatacggcctgcttctacctggctgagatcacgctggccctgggccatctccactcccagggcatcatctaccgggacctcaagcccgagaacatcatgctcagcagccagggccacatcaaactgaccgactttggactctgcaaggagtctatccatgagggcgccgtcactcacaccttctgcggcaccattgagtacatggcccctgagattctggtgcgcagtggccacaaccgggctgtggactggtggagcctgggggccctgatgta

SEQ ID NO: 21577 - protein, 153 aa, Homo sapiens
MAAVFDLDLETEEGSEGEGEPELSPADACPLAELRAAGLEPVGHYEEVELTETSVNVGPERIGPHCFELLRVLGKGGYGKVFQVRKVQGTNLGKIYAMKVLRKAKIVRNAKDTAHTRAERNILESVKHPFIVELAYAFQTGGKLYLILECLSD

SEQ ID NO: 21578 - DNA, 576 bp, Homo sapiens
tcagaggaggacgtgagccagtttgatacccgcttcacacggcagacgccggtggacagtcctgatgacacagccctcagcgagagtgccaaccaggccttcctggtgagtgcgggggcctgaggcctgtgggaccagggcacggatcgtgactaaggatggcaggcactgagtgtcgcatggccctgcctccgccccccagggcttcacatacgtggcgccgtctgtcctggacagcatcaaggagggcttctccttccagcccaagctgcgctcacccaggcgcctcaacagtagcccccgggcccccgtcaggtactgagggacgtgggggtgtgtggctgggttagggacgctggcaggcaggatgccagctccagccttgggtgccttggccacgtctgtcggccagtgttggcttcggttgctgttgtctgggggtggggtgtgagtgcgtatgaaagtgtgtgtctgctggggcagctgtgcccctgaatcatgggcacggagggccgcccgccacgccccgcgctcaactgctcccgtggaagattaaagggctgaatcatggtgctg

SEQ ID NO: 21579 - protein, 63 aa, Homo sapiens
MAGTECRMALPPPPRASHTWRRLSWTASRRASPSSPSCAHPGASTVAPGPPSGTEGRGGVWLG

SEQ ID NO: 21580 - DNA, 919 bp, Homo sapiens
gcactgagctcacttctcgctcgacacagccagagctggaggtgggtgcccggcacggaggggcctgcggaccaatggctctgccctgcaccttagggctcgggatgctgctggccctgccaggggccttgggctcgggtggcagcgcggaggacagcgtgggctccagctctgtcaccgttgtcctgctgctgctgctgctcctactgctggccactggcctagcactggcctggcgccgcctcagccgtgactcagggggctactaccacccggcccgcctaggtgccgcgctgtggggccgcacgcggcgcctgctctgggccagccccccaggtcgctggctgcaggcccgagctgagctggggtccacagacaatgaccttgagcgacaggaggatgagcaggacacagactatgaccacgtcgcggatggtggcctgcaggctgaccctggggaaggcgagcagcaatgtggagaggcgtccagcccagagcaggtccccgtgcgggctgaggaagccagagacagtgacacggagggcgacctggtcctcggctccccaggaccagcgagcgcagggggcagtgctgaggccctgctgagtgacctgcacgcctttgctggcagcgcagcctgggatgacagcgccagggcagctgggggccagggcctccatgtcaccgcactgtagaggccggtcttggtgtcccatccctgtcacagccgctcactccccgtgcctctgcttcccaagatgccatggctggactggacccccagcccacatgaccatgcctcagactgtcaccccctaccagttcccaagtccatgtgtaccccgctcaccacgggaacggccccccccaaccacaggcatcaggcaaccatttgaaataaaactccttcagcctgtgg

SEQ ID NO: 21581 - protein, 206 aa, Homo sapiens; identical to SEQ ID NO: 2785

SEQ ID NO: 21582 - DNA, 754 bp, Homo sapiens
cacagccagagctggaggtgggtgcccggcacggaggggcctgcggaccaatggctctgccctgcaccttagggctcgggatgctgctggccctgccaggggccttgggctcgggtggcagcgcggaggacagcgtgggctccagctctgtcaccgttgtcctgctgctgctgctgctcctactgctggccactggcctagcactggcctggcgccgcctcagccgtgactcagggggctactaccacccggcccgcctaggtgccgcgctgtggggccgcacgcggcgcctgctctgggccagccccccaggtcgctggctgcaggcccgagctgagctggggtccacagacaatgaccttgagcgacaggaggatgagcaggacacagactatgaccacgtcgcggatggtggcctgcaggctgaccctggggaaggcgagcagcaatgtggagaggcgtccagcccagagcaggtccccgtgcgggctgaggaagccagagacaggcctccatgtcaccgcactgtagaggccggtcttggtgtcccatccctgtcacagccgctcactccccgtgcctctgcttcccaagatgccatggctggactggacccccagcccacatgaccatgcctcagactgtcaccccctaccagttcccaagtccatgtgtaccccgctcaccacgggaacggccccccccaaccacaggcatcaggcaaccatttgaaataaaactccttcagcctgtg

SEQ ID NO: 21583 - protein, 192 aa, Homo sapiens
MALPCTLGLGMLLALPGALGSGGSAEDSVGSSSVTVVLLLLLLLLLATGLALAWRRLSRDSGGYYHPARLGAALWGRTRRLLWASPPGRWLQARAELGSTDNDLERQEDEQDTDYDHVADGGLQADPGEGEQQCGEASSPEQVPVRAEEARDRPPCHRTVEAGLGVPSLSQPLTPRASASQDAMAGLDPQPT

SEQ ID NO: 21584 - DNA, 760 bp, Homo sapiens
acttctcgctcgacacagccagagctggaggtgggtgcccggcacggaggggcctgcggaccaatggctctgccctgcaccttagggctcgggatgctgctggccctgccaggggccttgggctcgggtggcagcgcggaggacagcgtgggctccagctctgtcaccgttgtcctgctgctgctgctgctcctactgctggccactggcctagcactggcctggcgccgcctcagccgtgactcagggggctactaccacccggcccgcctaggtgccgcgctgtggggccgcacgcggcgcctgctctgggccagccccccaggtcgctggctgcaggcccgagctgagctggggtccacagacaatgaccttgagcgacaggaggatgagcaggacacagactatgaccacgtcgcggatggtggcctgcaggctgaccctggggaaggcgagcagcaatgtggagaggcgtccacctgggatgacagcgccagggcagctgggggccagggcctccatgtcaccgcactgtagaggccggtcttggtgtcccatccctgtcacagccgctcactccccgtgcctctgcttcccaagatgccatggctggactggacccccagcccacatgaccatgcctcagactgtcaccccctaccagttcccaagtccatgtgtaccccgctcaccacgggaacggccccccccaaccacaggcatcaggcaaccatttgaaataaaactccttcagcctgtg

SEQ ID NO: 21585 - protein, 157 aa, Homo sapiens
MALPCTLGLGMLLALPGALGSGGSAEDSVGSSSVTVVLLLLLLLLLATGLALAWRRLSRDSGGYYHPARLGAALWGRTRRLLWASPPGRWLQARAELGSTDNDLERQEDEQDTDYDHVADGGLQADPGEGEQQCGEASTWDDSARAAGGQGLHVTAL

SEQ ID NO: 21586 - DNA, 775 bp, Homo sapiens
agtcggacctcttccaggatgatctgtaccccgacacagccgggcccgaggcagccctggaggctgaggagtgggtgagcgggcgggatgccgacccgatcctcatctcactgcgggaggcctacgtgcccagcaagcagcgggacctgaagatcagccggcgcaacgtgttgtctgacagccggcccgccatggccccgggctcctcccacctaggggcccccgcctccaccaccactgctgctgatgccacccccagcggcagcctggccagagccggggtatgcacgcgcaggcaggggtggtgctgggagccccaggaggctgggaagctggaggaggtgatgcaggagctgcgggccctgagggcgctggtcaaggagcagggcgaccgcatctgccgcctggaggagcagctgggccgcatggagaacggggatgcgtagggccacagccacacgccaccttcatctcctccgccgcccccttcccactcagcttctgccagcgggtcgcaccgggctagctggctgcccagagcctctgaggcagcgcaggggtcagttcccacccccacccgtcccaggcccaggccgaagccagcgcccagctttcctcactgttcctgtggaggatgtctacgcccaggcgagctcctcgacctctgagggaccatctccccgaccactgcccagccctctgctccctccccagaggaggcgggagggtgggctctatattttcattccaaataaaattctctttctaaaagcca

SEQ ID NO: 21587 - protein, 84 aa, Homo sapiens
MAPGSSHLGAPASTTTAADATPSGSLARAGVCTRRQGWCWEPQEAGKLEEVMQELRALRALVKEQGDRICRLEEQLGRMENGDA

SEQ ID NO: 21588 - DNA, 1050 bp, Homo sapiens
agggaggcccggcgggccatgagaactgtcacgaggcagcccgtgtgggggtctagccaccttaggggtcggcctgcggaggtcctggggttctacaaactgcatgagcgcaagtgtgagcccatcgtcatgactgtgccaagaaagtcggacctcttccaggatgatctgtaccccgacacagccgggcccgaggcagccctggaggctgaggagtgggtgagcgggcgggatgccgacccgatcctcatctcactgcgggaggcctacgtgcccagcaagcagcgggacctgaagatcagccggcgcaacgtgttgtctgacagccggcccgccatggccccgggctcctcccacctaggggcccccgcctccaccaccactgctgctgatgccacccccagcggcagcctggccagagccggggtatgcacgcgcaggcaggggtggtgctgggagccccaggtgtggccctggcctgctgtgtgggcttcagccattcgctgtccctctctggggtagtggtgggtttgggagggctatggcttagcagcccctgaccaccgccccctacccctgcttcatgtccccacaggaggctgggaagctggaggaggtgatgcaggagctgcgggccctgagggcgctggtcaaggagcagggcgaccgcatctgccgcctggaggagcagctgggccgcatggagaacggggatgcgtagggccacagccacacgccaccttcatctcctccgccgcccccttcccactcagcttctgccagcgggtcgcaccgggctagctggctgcccagagcctctgaggcagcgcaggggtcagttcccacccccacccgtcccaggcccaggccgaagccagcgcccagctttcctcactgttcctgtggaggatgtctacgcccaggcgagctcctcgacctctgagggaccatctccccgaccactgcccagccctctgctccctccccagaggaggcgggagggtgggctctatattttcattccaaataaaattctctttctaaaagcca

SEQ ID NO: 21589 - protein, 167 aa, Homo sapiens
MRTVTRQPVWGSSHLRGRPAEVLGFYKLHERKCEPIVMTVPRKSDLFQDDLYPDTAGPEAALEAEEWVSGRDADPILISLREAYVPSKQRDLKISRRNVLSDSRPAMAPGSSHLGAPASTTTAADATPSGSLARAGVCTRRQGWCWEPQVWPWPAVWASAIRCPSLG

SEQ ID NO: 21590 - DNA, 1395 bp, Homo sapiens
ggccccagccctctctgcttctgcatagtgacctccagggcaccttgagcaggggctggtgccgctggcaccccagctccccacagtgaggtatgtttcagcacttgcttagtggcctgggcatagtcttaaggcctggaggaggctggaaaagagggaccctgggaataaagtgaagccaggagggccaggtgggggtcgtcatgtgggaaaaggcatagagatggcagagggcccacctgcatttaggggcagtgctggctggccttagtgaggccagctaaggcccgtcctggtttgggattagggggtgaggaggttctgcttggcctgactgcctgcaatgtgccaggaaaacctcgaggaacccatggccctgcaggaactggactcgagcaacggggccctgctgcccttctacgaccccgacaccagtgtggtctacgtctgcggcaagggtgactccagcatccggtactttgagatcacagaggagcctccctacatccacttcctgaacacgttcaccagcaaggagccgcagcggggtatgggcagcatgcccaagcggggcctggaggtcagcaagtgcgagatcgcccggttctacaaactgcatgagcgcaagtgtgagcccatcgtcatgactgtgccaagaaagtcggacctcttccaggatgatctgtaccccgacacagccgggcccgaggcagccctggaggctgaggagtgggtgagcgggcgggatgccgacccgatcctcatctcactgcgggaggcctacgtgcccagcaagcagcgggacctgaagatcagccggcgcaacgtgttgtctgacagccggcccgccatggccccgggctcctcccacctaggggcccccgcctccaccaccactgctgctgatgccacccccagcggcagcctggccagagccggggaggctgggaagctggaggaggtgatgcaggagctgcgggccctgagggcgctggtcaaggagcagggcgaccgcatctgccgcctggaggagcagctgggccgcatggagaacggggatgcgtagggccacagccacacgccaccttcatctcctccgccgcccccttcccactcagcttctgccagcgggtcgcaccgggctagctggctgcccagagcctctgaggcagcgcaggggtcagttcccacccccacccgtcccaggcccaggccgaagccagcgcccagctttcctcactgttcctgtggaggatgtctacgcccaggcgagctcctcgacctctgagggaccatctccccgaccactgcccagccctctgctccctccccagaggaggcgggagggtgggctctatattttcattccaaataaaattctctttctaaaagcca

SEQ ID NO: 21591 - protein, 240 aa, Homo sapiens
MCQENLEEPMALQELDSSNGALLPFYDPDTSVVYVCGKGDSSIRYFEITEEPPYIHFLNTFTSKEPQRGMGSMPKRGLEVSKCEIARFYKLHERKCEPIVMTVPRKSDLFQDDLYPDTAGPEAALEAEEWVSGRDADPILISLREAYVPSKQRDLKISRRNVLSDSRPAMAPGSSHLGAPASTTTAADATPSGSLARAGEAGKLEEVMQELRALRALVKEQGDRICRLEEQLGRMENGDA

SEQ ID NO: 21592 - DNA, 2210 bp, Homo sapiens
taagcctgtagtcccagctactggggtgaatttcttgaacctgggagggcggaggttgcagtgggccgagatcgcgccactgcactccagcctgggtgacaaaaactccgtctcaaaaaaaaaaaaaaaaaaaaaaaaagagcattaactttgataacttaaaaagagtcacgtgaacatatccactgtccgtgtagattctacatttatttgttgggggcggtaatggggccccttggaggtgtgcgttccgtcgggggccgggaaggcggggcctcacccaatcctggagactcctgcggatgccattatgaggagcaagaacgcgaaggggcctcgggtccgctaggccgggatccggagccgcccgaagccggtgccgcagccccctgcgcccccggtgcccccgacatgtccttccgcaaagtggtccggcagagcaaattccggcatgtgttcgggcagccggtcaagaacgaccagtgctatgaggacattcgcgtgtcccgtgttacctgggacagcaccttctgcgccgtcaaccccaagttcctggcggtgattgtggaggccagtggagggggtgcctttctggtgctccccctaagcaagacgggccgcattgacaaggcctacccgacggtgtgtgggcacacgggacctgtcctggacatcgactggtgtcctcacaacgacgaagtcatagccagcggctcggaggactgcacggtcatggtgtggcagatcccagagaacgggctgacctccccgctgacagagccggtggtggtactggaggggcacaccaagcgagtgggcatcatcgcctggcaccccacggcccgaaacgtgctgctcagtgcaggctgcgacaacgtggtactcatctggaatgtgggcacagcggaggagctgtaccgcctggacagcctgcaccctgacctcatctacaatgtcagctggaaccacaatggcagcctgttttgctcagcatgcaaggacaagagcgtgcgcatcatcgacccccgtcggggcaccctggtggcagagcgggagaaggctcatgagggggcccggcccatgcgggccatcttcctggcagatggcaaggtgttcaccacaggcttcagccgaatgagcgagcggcagctggcgctctgggacccagaaaacctcgaggaacccatggccctgcaggaactggactcgagcaacggggccctgctgcccttctacgaccccgacaccagtgtggtctacgtctgcggcaagggtgactccagcatccggtactttgagatcacagaggagcctccctacatccacttcctgaacacgttcaccagcaaggagccgcagcggggtatgggcagcatgcccaagcggggcctggaggtcagcaagtgcgagatcgcccggttctacaaactgcatgagcgcaagtgtgagcccatcgtcatgactgtgccaagaaagtcggacctcttccaggatgatctgtaccccgacacagccgggcccgaggcagccctggaggctgaggagtgggtgagcgggcgggatgccgacccgatcctcatctcactgcgggaggcctacgtgcccagcaagcagcgggacctgaagatcagccggcgcaacgtgttgtctgacagccggcccgccatggccccgggctcctcccacctaggggcccccgcctccaccaccactgctgctgatgccacccccagcggcagcctggccagagccggggaggctgggaagctggaggaggtgatgcaggagctgcgggccctgagggcgctggtcaaggagcagggcgaccgcatctgccgcctggaggagcagctgggccgcatggagaacggggatgcgtagggccacagccacacgccaccttcatctcctccgccgcccccttcccactcagcttctgccagcgggtcgcaccgggctagctggctgcccagagcctctgaggcagcgcaggggtcagttcccacccccacccgtcccaggcccaggccgaagccagcgcccagctttcctcactgttcctgtggaggatgtctacgcccaggcgagctcctcgacctctgagggaccatctccccgaccactgcccagccctctgctccctccccagaggaggcgggagggtgggctctatattttcattccaaataaaattctctttctaaaagcca

SEQ ID NO: 21593 - protein, 551 aa, Homo sapiens
MGPLGGVRSVGGREGGASPNPGDSCGCHYEEQEREGASGPLGRDPEPPEAGAAAPCAPGAPDMSFRKVVRQSKFRHVFGQPVKNDQCYEDIRVSRVTWDSTFCAVNPKFLAVIVEASGGGAFLVLPLSKTGRIDKAYPTVCGHTGPVLDIDWCPHNDEVIASGSEDCTVMVWQIPENGLTSPLTEPVVVLEGHTKRVGIIAWHPTARNVLLSAGCDNVVLIWNVGTAEELYRLDSLHPDLIYNVSWNHNGSLFCSACKDKSVRIIDPRRGTLVAEREKAHEGARPMRAIFLADGKVFTTGFSRMSERQLALWDPENLEEPMALQELDSSNGALLPFYDPDTSVVYVCGKGDSSIRYFEITEEPPYIHFLNTFTSKEPQRGMGSMPKRGLEVSKCEIARFYKLHERKCEPIVMTVPRKSDLFQDDLYPDTAGPEAALEAEEWVSGRDADPILISLREAYVPSKQRDLKISRRNVLSDSRPAMAPGSSHLGAPASTTTAADATPSGSLARAGEAGKLEEVMQELRALRALVKEQGDRICRLEEQLGRMENGDA

SEQ ID NO: 21594 - DNA, 936 bp, Homo sapiens
acttcctgaatcctgcttcctgcttcccagaggccgggatccggagccgcccgaagccggtgccgcagccccctgcgcccccggtgcccccgacatgtccttccgcaaagtggtccggcagagcaaattccggcatgtgttcgggcagccggtcaagaacgaccagtgctatgaggacattcgcgtgtcccgtgttacctgggacagcaccttctgcgccgtcaaccccaagttcctggcggtgattgtggaggccagtggagggggtgcctttctggtgctccccctaagcaagacgggccgcattgacaaggcctacccgacggtgtgtgggcacacgggacctgtcctggacatcgactggtgtcctcacaacgacgaagtcatagccagcggctcggaggactgcacggtcatggtgtggcagatcccagagaacgggctgacctccccgctgacagagccggtggtggtactggaggggcacaccaagcgagtgggcatcatcgcctggcaccccacggcccgaaacgtgctgctcagtgcaggctgcgacaacgtggtactcatctggaatgtgggcacagcggaggagctgtaccgcctggacagcctgcaccctgacctcatctacaatgtcagctggaaccacaatggcagcctgttttgctcagcatgcaaggacaagagcgtgcgcatcatcgacccccgtcggggcaccctggtggcagagcgggagaaggctcatgagggggcccggcccatgcgggccatcttcctggcagatggcaaggtgttcaccacaggcttcagccgaatgagcgagcggcagctggcgctctgggacccagtgagtggccagcctgagggggcaaacttgagacttgggccccaccctgggccaggcaggcagggttcaccctggggaggcctgtg

SEQ ID NO: 21595 - protein, 279 aa, Homo sapiens
MSFRKVVRQSKFRHVFGQPVKNDQCYEDIRVSRVTWDSTFCAVNPKFLAVIVEASGGGAFLVLPLSKTGRIDKAYPTVCGHTGPVLDIDWCPHNDEVIASGSEDCTVMVWQIPENGLTSPLTEPVVVLEGHTKRVGIIAWHPTARNVLLSAGCDNVVLIWNVGTAEELYRLDSLHPDLIYNVSWNHNGSLFCSACKDKSVRIIDPRRGTLVAEREKAHEGARPMRAIFLADGKVFTTGFSRMSERQLALWDPVSGQPEGANLRLGPHPGPGRQGSPWGG

SEQ ID NO: 21596 - DNA, 2023 bp, Homo sapiens
ggattctacatggcagaagattaagtctgtctggacagtgtctcatgcctgtaatctcaacatttcaggaggccaaggtaggaggatcacttgagctcacgagttcaagaccagcctgggcaacacagtgagaccttgtttctactaaaaatttaaaaagtagtgggtgcacacctgtagtcccagctactagggaggctgagatgggagggtcgctggaacccaggaggtggaagctgcagggactgtgccactgcactcatcctgggcaatagagcaaggccctgtctctcaaaaaaaaaaaaagaaaagaaaagaaaagtctgggttgagccctggcacctcccttcctaccttcactgattctctgaaccttcctgtcctcgcctgtaaagtagattgtatgaggactccatgaggtcatccacttcaagtccttggcataggataattactcaaaaggtgatgacaatggcgcagggagggatggtgacttgcctggagatgcacagcaccgtctctcccatactcggtcattcacaccatcattgattcaccaggcacccactccgtgtccagcaggactctggggaccccaaatggacactaccatggaagctgacctgggtgccactggccacaggccccgcacagagcttgatgatgaggactcctacccccaaggtggctgggacacggtcttcctggtggccctgctgctccttgggctgccagccaatgggttgatggcgtggctggccggctcccaggcccggcatggagctggcacgcgtctggcgctgctcctgctcagcctggccctctctgacttcttgttcctggcagcagcggccttccagatcctagagatccggcatgggggacactggccgctggggacagctgcctgccgcttctactacttcctatggggcgtgtcctactcctccggcctcttcctgctggccgccctcagcctcgaccgctgcctgctggcgctgtgcccacactggtaccctgggcaccgcccagtccgcctgcccctctgggtctgcgccggtgtctgggtgctggccacactcttcagcgtgccctggctggtcttccccgaggctgccgtctggtggtacgacctggtcatctgcctggacttctgggacagcgaggagctgtcgctgaggatgctggaggtcctggggggcttcctgcctttcctcctgctgctcgtctgccacgtgctcacccaggccacagcctgtcgcacctgccaccgccaacagcagcccgcagcctgccggggcttcgcccgtgtggccaggaccattctgtcagcctatgtggtcctgaggctgccctaccagctggcccagctgctctacctggccttcctgtgggacgtctactctggctacctgctctgggaggccctggtctactccgactacctgatcctactcaacagctgcctcagccccttcctctgcctcatggccagtgccgacctccggaccctgctgcgctccgtgctctcgtccttcgcggcagctctctgcgaggagcggccgggcagcttcacgcccactgagccacagacccagctagattctgagggtccaactctgccagagccgatggcagaggcccagtcacagatggatcctgtggcccagcctcaggtgaaccccacactccagccacgatcggatcccacagctcagccacagctgaaccctacggcccagccacagtcggatcccacagcccagccacagctgaacctcatggcccagccacagtcagattctgtggcccagccacaggcagacactaacgtccagacccctgcacctgctgccagttctgtgcccagtccctgtgatgaagcttccccaaccccatcctcgcatcctaccccaggggcccttgaggacccagccacacctcctgcctctgaaggagaaagccccagcagcaccccgccagaggcggccccgggcgcaggccccacgtgagggtccaggaa

SEQ ID NO: 21597 - protein, 470 aa, Homo sapiens; identical to SEQ ID NO: 2791

SEQ ID NO: 21598 - DNA, 1387 bp, Homo sapiens
aggcagctgtccccagcggccagtgtcccccatgccggatctctaggatctggaaggccgctgctgccaggaacaagaagtcagagagggccaggctgagcaggagcagcgccagacgcgtgccagctccatgccgggcctgggagccggccagccacgccatcaacccattggctggcagcccaaggagcagcagggccaccaggaagaccgtgtcccagccaccttggggtcccaccgacatcgtcctgactccctgcacgacgctgctcagaggacatacgggcccctgctcaatcgagtcttcgggaaggccaacatgagcaggggatgaaggaggaaggatgacagagccgtggctggccctggggacatcctggactctccccctgcaggaccgcgaactgggccccgaggagctagacgagcttcaggccgccttcgaggagtttgacactgaccgtgacggctacatcagccaccgggagctgggtgactgcatgcggaccctgggctacatgcccaccgagatggagctcctggaggtctcgcagcacatcaagatgcgcatgggcggccgtgtggactttgaggagtttgtagaactgataggcccaaagctgagggaggagacggcgcacatgctgggggtgcgagagctgcgcatcgccttccgagagtttgacagggacagggatggacgaattacggtggcggagctgcgggaggcggtaccggctctgctcggggagccgctggcgggtcctgagctggacgagatgctccgagaagtggacctcaatggggatggcaccgtagactttgacgagtttgtgatgatgctctcccgccactgaggctccaggagggaatatctgttgcccctgcggccccagacaccagccagacccaggctgcaggcctcccccaggagcctccaggatggagatggagacccagcagcccccagactacttctatccctgaaaacacctggcctcaatgttggcttgttatgttacctgcccaccctcatccttacctcctcctactcaagctgcctggagaagacctgctctcagctgcccaccgttcctcagtgtgagcaagatttgggtctctccagacctctgggaggtagggagttccctggcactggcagcattcagtggggaccccccagtggcatgatgaatggagaggatggctggaccccttccactacttatgtttataattttttttttttttaatgaacttgagccgggtgcagtggctcacacctgtaagcccagctgtcagggggcagaagcgggaggatagcttgagcccaggagtgcaagacctgcctgggcaatatactgagaccccattctccacaaaaagg

SEQ ID NO: 21599 - protein, 170 aa, Homo sapiens
MTEPWLALGTSWTLPLQDRELGPEELDELQAAFEEFDTDRDGYISHRELGDCMRTLGYMPTEMELLEVSQHIKMRMGGRVDFEEFVELIGPKLREETAHMLGVRELRIAFREFDRDRDGRITVAELREAVPALLGEPLAGPELDEMLREVDLNGDGTVDFDEFVMMLSRH

SEQ ID NO: 21600 - DNA, 819 bp, Homo sapiens
gatctctaggatctggaaggccgctgctgccaggaacaagaagtcagagagggccaggctgagcaggagcagcgccagacgcgtgccagctccatgccgggcctgggagccggccagccacgccatcaacccattggctggcagcccaaggagcagcagggccaccaggaagaccgtgtcccagccaccttggggagtcctgctggacacggagtgggtgcctggtgaatcaatgatggtgtgaatgaccgagtatgggagagacggtgctgtgcatctccaggcaagtcaccatccctccctgcgccattgtcatcaccttttgagtaattatcctatgccaaggacttgaagtggatgacctcatggagtcctcatacaatctactttacaggcgaggacaggaaggttcagagaatcagtgaaggtaggaagggaggtgccagggctcaacccagacttttcttttcttttctttttttttttttgagagacagggccttgctctattgcccaggatgagtgcagtggcacagtccctgcagcttccacctcctgggttccagcgaccctcccatctcagcctccctagtagctgggactacaggtgtgcacccactactttttaaatttttagtagaaacaaggtctcactgtgttgcccaggctggtcttgaactcgtgagctcaagtgatcctcctaccttggcctcctgaaatgttgagattacaggcatgagacactgtccagacagacttaatcttctgccatgtagaatcccaatgggtccggatagactaacccggaggctttcaaac

SEQ ID NO: 21601 - protein, 44 aa, Homo sapiens
MPGLGAGQPRHQPIGWQPKEQQGHQEDRVPATLGSPAGHGVGAW

SEQ ID NO: 21602 - DNA, 1435 bp, Homo sapiens
cataagcagctttatgggtcctgaaagccaagggtgcccaggggtgtggtgtctctgagccctgttatccctcccccatgaccacagagcaggcaagggggcagcagggcccaaatctggccattggccgtcagaagccccctgcgggggttgtgactcccaagagtgatgcagaggagcccccgttgaccaggaagaggagcaagaaggagagggggctccgagggtctcgaaagcgcactggcagctctggggagcagacaggccccgaggccccggggagcagcaataaccctcccagcactggagaggggccggcgggcgcaccccctgcatcccctgggccggcctcttctcgccagtcccaccgacatcgtcctgactccctgcacgacgctgctcagaggacatacgggcccctgctcaatcgagtcttcgggaaggaccgcgaactgggccccgaggagctagacgagcttcaggccgccttcgaggagtttgacactgaccgtgacggctacatcagccaccgggagctgggtgactgcatgcggaccctgggctacatgcccaccgagatggagctcctggaggtctcgcagcacatcaagatgcgcatgggcggccgtgtggactttgaggagtttgtagaactgataggcccaaagctgagggaggagacggcgcacatgctgggggtgcgagagctgcgcatcgccttccgagagtttgacagggacagggatggacgaattacggtggcggagctgcgggaggcggtaccggctctgctcggggagccgctggcgggtcctgagctggacgagatgctccgagaagtggacctcaatggggatggcaccgtagactttgacgagtttgtgatgatgctctcccgccactgaggctccaggagggaatatctgttgcccctgcggccccagacaccagccagacccaggctgcaggcctcccccaggagcctccaggatggagatggagacccagcagcccccagactacttctatccctgaaaacacctggcctcaatgttggcttgttatgttacctgcccaccctcatccttacctcctcctactcaagctgcctggagaagacctgctctcagctgcccaccgttcctcagtgtgagcaagatttgggtctctccagacctctgggaggtagggagttccctggcactggcagcattcagtggggaccccccagtggcatgatgaatggagaggatggctggaccccttccactacttatgtttataattttttttttttttaatgaacttgagccgggtgcagtggctcacacctgtaagcccagctgtcagggggcagaagcgggaggatagcttgagcccaggagtgcaagacctgcctgggcaatatactgagaccccattctccacaaaaagg

SEQ ID NO: 21603 - protein, 275 aa, Homo sapiens; identical to SEQ ID NO: 2793

SEQ ID NO: 21604 - DNA, 467 bp, Homo sapiens
gtagaattaggaacgtagcccagggctcttcccatgacactgtcggggagggagaaggaaaccggcactgagctggtctcccctaccggccaaccaagaggctggctgagtgagcaagggttgggaggccctgttggtgcaccatgcccagctaatctttgtatttttagtagagacagggtttcactatgttggccaggctggtctccaacccctgagccacctcgcccgacttcattctacagtcttaacagaaagcaatttcagaagtggtgattcccatcattagaagtctgcgttaggaatcagcaaggtatagtccacagagtggtttttatattttgtaatggttggagaaaagtcaaagaataataagattttatgacataaaattatataaaattcaaatttccatgtcaataaatgaagttttactgttatttattaaaatttctgatatagccaca

SEQ ID NO: 21605 - protein, 80 aa, Homo sapiens
MTLSGREKETGTELVSPTGQPRGWLSEQGLGGPVGAPCPANLCIFSRDRVSLCWPGWSPTPEPPRPTSFYSLNRKQFQKW

SEQ ID NO: 21606 - DNA, 871 bp, Homo sapiens
gcagcacccagcgctcctacaacacctgctgcagctggacccaacaccctttgatccagaagaaccgccgagtggtgctggcctccttcctgctcctgctgctggggctgggtgagtggccctgagggttggggtcaagaggggccccgtgggaggctctgccctccttttgtacaggctctgcctcccccttgacactgagcctcccagcatcctgaggaggcagctggctgccatcatcacactcccattttacagggcctgctcagtgccttgctctggaaacagagcttggtgagcttcctggggagggtctctgcctagggcaccttcagctcaggtggtgggtgagccgggctgggggtgggagcccccgccctcaccactgctcctgcccccacccccgcggctccgtctgtgtgcagtgctgatcctggtcggcgtgggactggaggcgaccccctctccaggtgtctccagcgccatcttcttcgtgccgggcttcctgttgttggtgcctggagtctatcacgtgatcttcatctactgcgcggtcaagggccaccggggcttccagttcttctacctgccctacttcgagaagtgatcgcggcgcagcgtggaccccttgcgcccatgggggcgcccctcttgccctgttccgttcccctcatctcaagggaagaggccctccaggaccctcgaaaccccagcccctagggagtttgctcaggaagttcggggcatgcaggcctggccctgggaaagccgcccgtcgcctgctctgtgccttaacttattctcgggccgtgcggctgctaggttgctgttattttgtgctaataaaagagtaattaattccaccagaggc

SEQ ID NO: 21607 - protein, 41 aa, Homo sapiens
MQAWPWESRPSPALCLNLFSGRAAARLLLFCANKRVINSTR

SEQ ID NO: 21608 - DNA, 1078 bp, Homo sapiens
gacgctgggtgtgtgggcgcagatggcggcggcgcacggcgcctgagcgggccggggccatgagcgccgcccggccccagttcagcattgatgatgccttcgagctgtccctggaggacgggggccctgggcccgagtccagcggggtcgcgcgctttgggccgctgcacttcgagcgtcgggcccggttcgaggtggctgacgaggacaagcagtcccggctgcgctaccagaacctggagaacgatgaggatggagcccaggcctctccggagccggatgggggagtcggcaccagggattccagccgaacttccatccgcagctcccagtggtccttcagcaccatcagcagcagcacccagcgctcctacaacacctgctgcagctggacccaacaccctttgatccagaagaaccgccgagtggtgctggcctccttcctgctcctgctgctggggctggggcctgctcagtgccttgctctggaaacagagcttggtgagcttcctggggagggtctctgcctagggcaccttcagctcaggtggtgggtgagccgggctgggggtgggagcccccgccctcaccactgctcctgcccccacccccgcggctccgtctgtgtgcagtgctgatcctggtcggcgtgggactggaggcgaccccctctccaggtgtctccagcgccatcttcttcgtgccgggcttcctgttgttggtgcctggagtctatcacgtgatcttcatctactgcgcggtcaagggccaccggggcttccagttcttctacctgccctacttcgagaagtgatcgcggcgcagcgtggaccccttgcgcccatgggggcgcccctcttgccctgttccgttcccctcatctcaagggaagaggccctccaggaccctcgaaaccccagcccctagggagtttgctcaggaagttcggggcatgcaggcctggccctgggaaagccgcccgtcgcctgctctgtgccttaacttattctcgggccgtgcggctgctaggttgctgttattttgtgctaataaaagagtaattaattccaccagaggc

SEQ ID NO: 21609 - protein, 192 aa, Homo sapiens
MSAARPQFSIDDAFELSLEDGGPGPESSGVARFGPLHFERRARFEVADEDKQSRLRYQNLENDEDGAQASPEPDGGVGTRDSSRTSIRSSQWSFSTISSSTQRSYNTCCSWTQHPLIQKNRRVVLASFLLLLLGLGPAQCLALETELGELPGEGLCLGHLQLRWWVSRAGGGSPRPHHCSCPHPRGSVCVQC

SEQ ID NO: 21610 - DNA, 615 bp, Homo sapiens
gtgtgcagtgctgatcctggtcggcgtgggactggaggcgaccccctctccaggtgagcgaccctcccgcccccacaggcagaggacacccctgtcttgtgtccacgggtccacggcaagccctcccacctcccggcagtacacggctccttttcagctgggagtgaggcttgcccgggcagtcagcggcagcccggaaggcctcgaagcctccgccccctcgccctgaccgggctctggtccctcccgcaggtgtctccagcgccatcttcttcgtgccgggcttcctgttgttggtgcctggagggccaccggggcttccagttcttctacctgccctacttcgagaagtgatcgcggcgcagcgtggaccccttgcgcccatgggggcgcccctcttgccctgttccgttcccctcatctcaagggaagaggccctccaggaccctcgaaaccccagcccctagggagtttgctcaggaagttcggggcatgcaggcctggccctgggaaagccgcccgtcgcctgctctgtgccttaacttattctcgggccgtgcggctgctaggttgctgttattttgtgctaataaaagagtaattaattccaccaga

SEQ ID NO: 21611 - protein, 40 aa, Homo sapiens
MQAWPWESRPSPALCLNLFSGRAAARLLLFCANKRVINST

SEQ ID NO: 21612 - DNA, 970 bp, Homo sapiens
gtctgggcaatgcacaaagcagtccatggtggccccccagtcccccaggcttactaccccccttgttgcagagcccaaagtccagctcctcattcccccatcactcttctaactggggacccaggactcctgcactgccctgttcttaccccctatatcccaatcacctgtactgttagctttcaggttcttattggttcctccactaaggacgggccatgagggcagggaccttatctgcccttcagggcggaattcccagtaccaggcacgcagtaggtgttccataaatgtttgctgaatgactaaaagcccaccccaaggaacaaagaaaaatctctcctttcacacacttcccagggcctgctcagtgccttgctctggaaacagagcttggtgagcttcctggggagggtctctgcctagggcaccttcagctcaggtggtgggtgagccgggctgggggtgggagcccccgccctcaccactgctcctgcccccacccccgcggctccgtctgtgtgcagtgctgatcctggtcggcgtgggactggaggcgaccccctctccaggtgtctccagcgccatcttcttcgtgccgggcttcctgttgttggtgcctggagtctatcacgtgatcttcatctactgcgcggtcaagggccaccggggcttccagttcttctacctgccctacttcgagaagtgatcgcggcgcagcgtggaccccttgcgcccatgggggcgcccctcttgccctgttccgttcccctcatctcaagggaagaggccctccaggaccctcgaaaccccagcccctagggagtttgctcaggaagttcggggcatgcaggcctggccctgggaaagccgcccgtcgcctgctctgtgccttaacttattctcgggccgtgcggctgctaggttgctgttattttgtgctaataaaagagtaattaattccaccaga

SEQ ID NO: 21613 - protein, 70 aa, Homo sapiens
MHKAVHGGPPVPQAYYPPCCRAQSPAPHSPITLLTGDPGLLHCPVLTPYIPITCTVSFQVLIGSSTKDGP

SEQ ID NO: 21614 - DNA, 779 bp, Homo sapiens
ggcggccaggcaaatggttgtgtaggcctgcttttctcttcccgggagggagtgaggaagggccccagcccagcaacccccctgagacctgtgttctgcaacagaacctggagaacgatgaggatggagcccaggcctctccggagccggatgggggagtcggcaccagggattccagccgaacttccatccgcagctcccagtggtccttcagcaccatcagcagcagcacccagcgctcctacaacacctgctgcagctggacccaacaccctttgatccagaagaaccgccgagtggtgctggcctccttcctgctcctgctgctggggctggtgctgatcctggtcggcgtgggactggaggcgaccccctctccaggtgtctccagcgccatcttcttcgtgccgggcttcctgttgttggtgcctggagtctatcacgtgatcttcatctactgcgcggtcaagggccaccggggcttccagttcttctacctgccctacttcgagaagtgatcgcggcgcagcgtggaccccttgcgcccatgggggcgcccctcttgccctgttccgttcccctcatctcaagggaagaggccctccaggaccctcgaaaccccagcccctagggagtttgctcaggaagttcggggcatgcaggcctggccctgggaaagccgcccgtcgcctgctctgtgccttaacttattctcgggccgtgcggctgctaggttgctgttattttgtgctaataaaagagtaattaattccaccaga

SEQ ID NO: 21615 - protein, 53 aa, Homo sapiens
MRMEPRPLRSRMGESAPGIPAELPSAAPSGPSAPSAAAPSAPTTPAAAGPNTL

SEQ ID NO: 21616 - DNA, 561 bp, Homo sapiens
gggcgcagatggcggcggcgcacggcgcctgagcgggccggggccatgagcgccgcccggccccagttcagcattgatgatgccttcgagctgtccctgctcctgctgctggggctggtgctgatcctggtcggcgtgggactggaggcgaccccctctccaggtgtctccagcgccatcttcttcgtgccgggcttcctgttgttggtgcctggagtctatcacgtgatcttcatctactgcgcggtcaagggccaccggggcttccagttcttctacctgccctacttcgagaagtgatcgcggcgcagcgtggaccccttgcgcccatgggggcgcccctcttgccctgttccgttcccctcatctcaagggaagaggccctccaggaccctcgaaaccccagcccctagggagtttgctcaggaagttcggggcatgcaggcctggccctgggaaagccgcccgtcgcctgctctgtgccttaacttattctcgggccgtgcggctgctaggttgctgttattttgtgctaataaaagagtaattaattccaccaga

SEQ ID NO: 21617 - protein, 84 aa, Homo sapiens
MSAARPQFSIDDAFELSLLLLLGLVLILVGVGLEATPSPGVSSAIFFVPGFLLLVPGVYHVIFIYCAVKGHRGFQFFYLPYFEK

SEQ ID NO: 21618 - DNA, 810 bp, Homo sapiens
gggtgtgtgggcgcagatggcggcggcgcacggcgcctgagcgggccggggccatgagcgccgcccggccccagttcagcattgatgatgccttcgagctgtccctggaggacgggggccctgggcccgagtccagcggggtcgcgcgctttgggccgctgcacttcgagcgtcgggcccggttcgaggtggctgacgaggacaagcagtcccggctgcgctaccagctcccagtggtccttcagcaccatcagcagcagcacccagcgctcctacaacacctgctgcagctggacccaacaccctttgatccagaagaaccgccgagtggtgctggcctccttcctgctcctgctgctggggctggtgctgatcctggtcggcgtgggactggaggcgaccccctctccaggtgtctccagcgccatcttcttcgtgccgggcttcctgttgttggtgcctggagtctatcacgtgatcttcatctactgcgcggtcaagggccaccggggcttccagttcttctacctgccctacttcgagaagtgatcgcggcgcagcgtggaccccttgcgcccatgggggcgcccctcttgccctgttccgttcccctcatctcaagggaagaggccctccaggaccctcgaaaccccagcccctagggagtttgctcaggaagttcggggcatgcaggcctggccctgggaaagccgcccgtcgcctgctctgtgccttaacttattctcgggccgtgcggctgctaggttgctgttattttgtgctaataaaagagtaattaattccaccaga

SEQ ID NO: 21619 - protein, 202 aa, Homo sapiens
MSAARPQFSIDDAFELSLEDGGPGPESSGVARFGPLHFERRARFEVADEDKQSRLRYQLPVVLQHHQQQHPALLQHLLQLDPTPFDPEEPPSGAGLLPAPAAGAGADPGRRGTGGDPLSRCLQRHLLRAGLPVVGAWSLSRDLHLLRGQGPPGLPVLLPALLREVIAAQRGPLAPMGAPLLPCSVPLISREEALQDPRNPSP

SEQ ID NO: 21620 - DNA, 1040 bp, Homo sapiens
gacgctgggtgtgtgggcgcagatggcggcggcgcacggcgcctgagcgggccggggccatgagcgccgcccggccccagttcagcattgatgatgccttcgagctgtccctggaggacgggggccctgggcccgagtccagcggggtcgcgcgctttgggccgctgcacttcgagcgtcgggcccggttcgaggtggctgacgaggacaagcagtcccggctgcgctaccagaacctggagaacgatgaggatggagcccaggcctctccggagccggatgggggagtcggcaccagggattccagccgaacttccatccgcagctcccagtggtccttcagcaccatcagcagcagcacccagcgctcctacaacacctgctgcagctggacccaacaccctttgatccagaagaaccgccgagtggtgctggcctccttcctgctcctgctgctggggctggggcctgctcagtgccttgctctggaaacagagcttggtgagcttcctggggagggtctctgcctagggcaccttcagctcaggtggtgggtgagccgggctgggggtgggagcccccgccctcaccactgctcctgcccccacccccgcggctccgtctgtgtgcagtgctgatcctggtcggcgtgggactggaggcgaccccctctccaggtgtctccagcgccatcttcttcgtgccgggcttcctgttgttggtgcctggagggccaccggggcttccagttcttctacctgccctacttcgagaagtgatcgcggcgcagcgtggaccccttgcgcccatgggggcgcccctcttgccctgttccgttcccctcatctcaagggaagaggccctccaggaccctcgaaaccccagcccctagggagtttgctcaggaagttcggggcatgcaggcctggccctgggaaagccgcccgtcgcctgctctgtgccttaacttattctcgggccgtgcggctgctaggttgctgttattttgtgctaataaaagagtaattaattccaccaga

SEQ ID NO: 21621 - protein, 192 aa, Homo sapiens; identical to SEQ ID NO: 21609

SEQ ID NO: 21622 - DNA, 880 bp, Homo sapiens
gggggcggggcagcggcgacgctgggtgtgtgggcgcagatggcggcggcgcacggcgcctgagcgggccggggccatgagcgccgcccggccccagttcagcattgatgatgccttcgagctgtccctggaggacgggggccctgggcccgagtccagcggggtcgcgcgctttgggccgctgcacttcgagcgtcgggcccggttcgaggtggctgacgaggacaagcagtcccggctgcgctaccagaacctggagaacgatgaggatggagcccaggcctctccggagccggatgggggagtcggcaccagggattccagccgaacttccatccgcagctcccagtggtccttcagcaccatcagcagcagcacccagcgctcctacaacacctgctgcagctggacccaacaccctttgatccagaagaaccgccgagtggtgctggcctccttcctgctcctgctgctggggctgggtgtctccagcgccatcttcttcgtgccgggcttcctgttgttggtgcctggagtctatcacgtgatcttcatctactgcgcggtcaagggccaccggggcttccagttcttctacctgccctacttcgagaagtgatcgcggcgcagcgtggaccccttgcgcccatgggggcgcccctcttgccctgttccgttcccctcatctcaagggaagaggccctccaggaccctcgaaaccccagcccctagggagtttgctcaggaagttcggggcatgcaggcctggccctgggaaagccgcccgtcgcctgctctgtgccttaacttattctcgggccgtgcggctgctaggttgctgttattttgtgctaataaaagagtaattaattccaccaga

SEQ ID NO: 21623 - protein, 180 aa, Homo sapiens
MSAARPQFSIDDAFELSLEDGGPGPESSGVARFGPLHFERRARFEVADEDKQSRLRYQNLENDEDGAQASPEPDGGVGTRDSSRTSIRSSQWSFSTISSSTQRSYNTCCSWTQHPLIQKNRRVVLASFLLLLLGLGVSSAIFFVPGFLLLVPGVYHVIFIYCAVKGHRGFQFFYLPYFEK

SEQ ID NO: 21624 - DNA, 929 bp, Homo sapiens
atgcgggggcggggcagcggcgacgctgggtgtgtgggcgcagatggcggcggcgcacggcgcctgagcgggccggggccatgagcgccgcccggccccagttcagcattgatgatgccttcgagctgtccctggaggacgggggccctgggcccgagtccagcggggtcgcgcgctttgggccgctgcacttcgagcgtcgggcccggttcgaggtggctgacgaggacaagcagtcccggctgcgctaccagaacctggagaacgatgaggatggagcccaggcctctccggagccggatgggggagtcggcaccagggattccagccgaacttccatccgcagctcccagtggtccttcagcaccatcagcagcagcacccagcgctcctacaacacctgctgcagctggacccaacaccctttgatccagaagaaccgccgagtggtgctggcctccttcctgctcctgctgctggggctggtgctgatcctggtcggcgtgggactggaggcgaccccctctccaggtgtctccagcgccatcttcttcgtgccgggcttcctgttgttggtgcctggagtctatcacgtgatcttcatctactgcgcggtcaagggccaccggggcttccagttcttctacctgccctacttcgagaagtgatcgcggcgcagcgtggaccccttgcgcccatgggggcgcccctcttgccctgttccgttcccctcatctcaagggaagaggccctccaggaccctcgaaaccccagcccctagggagtttgctcaggaagttcggggcatgcaggcctggccctgggaaagccgcccgtcgcctgctctgtgccttaacttattctcgggccgtgcggctgctaggttgctgttattttgtgctaataaaagagtaattaattccaccaga

SEQ ID NO: 21625 - protein, 195 aa, Homo sapiens; identical to SEQ ID NO: 2795

SEQ ID NO: 21626 - DNA, 595 bp, Homo sapiens
gacgctgggtgtgtgggcgcagatggcggcggcgcacggcgcctgagcgggccggggccatgagcgccgcccggccccagttcagcattgatgatgccttcgagctgtccctggaggacgggggccctgggcccgagtccagcggggtcgcgcgctttgggccgctgcacttcgagcgtcgggcccggttcgaggtggctgacgaggacaagcagtcccggctgcgctaccagaacctggagaacgatgaggatggagcccaggcctctccggagccggatgggggagtcggcaccagggattccagccgaacttccatccgcagctcccagtggtccttcagcaccatcagcagcagcacccagcgctcctacaacacctgctgcagctggacccaacaccctttgatccagaagaaccgccgagtggtgctggcctccttcctgcccctagggagtttgctcaggaagttcggggcatgcaggcctggccctgggaaagccgcccgtcgcctgctctgtgccttaacttattctcgggccgtgcggctgctaggttgctgttattttgtgctaataaaagagtaattaattcc

SEQ ID NO: 21627 - protein, 175 aa, Homo sapiens
MSAARPQFSIDDAFELSLEDGGPGPESSGVARFGPLHFERRARFEVADEDKQSRLRYQNLENDEDGAQASPEPDGGVGTRDSSRTSIRSSQWSFSTISSSTQRSYNTCCSWTQHPLIQKNRRVVLASFLPLGSLLRKFGACRPGPGKAARRLLCALTYSRAVRLLGCCYFVLIKE

SEQ ID NO: 21628 - DNA, 1860 bp, Homo sapiens
gacgctgggtgtgtgggcgcagatggcggcggcgcacggcgcctgagcgggccggggccatgagcgccgcccggccccagttcagcattgatgatgccttcgagctgtccctggaggacgggggccctgggcccgagtccagcggggtcgcgcgctttgggccgctgcacttcgagcgtcgggcccggttcgaggtggctgacgaggacaagcagtcccggctgcgctaccagaacctggagaacgatgaggatggagcccaggcctctccggagccggatgggggagtcggcaccagggattccagccgaacttccatccgcagctcccagtggtccttcagcaccatcagcagcagcacccagcgctcctacaacacctgctgcagctggacccaacaccctttgatccagaagaaccgccgagtggtgctggcctccttcctgctcctgctgctggggctgggtgagtggccctgagggttggggtcaagaggggccccgtgggaggctctgccctccttttgtacaggctctgcctcccccttgacactgagcctcccagcatcctgaggaggcagctggctgccatcatcacactcccattttacaggtgaggagacagaggccttgtgacctgggcacacagccaggaaatcacacatagctgaaaatggaacctggcttatcactgcaaagacttttccttttttaaaaaatttaacctgtttaaatccattagaggacagaagagtagcagctaccatttattctgtgtctactctgggcaaggtgcagggcagttttattttcccatcttacagaagtcctacaagtgaggtggtgcccagaagccacgtgtaggggctcagggatgccgagtgcccagccagtgcagagccgcagggcacctggcacttccccttgtctggcatctaagcactgacaagcacccctctcctacccattgctcagatgggggaacttttggtccagagcaggcagatctcacaccaggtgttctttggctcccaggcacctcgttctttggggtagaggaggcagagtccccagaaaggatccagggttggggtcacgagtgatccataagaagggactaactgtggctgctaccctggctcatctctccgcttctccaggaaggccaaggctccccagccagccaggcccctggcacagagtctggcctctgctcagggtgtttgagtgtgggggagggggctgccacttcccagcaccgctgtacactggccctggtagtgctgccaagttctttcatttttcccctcaacccagcaaggcaagcctggggctaccagagcgccttagagggcctttgtagggtgcagggagtgagtttcagcccccatcataccctatacccctttatttttatttatttattttttgaggaggagtcttgctctgtcgcccaggcaggagtgtagtggcgcaatctcggctcactgcaacctctgcctcctgggttcaagggattttcatgccttagcctccagagtagctgggattacaggcgcgcgccaccacacctggctaattttttgtatttttttagtagagatggggtttcaccatgttggcctcaggtgatccacccacctcagcttcccaaagtgttgggattacaggcgtgagccaccacgcccagccctttttattttttagagacagggtcttgttctgttgcccaagctggagagctgtggtatgatcactgcagcctcaaactcttggactcaagccatcctcccagctgagcctccctagtagctgggactacaggcatgtaccaccatgctcagctaattttttttttttt

SEQ ID NO: 21629 - protein, 139 aa, Homo sapiens
MSAARPQFSIDDAFELSLEDGGPGPESSGVARFGPLHFERRARFEVADEDKQSRLRYQNLENDEDGAQASPEPDGGVGTRDSSRTSIRSSQWSFSTISSSTQRSYNTCCSWTQHPLIQKNRRVVLASFLLLLLGLGEWP

SEQ ID NO: 21630 - DNA, 852 bp, Homo sapiens
gggtgtgtgggcgcagatggcggcggcgcacggcgcctgagcgggccggggccatgagcgccgcccggccccagttcagcattgatgatgccttcgagctgtccctggaggacgggggccctgggcccgagtccagcggggtcgcgcgctttgggccgctgcacttcgagcgtcgggcccggttcgaggtggctgacgaggacaagcagtcccggctgcgctaccagaacctggagaacgatgaggatggagcccaggcctctccggagccggatgggggagtcggcaccagggattccagccgaacttccatccgcagctcccagtggtccttcagcaccatcagcagcagcacccagcgctcctacaacacctgctgcaggtgagcctgcccgcctaagcccccagccgagcagccctggctccacccccacagcctcctgcaccccctccctccacctccttcacattcaccctgctctcctgccacccagctggacccaacaccctttgatccagaagaaccgccgagtggtgctggcctccttcctgctcctgctgctggggctgggtgagtggccctgagggttggggtcaagaggggccccgtgggaggctctgccctccttttgtacaggctctgcctcccccttgacactgagcctcccagcatcctgaggaggcagctggctgccatcatcacactcccattttacaggtgaggagacagaggccttgtgacctgggcacacagccaggaaatcacacatagctgaaaatggaacctggcttatcactgcaaagacttttccttttttaaaaaatttaacctgtttaaatccattagaggac

SEQ ID NO: 21631 - protein, 166 aa, Homo sapiens
MMPSSCPWRTGALGPSPAGSRALGRCTSSVGPGSRWLTRTSSPGCATRTWRTMRMEPRPLRSRMGESAPGIPAELPSAAPSGPSAPSAAAPSAPTTPAAGEPARLSPQPSSPGSTPTASCTPSLHLLHIHPALLPPSWTQHPLIQKNRRVVLASFLLLLLGLGEWP

SEQ ID NO: 21632 - DNA, 1233 bp, Homo sapiens
gcttctgccctcaaccaaaatggcgctagctcggaagctgccgaggtgctaggagttgccgaagcaagtccggaagctaccgagcgagtccggaagttgccgaaagggagcagcggggaaggaggatggcggatatcatcgcaagactccgggaggacgggatccaaaaacgtgtgatacaggaaggccgaggagagctcccggactttcaagatgggaccaaggccacgttccactaccggacgctgcacagtgacgacgagggcaccgtgctggacgacagccgggctcgtggcaagcccatggagctcatcattggcaagaagttcaagctgcctgtgtgggagaccatcgtgtgcaccatgcgagaaggggagattgcccagttcctctgtgacatcaagcatgtggtcctgtacccgctggtggccaagagtctccgcaacatcgcggtgggcaaggaccccctggagggccagcggcactgctgcggtgttgcacagatgcgtgaacacagctccctgggccatgctgacctggacgccctgcagcagaacccccagcccctcatcttccacatggagatgctgaaggtggagagccctggcacgtaccagcaggacccatgggccatgacagacgaagagaaggcaaaggcagtgccacttatccaccaggagggcaaccggttgtaccgcgaggggcatgtgaaggaggctgctgccaagtactacgatgccattgcctgcctcaagaacctgcagatgaaggaacagcctgggtcccctgaatggatccagctggaccagcagatcacgccgctgctgctcaactactgccagtgcaagctggtggtcgaggagtactacgaggtgctggaccactgctcttccatcctcaacaagtacgacgacaacgtcaaggcctacttcaagcggggcaaggcccacgcggccgtgtggaatgcccaggaggcccaggctgactttgccaaagtgctggagctggacccagccctggcgcctgtggtgagccgagagctgcaggccctggaggcacggatccggcagaaggacgaagaggacaaagcccggttccgggggatcttctcccattgacaggagcacttggccctgccttacctgccaagcccactgctgcagctgccagcccccctgcccgtgctgcgtcatgcttctgtgtatataaaggcctttatttatctctctctga

SEQ ID NO: 21633 - protein, 330 aa, Homo sapiens
MADIIARLREDGIQKRVIQEGRGELPDFQDGTKATFHYRTLHSDDEGTVLDDSRARGKPMELIIGKKFKLPVWETIVCTMREGEIAQFLCDIKHVVLYPLVAKSLRNIAVGKDPLEGQRHCCGVAQMREHSSLGHADLDALQQNPQPLIFHMEMLKVESPGTYQQDPWAMTDEEKAKAVPLIHQEGNRLYREGHVKEAAAKYYDAIACLKNLQMKEQPGSPEWIQLDQQITPLLLNYCQCKLVVEEYYEVLDHCSSILNKYDDNVKAYFKRGKAHAAVWNAQEAQADFAKVLELDPALAPVVSRELQALEARIRQKDEEDKARFRGIFSH

SEQ ID NO: 21634 - DNA, 808 bp, Homo sapiens
ttctgccctcaaccaaaatggcgctagctcggaagctgccgaggtgctaggagttgccgaagcaagtccggaagctaccgagcgagtccggaagttgccgaaagggagcagcggggaaggaggatggcggatatcatcgcaagactccgggaggacgggatccaaaaacgtgtgatacaggaaggccgaggagagctcccggactttcaagatgggaccaaggccacgttccactaccggacgctgcacagtgacgacgagggcaccgtgctggacgacagccgggctcgtggcaagcccatggagctcatcattggcaagaagttcaagctgcctgtgtgggagaccatcgtgtgcaccatgcgagaaggggagattgcccagttcctctgtgacatcaagcatgtggtcctgtacccgctggtggccaagagtctccgcaacatcgcggtgggcaaggaccccctggagggccagcggcactgctgcggtgttgcacagatgcgtgaacacagctccctgggccatgctgacctggacgccctgcagcagaacccccagcccctcatcttccacatggagatgctgaaggtggagagccctggcacgtaccagcaggacccatgggccatgacagacgaagagaaggcaaaggcagtgccacttatccaccaggagggcaaccggttgtaccgcgaggggcatgtgaaggaggctgctgccaagtactacgatgccattgcctgcctcaagaacctgcagatgaaggtactgcctggaggctgagggggaggatggatggaggggg

SEQ ID NO: 21635 - protein, 220 aa, Homo sapiens [sequence omitted]

SEQ ID NO: 21636 - DNA, 865 bp, Homo sapiens
tctgccctcaaccaaaatggcgctagctcggaagctgccgaggtgctaggagttgccgaagcaagtccggaagctaccgagcgagtccggaagttgccgaaagggagcagcggggaaggaggatggcggatatcatcgcaagactccgggaggacgggatccaaaaacgtgtgatacaggaaggccgaggagagctcccggactttcaagatgggaccaaggccacgttccactaccggacgctgcacagtgacgacgagggcaccgtgctggacgacagccgggctcgtggcaagcccatggagctcatcattggcaagaagttcaagctgcctgtgtgggagaccatcgtgtgcaccatgcgagaaggggagattgcccagttcctctgtgacatcaagcatgtggtcctgtacccgctggtggccaagagtctccgcaacatcgcggtgggcaaggaccccctggagggccagcggcactgctgcggtgttgcacagatgcgtgaacacagctccctgggccatcctcaacaagtacgacgacaacgtcaaggcctacttcaagcggggcaaggcccacgcggccgtgtggaatgcccaggaggcccaggctgactttgccaaagtgctggagctggacccagccctggcgcctgtggtgagccgagagctgcaggccctggaggcacggatccggcagaaggacgaagaggacaaagcccggttccgggggatcttctcccattgacaggagcacttggccctgccttacctgccaagcccactgctgcagctgccagcccccctgcccgtgctgcgtcatgcttctgtgtatataaaggcctttatttatctctctctga

SEQ ID NO: 21637 - protein, 179 aa, Homo sapiens
MGPRPRSTTGRCTVTTRAPCWTTAGLVASPWSSSLARSSSCLCGRPSCAPCEKGRLPSSSVTSSMWSCTRWWPRVSATSRWARTPWRASGTAAVLHRCVNTAPWAILNKYDDNVKAYFKRGKAHAAVWNAQEAQADFAKVLELDPALAPVVSRELQALEARIRQKDEEDKARFRGIFSH

SEQ ID NO: 21638 - DNA, 812 bp, Homo sapiens
ctgccctcaaccaaaatggcgctagctcggaagctgccgaggtgctaggagttgccgaagcaagtccggaagctaccgagcgagtccggaagttgccgaaagggagcagcggggaaggaggatggcggatatcatcgcaagactccgggaggacgggatccaaaaacgtgtgatacaggaaggccgaggagagctcccggactttcaagatgggaccaaggccacgttccactaccggacgctgcacagtgacgacgagggcaccgtgctggacgacagccgggctcgtggcaagcccatggagctcatcattggcaagaagttcaagctgcctgtgtgggagaccatcgtgtgcaccatgcgagaaggggagattgcccagttcctctgtgacatcaagcatgtggtcctgtacccgctggtggccaagagtctccgcaacatcgcggtgggcaaggaccccctggagggccagcggcactgctgcggtgttgcacagatgcgtgaacacagctccctgggccatgctgacctggacgccctgcagcagaacccccagcccctcatcttccacatggagatgctgaaggtgaggggccaccgcgcctggtctcaccaggcccccactgcccagcctcagggcggcgctggcctgtccacccaggggtggtgggatccgcaggtggactgctgggggagcggacagagacaagaaaacctgtgcaggacccttggcagtaccctgggtctcctttcctcctccttcacatctcaaatgtcacctcctccaggaaaccggccctgcccacccg

SEQ ID NO: 21639 - protein, 229 aa, Homo sapiens
MADIIARLREDGIQKRVIQEGRGELPDFQDGTKATFHYRTLHSDDEGTVLDDSRARGKPMELIIGKKFKLPVWETIVCTMREGEIAQFLCDIKHVVLYPLVAKSLRNIAVGKDPLEGQRHCCGVAQMREHSSLGHADLDALQQNPQPLIFHMEMLKVRGHRAWSHQAPTAQPQGGAGLSTQGWWDPQVDCWGSGQRQENLCRTLGSTLGLLSSSFTSQMSPPPGNRPCP

SEQ ID NO: 21640 - DNA, 439 bp, Homo sapiens
ctgccctcaaccaaaatggcgctagctcggaagctgccgaggtgctaggagttgccgaagcaagtccggaagctaccgagcgagtccggaagttgccgaaagggagcagcggggaaggaggatggcggatatcatcgcaagactccgggaggacgggatccaaaaacgtgtgatacaggaaggccgaggagagctcccggactttcaagatgggaccaaggccacgttccactaccggacgctgcacagtgacgacgagggcaccgtgctggacgacagccgggctcgtggcaagcccatggagctcatcattggcaagaagttcaagctgcctgtgtgggagaccatcgtgtgcaccatgcgagaaggggagattgcccagttcctctgtgacatcaaggtggagagccctggcacgtaccagcaggacccatgggcc

SEQ ID NO: 21641 - protein, 105 aa, Homo sapiens
MADIIARLREDGIQKRVIQEGRGELPDFQDGTKATFHYRTLHSDDEGTVLDDSRARGKPMELIIGKKFKLPVWETIVCTMREGEIAQFLCDIKVESPGTYQQDPW

SEQ ID NO: 21642 - DNA, 1040 bp, Homo sapiens
ctgccctcaaccaaaatggcgctagctcggaagctgccgaggtgctaggagttgccgaagcaagtccggaagctaccgagcgagtccggaagttgccgaaagggagcagcggggaaggaggatggcggatatcatcgcaagactccgggaggacgggatccaaaaacgtgtgatacaggaaggccgaggagagctcccggactttcaagatgggaccaaggccacgttccactaccggacgctgcacagtgacgacgagggcaccgtgctggacgacagccgggctcgtggcaagcccatggagctcatcattggcaagaagttcaagctgcctgtgtgggagaccatcgtgtgcaccatgcgagaaggggagattgcccagttcctctgtgacatcaaggtggagagccctggcacgtaccagcaggacccatgggccatgacagacgaagagaaggcaaaggcagtgccacttatccaccaggagggcaaccggttgtaccgcgaggggcatgtgaaggaggctgctgccaagtactacgatgccattgcctgcctcaagaacctgcagatgaaggaacagcctgggtcccctgaatggatccagctggaccagcagatcacgccgctgctgctcaactactgccagtgcaagctggtggtcgaggagtactacgaggtgctggaccactgctcttccatcctcaacaagtacgacgacaacgtcaaggcctacttcaagcggggcaaggcccacgcggccgtgtggaatgcccaggaggcccaggctgactttgccaaagtgctggagctggacccagccctggcgcctgtggtgagccgagagctgcaggccctggaggcacggatccggcagaaggacgaagaggacaaagcccggttccgggggatcttctcccattgacaggagcacttggccctgccttacctgccaagcccactgctgcagctgccagcccccctgcccgtgctgcgtcatgcttctgtgtatataaaggcctttatttatctctctctga

SEQ ID NO: 21643 - protein, 267 aa, Homo sapiens
MADIIARLREDGIQKRVIQEGRGELPDFQDGTKATFHYRTLHSDDEGTVLDDSRARGKPMELIIGKKFKLPVWETIVCTMREGEIAQFLCDIKVESPGTYQQDPWAMTDEEKAKAVPLIHQEGNRLYREGHVKEAAAKYYDAIACLKNLQMKEQPGSPEWIQLDQQITPLLLNYCQCKLVVEEYYEVLDHCSSILNKYDDNVKAYFKRGKAHAAVWNAQEAQADFAKVLELDPALAPVVSRELQALEARIRQKDEEDKARFRGIFSH

SEQ ID NO: 21644 - DNA, 856 bp, Homo sapiens
cctcaaccaaaatggcgctagctcggaagctgccgaggtgctaggagttgccgaagcaagtccggaagctaccgagcgagtccggaagttgccgaaagggagcagcggggaaggaggatggcggatatcatcgcaagactccgggaggacgggatccaaaaacgtgtgatacaggaaggccgaggagagctcccggactttcaagatgggaccaaggtggagagccctggcacgtaccagcaggacccatgggccatgacagacgaagagaaggcaaaggcagtgccacttatccaccaggagggcaaccggttgtaccgcgaggggcatgtgaaggaggctgctgccaagtactacgatgccattgcctgcctcaagaacctgcagatgaaggaacagcctgggtcccctgaatggatccagctggaccagcagatcacgccgctgctgctcaactactgccagtgcaagctggtggtcgaggagtactacgaggtgctggaccactgctcttccatcctcaacaagtacgacgacaacgtcaaggcctacttcaagcggggcaaggcccacgcggccgtgtggaatgcccaggaggcccaggctgactttgccaaagtgctggagctggacccagccctggcgcctgtggtgagccgagagctgcaggccctggaggcacggatccggcagaaggacgaagaggacaaagcccggttccgggggatcttctcccattgacaggagcacttggccctgccttacctgccaagcccactgctgcagctgccagcccccctgcccgtgctgcgtcatgcttctgtgtatataaaggcctttatttatctctctctga

SEQ ID NO: 21645 - protein, 207 aa, Homo sapiens
MADIIARLREDGIQKRVIQEGRGELPDFQDGTKVESPGTYQQDPWAMTDEEKAKAVPLIHQEGNRLYREGHVKEAAAKYYDAIACLKNLQMKEQPGSPEWIQLDQQITPLLLNYCQCKLVVEEYYEVLDHCSSILNKYDDNVKAYFKRGKAHAAVWNAQEAQADFAKVLELDPALAPVVSRELQALEARIRQKDEEDKARFRGIFSH

SEQ ID NO: 21646 - DNA, 1204 bp, Homo sapiens
gttgatctcagtgcttgggcagaccccacgctggaggaaacccagggccgggagtggtcctcgggtatctgggtttcaaggctcatgatcctttgtagatggaagggccttctgaaaacacttagaccaactgccgctgtttagagtggaaaaccaagaccctgggacgtgcaaagccggagaacgggcccagaggccacgttccactaccggacgctgcacagtgacgacgagggcaccgtgctggacgacagccgggctcgtggcaagcccatggagctcatcattggcaagaagttcaagctgcctgtgtgggagaccatcgtgtgcaccatgcgagaaggggagattgcccagttcctctgtgacatcaagcatgtggtcctgtacccgctggtggccaagagtctccgcaacatcgcggtgggcaaggaccccctggagggccagcggcactgctgcggtgttgcacagatgcgtgaacacagctccctgggccatgctgacctggacgccctgcagcagaacccccagcccctcatcttccacatggagatgctgaaggtggagagccctggcacgtaccagcaggacccatgggccatgacagacgaagagaaggcaaaggcagtgccacttatccaccaggagggcaaccggttgtaccgcgaggggcatgtgaaggaggctgctgccaagtactacgatgccattgcctgcctcaagaacctgcagatgaaggaacagcctgggtcccctgaatggatccagctggaccagcagatcacgccgctgctgctcaactactgccagtgcaagctggtggtcgaggagtactacgaggtgctggaccactgctcttccatcctcaacaagtacgacgacaacgtcaaggcctacttcaagcggggcaaggcccacgcggccgtgtggaatgcccaggaggcccaggctgactttgccaaagtgctggagctggacccagccctggcgcctgtggtgagccgagagctgcaggccctggaggcacggatccggcagaaggacgaagaggacaaagcccggttccgggggatcttctcccattgacaggagcacttggccctgccttacctgccaagcccactgctgcagctgccagcccccctgcccgtgctgcgtcatgcttctgtgtatataaaggcctttatttatctctctctga

SEQ ID NO: 21647 - protein, 271 aa, Homo sapiens
MELIIGKKFKLPVWETIVCTMREGEIAQFLCDIKHVVLYPLVAKSLRNIAVGKDPLEGQRHCCGVAQMREHSSLGHADLDALQQNPQPLIFHMEMLKVESPGTYQQDPWAMTDEEKAKAVPLIHQEGNRLYREGHVKEAAAKYYDAIACLKNLQMKEQPGSPEWIQLDQQITPLLLNYCQCKLVVEEYYEVLDHCSSILNKYDDNVKAYFKRGKAHAAVWNAQEAQADFAKVLELDPALAPVVSRELQALEARIRQKDEEDKARFRGIFSH

SEQ ID NO: 21648 - DNA, 531 bp, Homo sapiens
ttagcacttggcacagtgctgggcacacaggagatgtgacatcgatgtttgatgctttttgagtgacaagtagctctgctgctggtgtgtgatgtctgggggcccagccagcccagatgtgggtcaggtctgctgctgacggacgcagctgtggtgtccccgagccccgctgtgatatgccccatgccctgcaggtggagagccctggcacgtaccagcaggacccatgggccatgacagacgaagagaaggccgtgtggaatgcccaggaggcccaggctgactttgccaaagtgctggagctggacccagccctggcgcctgtggtgagccgagagctgcaggccctggaggcacggatccggcagaaggacgaagaggacaaagcccggttccgggggatcttctcccattgacaggagcacttggccctgccttacctgccaagcccactgctgcagctgccagcccccctgcccgtgctgcgtcatgcttctgtgtatataaaggcctttatttatctctctctga

SEQ ID NO: 21649 - protein, 99 aa, Homo sapiens
MWVRSAADGRSCGVPEPRCDMPHALQVESPGTYQQDPWAMTDEEKAVWNAQEAQADFAKVLELDPALAPVVSRELQALEARIRQKDEEDKARFRGIFSH

SEQ ID NO: 21650 - DNA, 3720 bp, Homo sapiens
ctgtccacccatctgcgccgccgcctatgcccttgtctccaagtactagccacgggtggaagggcagggaactcgtaggatcaggccagggagcggggcagggagcggggaaggggtcaggaagccagacacctgggtcggtcactggcatggctggacctgttctggagaatggctccatttcagttgcctcttggggctaacgctccccacagaggacccacagagccagggcctgccagcaggcccaggggacttggatggcaggagtgggtctggaagcccctcacccacgcacatttccccctcctacagcctgagcccttacagccacgatggggacagcctgtctcgctcccaagaccacattccactggctgccctgccactgctggccacctcatcctcccgctaccagggcgccgtggccaccgtcattgcccgcaccaaccaggcctactcagccttcctgcgctcacctgagggtgccggcttctgtgggcaggtcgcactgattggagatggtgttggtggcatcctgggctttgatgcactctgccacagtgctaacgcgggcaccgggagtcggggcagcagccgccgtgggagcatgaacaatgagctgctctctccggagtttggcccagtgcgggaccccctggcagatggtgtggaaggcctgggtcggggcagcccagaaccctcggccttgcctccccagcgcatccccagcgacatggccagtcctgagcccgagggctctcagaacagccttcaggcagcccccgcaaccacctcctcctgggagccccggcgggcaagcacggccttctgcccacccgctgccagttccgaggcacctgacggccccagcagcactgcccgccttgacttcaaggtctctggcttcttcctcttcggctccccactgggcctggtgctggctctgcgcaaaactgtgatgcccgccctggagggtgagtcctaggggctgcgggggcgcctctagtctctgtctgccccttccttccccacctcctctggccttccctctcatccgaggcatgagcaacttccccactgtactaattcaaaggcctggctacagaaggggaacctgaggcccagaaagaagggactcgccaagggtgagtctcccaaagccactgggaggagcttcacacccgtgggatgttctgcactagaaggggtcaatcagacaccacagcagcaaatcgaagccgctgccctcttctcagcctttttttttttttttgagacagagtctcgctctgtcacccagactagagtgtcagtggcctgatcttgctcactgcaacctcctgggttcaagtgattctcctacctcagcatcccaagtaactgggattacaggcacctgccaccatgcccagctaatttttgtattttttttagtagagacagggttttgccatgttggccaggctggtctcgaactcctgacctcaggtaatccacccacctctgcctcccacagtgctgggattccaggaatgagccactgaacccagctaatttttgtatttttaatggagacggggtttcaccatgttggccagactggtctcgaactcctgacctcaagtgatccatctgcttctgcctcccgcagtactgggattccaggcatgagccacggtgcccagcccctgtctcactttaagcagggccctactgacttcccagggagtgcagtttgggaagtgctggctcggggtcacaccagacatcagggtgctgctcccacaccccctacctcccagagtgcccagctgaaaccctgaccccacaatctttctctgtcttctgggtaccagcagcccagatgcgcccagcctgtgaacagatctacaacctcttccacgcggctgacccctgcgcctcacgcctcgagcccctgctggccccgaagttccaggccatcgccccactgaccgtgccccgctaccagaagttccccctgggagatggctcatccctgctgctggccgacactctgcagacgcactccagcctctttctggaggagctggagatgctggtgccctcaacacccacctctactagcggtgccttctggaagggcagtgagttggccactgaccccccggcccagccagccgcccccagcaccaccagtgaggtggttaagatcctggagcgctggtgggggaccaagcggatcgactactcgctgtactgccccgaggcgctcaccgcctttcccaccgtcacgctgccccacctcttccacgccagctactgggagtccgccgacgtggtggcgttcatcctgcgccaggtgatcgagaaggagcggccacagctggcggaatgcgaggagccgtccatctacagcccggccttccccagggagaagtggcagcgaaaacgcacgcaggtcaagatccggaacgtcacttccaaccaccgggcgagcgacacggtggtgtgcgagggccgcccccaggtgctaagcgggcgcttcatgtacgggcccctggacgtcgtcacgctcactggagagaaggtggatgtctacatcatgacgcagccgctgtcgggcaagtggatccactttggcaccgaagtcaccaatagctcgggccgcctcaccttcccagttcccccagaacgcgcgctgggcattggtgtctaccccgtgcgcatggtggtcaggggcgaccacacctatgccgaatgctgcctgactgtggtggcccgcggcacggaggctgtggtcttcagcatcgacggctccttcaccgccagcgtctccatcatgggcagcgaccccaaggtgcgagctggcgccgtggacgtggtcaggcactggcaggactccggctacctgatcgtgtatgtcacaggccggccggatatgcagaagcaccgcgtggtggcatggctgtcgcagcacaacttcccccacggcgtcgtctccttctgcgacggcctcacccacgacccactacgccagaaggcaatgtttctgcagagcctggtgcaggaggtagaactgaacatcgtggccggttatgggtctcccaaagatgtggctgtatacgcggcgctggggctgtccccgagccagacctacatcgtgggccgtgccgtgcggaagctacaggcgcagtgccagttcctgtcagacggctatgtggcccacctgggccagctggaagcgggctcgcactcgcatgcctcctcgggacccccgagagctgccttgggcaagagcagctatggtgtggctgcccccgtggacttcctgcgcaaacagagccagctgcttcgctcgaggggccccagccaggcggagcgtgagggcccgggaacaccacccaccaccctggcacggggcaaagcacggagcatcagcctgaagctggacagcgaggagtgaggcccacaccagcctggacctgggttatttattgacacacccaaggggcccgaggggctgcgtgtgggaggctggggacccagacttttggccccagcgctggcccccccagccccacaccctatatctccgtgtgctcctcggtgttacttccctttcatatgaggggacccagcgccggggggagggaggagggcgtgggcatgggcgcagaggcttttccagtgtgtataaatccatgaaaataaacgccacctgcaccccacccactc

SEQ ID NO: 21651 - protein, 526 aa, Homo sapiens [sequence omitted]

SEQ ID NO: 21652 - DNA, 4196 bp, Homo sapiens
cgcgggcggcggtgctaggctcgcctctgcctccctcgtggcgggcccggacatggggtcccgtggcctgagtccctcggccggcgcgcagggctcggggccgcgcgcagcctccccgcactgactgtcgcgccgtgccctgcgccaggaggagcggaggccgcgcgcggcccgccgagcgccttcaggatgctcatcaaggaataccacattctgctgcccatgagcctggacgagtaccaggtggcccagctctacatgatccagaaaaagagccgggaggagtctagtggtgagggcagcggcgtggagatcctggccaaccggccctacacggatgggcccgggggcagcgggcaatacacacacaaggtgtaccacgtgggctcccacatcccaggctggttccgggcactgctgcccaaggctgccctgcaggtagaagaggaatcctggaatgcctacccctacacccgaacccggtacacctgccctttcgtggagaaattctccattgaaattgagacctattacctgcctgatggggggcagcagccaaacgtcttcaacctgagcggggccgagaggagacagcgcatcctggacaccatcgacatcgtgcgggatgcagtggccccaggcgagtacaaagcagaagaggacccccggctttatcactcggtcaagacgggccgagggccactgtctgatgactgggcacggacggcggcacagacggggccccttatgtgtgcctataagctgtgcaaggttgagttccgctactggggcatgcaagccaagatcgagcagttcatccatgatgtaggtctgcgtcgggtgatgctgcgggcccaccgccaggcctggtgctggcaggatgagtggacagagctgagcatggctgacatccgggcactggaagaggagactgctcgcatgctggcccagcgcatggccaagtgcaacacaggcagtgaggggtccgaggcccagccccccgggaaaccgagcaccgaggcccggtctgcggccagcaacactggcacccccgatgggcctgaggcccccccaggcccagatgcctcccccgatgccagctttgggaagcagtggtcctcatcctcccgttcctcctactcatcccaacatggaggggctgtgtctccccagagcttgtctgagtggcgcatgcagaacattgcccgagactctgagaacagctccgaggaagagttctttgatgcccacgaaggcttctcggacagtgaggaggtcttccccaaggagatgaccaagtggaactccaatgacttcattgatgcctttgcctccccagtggaggcagagggaacgccagagcctggagccgaggcagctaaaggcattgaggatggggcccaagcacccagggactcagagggcctggatggagccggggagctgggggctgaggcatgcgcagtccacgccctcttccttatcctgcacagcggcaacatcctggactcaggccctggagacgccaactccaagcaggcggatgtgcagacgctgagctccgccttcgaggccgtcacccgcatccacttccctgaggccttgggccacgtggcgctgcgactggtgccctgtccacccatctgcgccgccgcctatgcccttgtctccaacctgagcccttacagccacgatggggacagcctgtctcgctcccaagaccacattccactggctgccctgccactgctggccacctcatcctcccgctaccagggcgccgtggccaccgtcattgcccgcaccaaccaggcctactcagccttcctgcgctcacctgagggtgccggcttctgtgggcaggtcgcactgattggagatggtgttggtggcatcctgggctttgatgcactctgccacagtgctaacgcgggcaccgggagtcggggcagcagccgccgtgggagcatgaacaatgagctgctctctccggagtttggcccagtgcgggaccccctggcagatggtgtggaaggcctgggtcggggcagcccagaaccctcggccttgcctccccagcgcatccccagcgacatggccagtcctgagcccgagggctctcagaacagccttcaggcagcccccgcaaccacctcctcctgggagccccggcgggcaagcacggccttctgcccacccgctgccagttccgaggcacctgacggccccagcagcactgcccgccttgacttcaaggtctctggcttcttcctcttcggctccccactgggcctggtgctggctctgcgcaaaactgtgatgcccgccctggaggcagcccagatgcgcccagcctgtgaacagatctacaacctcttccacgcggctgacccctgcgcctcacgcctcgagcccctgctggccccgaagttccaggccatcgccccactgaccgtgccccgctaccagaagttccccctgggagatggctcatccctgctgctggccgacactctgcagacgcactccagcctctttctggaggagctggagatgctggtgccctcaacacccacctctactagcggtgccttctggaagggcagtgagttggccactgaccccccggcccagccagccgcccccagcaccaccagtgaggtggttaagatcctggagcgctggtgggggaccaagcggatcgactactcgctgtactgccccgaggcgctcaccgcctttcccaccgtcacgctgccccacctcttccacgccagctactgggagtccgccgacgtggtggcgttcatcctgcgccaggtgatcgagaaggagcggccacagctggcggaatgcgaggagccgtccatctacagcccggccttccccagggagaagtggcagcgaaaacgcacgcaggtcaagatccggaacgtcacttccaaccaccgggcgagcgacacggtggtgtgcgagggccgcccccaggtgctaagcgggcgcttcatgtacgggcccctggacgtcgtcacgctcactggagagaaggtggatgtctacatcatgacgcagccgctgtcgggcaagtggatccactttggcaccgaagtcaccaatagctcgggccgcctcaccttcccagttcccccagaacgcgcgctgggcattggtgtctaccccgtgcgcatggtggtcaggggcgaccacacctatgccgaatgctgcctgactgtggtggcccgcggcacggaggctgtggtcttcagcatcgacggctccttcaccgccagcgtctccatcatgggcagcgaccccaaggtgcgagctggcgccgtggacgtggtcaggcactggcaggactccggctacctgatcgtgtatgtcacaggccggccggatatgcagaagcaccgcgtggtggcatggctgtcgcagcacaacttcccccacggcgtcgtctccttctgcgacggcctcacccacgacccactacgccagaaggcaatgtttctgcagagcctggtgcaggaggtagaactgaacatcgtggccggttatgggtctcccaaagatgtggctgtatacgcggcgctggggctgtccccgagccagacctacatcgtgggccgtgccgtgcggaagctacaggcgcagtgccagttcctgtcagacggctatgtggcccacctgggccagctggaagcgggctcgcactcgcatgcctcctcgggacccccgagagctgccttgggcaagagcagctatggtgtggctgcccccgtggacttcctgcgcaaacagagccagctgcttcgctcgaggggccccagccaggcggagcgtgagggcccgggaacaccacccaccaccctggcacggggcaaagcacggagcatcagcctgaagctggacagcgaggagtgaggcccacaccagcctggacctgggttatttattgacacacccaaggggcccgaggggctgcgtgtgggaggctggggacccagacttttggccccagcgctggcccccccagccccacaccctatatctccgtgtgctcctcggtgttacttccctttcatatgaggggacccagcgccggggggagggaggagggcgtgggcatgggcgcagaggcttttccagtgtgtataaatccatgaaaataaacgccacctgcaccccacccactc

SEQ ID NO: 21653 - protein, 1244 aa, Homo sapiens
MLIKEYHILLPMSLDEYQVAQLYMIQKKSREESSGEGSGVEILANRPYTDGPGGSGQYTHKVYHVGSHIPGWFRALLPKAALQVEEESWNAYPYTRTRYTCPFVEKFSIEIETYYLPDGGQQPNVFNLSGAERRQRILDTIDIVRDAVAPGEYKAEEDPRLYHSVKTGRGPLSDDWARTAAQTGPLMCAYKLCKVEFRYWGMQAKIEQFIHDVGLRRVMLRAHRQAWCWQDEWTELSMADIRALEEETARMLAQRMAKCNTGSEGSEAQPPGKPSTEARSAASNTGTPDGPEAPPGPDASPDASFGKQWSSSSRSSYSSQHGGAVSPQSLSEWRMQNIARDSENSSEEEFFDAHEGFSDSEEVFPKEMTKWNSNDFIDAFASPVEAEGTPEPGAEAAKGIEDGAQAPRDSEGLDGAGELGAEACAVHALFLILHSGNILDSGPGDANSKQADVQTLSSAFEAVTRIHFPEALGHVALRLVPCPPICAAAYALVSNLSPYSHDGDSLSRSQDHIPLAALPLLATSSSRYQGAVATVIARTNQAYSAFLRSPEGAGFCGQVALIGDGVGGILGFDALCHSANAGTGSRGSSRRGSMNNELLSPEFGPVRDPLADGVEGLGRGSPEPSALPPQRIPSDMASPEPEGSQNSLQAAPATTSSWEPRRASTAFCPPAASSEAPDGPSSTARLDFKVSGFFLFGSPLGLVLALRKTVMPALEAAQMRPACEQIYNLFHAADPCASRLEPLLAPKFQAIAPLTVPRYQKFPLGDGSSLLLADTLQTHSSLFLEELEMLVPSTPTSTSGAFWKGSELATDPPAQPAAPSTTSEVVKILERWWGTKRIDYSLYCPEALTAFPTVTLPHLFHASYWESADVVAFILRQVIEKERPQLAECEEPSIYSPAFPREKWQRKRTQVKIRNVTSNHRASDTVVCEGRPQVLSGRFMYGPLDVVTLTGEKVDVYIMTQPLSGKWIHFGTEVTNSSGRLTFPVPPERALGIGVYPVRMVVRGDHTYAECCLTVVARGTEAVVFSIDGSFTASVSIMGSDPKVRAGAVDVVRHWQDSGYLIVYVTGRPDMQKHRVVAWLSQHNFPHGVVSFCDGLTHDPLRQKAMFLQSLVQEVELNIVAGYGSPKDVAVYAALGLSPSQTYIVGRAVRKLQAQCQFLSDGYVAHLGQLEAGSHSHASSGPPRAALGKSSYGVAAPVDFLRKQSQLLRSRGPSQAEREGPGTPPTTLARGKARSISLKLDSEE

SEQ ID NO: 21654 - DNA, 4237 bp, Homo sapiens
ggggagggactgcaggggcgccggcgggcggatcgagaggaaggtcggggccatgggccggcactgcgcctcgggagggtccggccaccgctggaacccgaggccggggctgggggcgctccgggctccgacccacgggccggccggccctgcccgggctgggtgaggggcgcccgcctcaagctagaggaggagcggaggccgcgcgcggcccgccgagcgccttcaggatgctcatcaaggaataccacattctgctgcccatgagcctggacgagtaccaggtggcccagctctacatgatccagaaaaagagccgggaggagtctagtggtgagggcagcggcgtggagatcctggccaaccggccctacacggatgggcccgggggcagcgggcaatacacacacaaggtgtaccacgtgggctcccacatcccaggctggttccgggcactgctgcccaaggctgccctgcaggtagaagaggaatcctggaatgcctacccctacacccgaacccggtacacctgccctttcgtggagaaattctccattgaaattgagacctattacctgcctgatggggggcagcagccaaacgtcttcaacctgagcggggccgagaggagacagcgcatcctggacaccatcgacatcgtgcgggatgcagtggccccaggcgagtacaaagcagaagaggacccccggctttatcactcggtcaagacgggccgagggccactgtctgatgactgggcacggacggcggcacagacggggccccttatgtgtgcctataagctgtgcaaggttgagttccgctactggggcatgcaagccaagatcgagcagttcatccatgatgtaggtctgcgtcgggtgatgctgcgggcccaccgccaggcctggtgctggcaggatgagtggacagagctgagcatggctgacatccgggcactggaagaggagactgctcgcatgctggcccagcgcatggccaagtgcaacacaggcagtgaggggtccgaggcccagccccccgggaaaccgagcaccgaggcccggtctgcggccagcaacactggcacccccgatgggcctgaggcccccccaggcccagatgcctcccccgatgccagctttgggaagcagtggtcctcatcctcccgttcctcctactcatcccaacatggaggggctgtgtctccccagagcttgtctgagtggcgcatgcagaacattgcccgagactctgagaacagctccgaggaagagttctttgatgcccacgaaggcttctcggacagtgaggaggtcttccccaaggagatgaccaagtggaactccaatgacttcattgatgcctttgcctccccagtggaggcagagggaacgccagagcctggagccgaggcagctaaaggcattgaggatggggcccaagcacccagggactcagagggcctggatggagccggggagctgggggctgaggcatgcgcagtccacgccctcttccttatcctgcacagcggcaacatcctggactcaggccctggagacgccaactccaagcaggcggatgtgcagacgctgagctccgccttcgaggccgtcacccgcatccacttccctgaggccttgggccacgtggcgctgcgactggtgccctgtccacccatctgcgccgccgcctatgcccttgtctccaacctgagcccttacagccacgatggggacagcctgtctcgctcccaagaccacattccactggctgccctgccactgctggccacctcatcctcccgctaccagggcgccgtggccaccgtcattgcccgcaccaaccaggcctactcagccttcctgcgctcacctgagggtgccggcttctgtgggcaggtcgcactgattggagatggtgttggtggcatcctgggctttgatgcactctgccacagtgctaacgcgggcaccgggagtcggggcagcagccgccgtgggagcatgaacaatgagctgctctctccggagtttggcccagtgcgggaccccctggcagatggtgtggaaggcctgggtcggggcagcccagaaccctcggccttgcctccccagcgcatccccagcgacatggccagtcctgagcccgagggctctcagaacagccttcaggcagcccccgcaaccacctcctcctgggagccccggcgggcaagcacggccttctgcccacccgctgccagttccgaggcacctgacggccccagcagcactgcccgccttgacttcaaggtctctggcttcttcctcttcggctccccactgggcctggtgctggctctgcgcaaaactgtgatgcccgccctggaggcagcccagatgcgcccagcctgtgaacagatctacaacctcttccacgcggctgacccctgcgcctcacgcctcgagcccctgctggccccgaagttccaggccatcgccccactgaccgtgccccgctaccagaagttccccctgggagatggctcatccctgctgctggccgacactctgcagacgcactccagcctctttctggaggagctggagatgctggtgccctcaacacccacctctactagcggtgccttctggaagggcagtgagttggccactgaccccccggcccagccagccgcccccagcaccaccagtgaggtggttaagatcctggagcgctggtgggggaccaagcggatcgactactcgctgtactgccccgaggcgctcaccgcctttcccaccgtcacgctgccccacctcttccacgccagctactgggagtccgccgacgtggtggcgttcatcctgcgccaggtgatcgagaaggagcggccacagctggcggaatgcgaggagccgtccatctacagcccggccttccccagggagaagtggcagcgaaaacgcacgcaggtcaagatccggaacgtcacttccaaccaccgggcgagcgacacggtggtgtgcgagggccgcccccaggtgctaagcgggcgcttcatgtacgggcccctggacgtcgtcacgctcactggagagaaggtggatgtctacatcatgacgcagccgctgtcgggcaagtggatccactttggcaccgaagtcaccaatagctcgggccgcctcaccttcccagttcccccagaacgcgcgctgggcattggtgtctaccccgtgcgcatggtggtcaggggcgaccacacctatgccgaatgctgcctgactgtggtggcccgcggcacggaggctgtggtcttcagcatcgacggctccttcaccgccagcgtctccatcatgggcagcgaccccaaggtgcgagctggcgccgtggacgtggtcaggcactggcaggactccggctacctgatcgtgtatgtcacaggccggccggatatgcagaagcaccgcgtggtggcatggctgtcgcagcacaacttcccccacggcgtcgtctccttctgcgacggcctcacccacgacccactacgccagaaggcaatgtttctgcagagcctggtgcaggaggtagaactgaacatcgtggccggttatgggtctcccaaagatgtggctgtatacgcggcgctggggctgtccccgagccagacctacatcgtgggccgtgccgtgcggaagctacaggcgcagtgccagttcctgtcagacggctatgtggcccacctgggccagctggaagcgggctcgcactcgcatgcctcctcgggacccccgagagctgccttgggcaagagcagctatggtgtggctgcccccgtggacttcctgcgcaaacagagccagctgcttcgctcgaggggccccagccaggcggagcgtgagggcccgggaacaccacccaccaccctggcacggggcaaagcacggagcatcagcctgaagctggacagcgaggagtgaggcccacaccagcctggacctgggttatttattgacacacccaaggggcccgaggggctgcgtgtgggaggctggggacccagacttttggccccagcgctggcccccccagccccacaccctatatctccgtgtgctcctcggtgttacttccctttcatatgaggggacccagcgccggggggagggaggagggcgtgggcatgggcgcagaggcttttccagtgtgtataaatccatgaaaataaacgccacctgcaccccacccactc

SEQ ID NO: 21655 - protein, 1244 aa, Homo sapiens; identical to SEQ ID NO: 21653

SEQ ID NO: 21656 - DNA, 1569 bp, Homo sapiens
cgggacgtcaaagccctgcgtccttcggcccccagagcggagaagcgcgcaaggcaccggtggcagcggcgacggcagctgcgacagcaacccctgctgggccgaaactgggcagagcggagcagacgtctgaagcagcgcgagtgaggcgcgagggtagcgcccgcgcccgggaagacccctcggcgcgaaccggcagcccagccccgggtcccggttcccaaggccccgcctctagggcctggggactaatcggattgagagcgcgccggcccgggccgcgaactcgccaattgcggagggcggtggccaccgcccaatccggagcagacaggtgcgaggtccggaaggcggaggccaatcggcggcggttgcgacctgctggggcaggtctcggccaataaggaggctcgagtgacatcttcgcgcaccaatcgggagtgagggagcattcgtgcccgctcgcccttccggccagacctctatttaccaggggcgtgcagcccgcttgccaatcagagcgcggctgagcggccccgcagccaacccccgaggagcggccggctggcgtccgccgcgcccaggagttggggatgtcctacaaacccatcgcccctgctcccagcagcacccctggctccagcacccctgggccgggcaccccggtccctacaggtgaggatccagctccacccctgctcgcctgccgggcggtcgaggtctcgaagagaagacggcctgagttctgcaatactgggcctgccgcctaccctcgctgagcctcagtttgctggcctgtgaagtgggcgtggtcacgaagcgtcccgtcgccgtcgggctcagtgccaggagccggcgctcctttcagaccgctgtttaacgactttggaccgccttccatgggctacgtgcaggcgatgaagccacccggcgcccagggctcccagagcacctacacggacctgctgtcagtcatagaggagatgggcaaagagatccggcctacctatgctggcagcaagagcgccatggagcgcctgaagagaggtatcatccatgcccgggccctagtcagagagtgcctggcagagacagagcggaacgcccgcacgtaacaggaagcgcctcggcctcagcgtctggacctatccggccactgcagagcacccgcttctccctggccttcatcccgagttgcactaaccatcctgggcttcctgtcctgtgtcccttggtgggtcccctccaggaaccaaggagtggccctccaggtggcagcactaaggacacccccccacaacaagagttagcagcgaggtccccatgagtcccacccatgacctgccgacagtgttgcccaccggaacttttgtggcccctaccgctcagcccttcccagcacttctcccactttgtcccgagcctccttctcccccagcaggggcacaggcctggcacctccctgccttgtgtcctgagccatagtgactcttttatctgtgtgtcttttgctaaatatgccctttttatattaataaaagatgatttggagttgtgctctcagctctg

SEQ ID NO: 21657 - protein, 71 aa, Homo sapiens
MGYVQAMKPPGAQGSQSTYTDLLSVIEEMGKEIRPTYAGSKSAMERLKRGIIHARALVRECLAETERNART

SEQ ID NO: 21658 - DNA, 1752 bp, Homo sapiens
ggggcgcagggctcgggacgtcaaagccctgcgtccttcggcccccagagcggagaagcgcgcaaggcaccggtggcagcggcgacggcagctgcgacagcaacccctgctgggccgaaactgggcagagcggagcagacgtctgaagcagcgcgagtgaggcgcgagggtagcgcccgcgcccgggaagacccctcggcgcgaaccggcagcccagccccgggtcccggttcccaaggccccgcctctagggcctggggactaatcggattgagagcgcgccggcccgggccgcgaactcgccaattgcggagggcggtggccaccgcccaatccggagcagacaggtgcgaggtccggaaggcggaggccaatcggcggcggttgcgacctgctggggcaggtctcggccaataaggaggctcgagtgacatcttcgcgcaccaatcgggagtgagggagcattcgtgcccgctcgcccttccggccagacctctatttaccaggggcgtgcagcccgcttgccaatcagagcgcggctgagcggccccgcagccaacccccgaggagcggccggctggcgtccgccgcgcccaggagttggggatgtcctacaaacccatcgcccctgctcccagcagcacccctggctccagcacccctgggccgggcaccccggtccctacaggtgaggatccagctccacccctgctcgcctgccgggcggtcgaggtctcgaagagaagacggcctgagttctgcaatactgggcctgccgcctaccctcgctgagcctcagtttgctggcctgtgaagtgggcgtggtcacgtaagggcttgtaggtggagcgcagtgggagggatttgtccctgaagttgatcagcatggaatgaagcatcctttggagggaatcgggcgaacccggtcctgggcttggaaaagctgggaggcggcgtccctgccccgcgctgacctcttactcgcgcctgttgctgcaggaagcgtcccgtcgccgtcgggctcagtgccaggagccggcgctcctttcagaccgctgtttaacgactttggaccgccttccatgggctacgtgcaggcgatgaagccacccggcgcccagggctcccagagcacctacacggacctgctgtcagtcatagaggagatgggcaaagagatccggcctacctatgctggcagcaagagcgccatggagcgcctgaagagaggtatcatccatgcccgggccctagtcagagagtgcctggcagagacagagcggaacgcccgcacgtaacaggaagcgcctcggcctcagcgtctggacctatccggccactgcagagcacccgcttctccctggccttcatcccgagttgcactaaccatcctgggcttcctgtcctgtgtcccttggtgggtcccctccaggaaccaaggagtggccctccaggtggcagcactaaggacacccccccacaacaagagttagcagcgaggtccccatgagtcccacccatgacctgccgacagtgttgcccaccggaacttttgtggcccctaccgctcagcccttcccagcacttctcccactttgtcccgagcctccttctcccccagcaggggcacaggcctggcacctccctgccttgtgtcctgagccatagtgactcttttatctgtgtgtcttttgctaaatatgccctttttatattaataaaagatgatttggagttgtgctctcagctctg

SEQ ID NO: 21659 - protein, 135 aa, Homo sapiens
MKHPLEGIGRTRSWAWKSWEAASLPRADLLLAPVAAGSVPSPSGSVPGAGAPFRPLFNDFGPPSMGYVQAMKPPGAQGSQSTYTDLLSVIEEMGKEIRPTYAGSKSAMERLKRGIIHARALVRECLAETERNART

SEQ ID NO: 21660 - DNA, 1444 bp, Homo sapiens
ggtggggcgcagggctcgggacgtcaaagccctgcgtccttcggcccccagagcggagaagcgcgcaaggcaccggtggcagcggcgacggcagctgcgacagcaacccctgctgggccgaaactgggcagagcggagcagacgtctgaagcagcgcgagtgaggcgcgagggtagcgcccgcgcccgggaagacccctcggcgcgaaccggcagcccagccccgggtcccggttcccaaggccccgcctctagggcctggggactaatcggattgagagcgcgccggcccgggccgcgaactcgccaattgcggagggcggtggccaccgcccaatccggagcagacaggtgcgaggtccggaaggcggaggccaatcggcggcggttgcgacctgctggggcaggtctcggccaataaggaggctcgagtgacatcttcgcgcaccaatcgggagtgagggagcattcgtgcccgctcgcccttccggccagacctctatttaccaggggcgtgcagcccgcttgccaatcagagcgcggctgagcggccccgcagccaacccccgaggagcggccggctggcgtccgccgcgcccaggagttggggatgtcctacaaacccatcgcccctgctcccagcagcacccctggctccagcacccctgggccgggcaccccggtccctacaggaagcgtcccgtcgccgtcgggctcagtgccaggagccggcgctcctttcagaccgctgtttaacgactttggaccgccttccatgggctacgtgcaggcgatgaagccacccggcgcccagggctcccagagcacctacacggacctgctgtcagtcatagaggagatgggcaaagagatccggcctacctatgctggcagcaagagcgccatggagcgcctgaagagaggtatcatccatgcccgggccctagtcagagagtgcctggcagagacagagcggaacgcccgcacgtaacaggaagcgcctcggcctcagcgtctggacctatccggccactgcagagcacccgcttctccctggccttcatcccgagttgcactaaccatcctgggcttcctgtcctgtgtcccttggtgggtcccctccaggaaccaaggagtggccctccaggtggcagcactaaggacacccccccacaacaagagttagcagcgaggtccccatgagtcccacccatgacctgccgacagtgttgcccaccggaacttttgtggcccctaccgctcagcccttcccagcacttctcccactttgtcccgagcctccttctcccccagcaggggcacaggcctggcacctccctgccttgtgtcctgagccatagtgactcttttatctgtgtgtcttttgctaaatatgccctttttatattaataaaagatgatttggagttgtgctctcagctctg

SEQ ID NO: 21661 - protein, 126 aa, Homo sapiens; identical to SEQ ID NO: 2801

SEQ ID NO: 21662 - DNA, 447 bp, Homo sapiens
agtgggagggatttgtccctgaagttgatcagcatggaatgaagcatcccgcttctccctggccttcatcccgagttgcactaaccatcctgggcttcctgtcctgtgtcccttggtgggtcccctccaggaaccaaggagtggccctccaggtggcagcactaaggacacccccccacaacaagagttagcagcgaggtccccatgagtcccacccatgacctgccgacagtgttgcccaccggaacttttgtggcccctaccgctcagcccttcccagcacttctcccactttgtcccgagcctccttctcccccagcaggggcacaggcctggcacctccctgccttgtgtcctgagccatagtgactcttttatctgtgtgtcttttgctaaatatgccctttttatattaataaaagatgatttggagttgtgctctcagct

SEQ ID NO: 21663 - protein, 50 aa, Homo sapiens [sequence omitted]

SEQ ID NO: 21664 - DNA, 2101 bp, Homo sapiens
ggggcgcagggctcgggacgtcaaagccctgcgtccttcggcccccagagcggagaagcgcgcaaggcaccggtggcagcggcgacggcagctgcgacagcaacccctgctgggccgaaactgggcagagcggagcagacgtctgaagcagcgcgagtgaggcgcgagggtagcgcccgcgcccgggaagacccctcggcgcgaaccggcagcccagccccgggtcccggttcccaaggccccgcctctagggcctggggactaatcggattgagagcgcgccggcccgggccgcgaactcgccaattgcggagggcggtggccaccgcccaatccggagcagacaggtgcgaggtccggaaggcggaggccaatcggcggcggttgcgacctgctggggcaggtctcggccaataaggaggctcgagtgacatcttcgcgcaccaatcgggagtgagggagcattcgtgcccgctcgcccttccggccagacctctatttaccaggggcgtgcagcccgcttgccaatcagagcgcggctgagcggccccgcagccaacccccgaggagcggccggctggcgtccgccgcgcccaggagttggggatgtcctacaaacccatcgcccctgctcccagcagcacccctggctccagcacccctgggccgggcaccccggtccctacaggtgaggatccagctccacccctgctcgcctgccgggcggtcgaggtctcgaagagaagacggcctgagttctgcaatactgggcctgccgcctaccctcgctgagcctcagtttgctggcctgtgaagtgggcgtggtcacgtaagggcttgtaggtggagcgcagtgggagggatttgtccctgaagttgatcagcatggaatgaagcatcctttggagggaatcgggcgaacccggtcctgggcttggaaaagctgggaggcggcgtccctgccccgcgctgacctcttactcgcgcctgttgctgcaggaagcgtcccgtcgccgtcgggctcagtgccaggagccggcgctcctttcagaccgctgtttaacgactttggaccgccttccatgggctacgtgcaggcgatgaagccacccggcgcccagggctcccagagcacctacacggacctgctgtcagtcatagaggagatgggcaaagagatccggcctacctatgctggcagcaagagcgccatggagcgcctgaagagaggtaagtgaggccaggccgccctgctcaggaaaccgacactggactatccttcatgagggaaggaaggacatctggaggccacctgagccaagcctagaggatgtccagtattactaccagagaggtgttttgaatcgaattgaaattgagtccatttccagggaagagcatgggaatttgtatttcaacagggcaaccttgaggattaaccaaacctctaatttcatctagccgtcattagatttgaatttcttttgccgaaagtggaaagggagtggggaggcaggggtcctcctctggagggcagtgggtggggctgtggagggttgctgagaccccaccccacccccaggtatcatccatgcccgggccctagtcagagagtgcctggcagagacagagcggaacgcccgcacgtaacaggaagcgcctcggcctcagcgtctggacctatccggccactgcagagcacccgcttctccctggccttcatcccgagttgcactaaccatcctgggcttcctgtcctgtgtcccttggtgggtcccctccaggaaccaaggagtggccctccaggtggcagcactaaggacacccccccacaacaagagttagcagcgaggtccccatgagtcccacccatgacctgccgacagtgttgcccaccggaacttttgtggcccctaccgctcagcccttcccagcacttctcccactttgtcccgagcctccttctcccccagcaggggcacaggcctggcacctccctgccttgtgtcctgagccatagtgactcttttatctgtgtgtcttttgctaaatatgccctttttatattaataaaagatgatttggagttgtgctctcagct

SEQ ID NO: 21665 - protein, 115 aa, Homo sapiens
MKHPLEGIGRTRSWAWKSWEAASLPRADLLLAPVAAGSVPSPSGSVPGAGAPFRPLFNDFGPPSMGYVQAMKPPGAQGSQSTYTDLLSVIEEMGKEIRPTYAGSKSAMERLKRGK

SEQ ID NO: 21666 - DNA, 754 bp, Homo sapiens
aggcagcagcatccgccgaggcccacccgggccacccccggggttccaggcctggcatggttcagggcccatggggaactgtgccaagcggccctggcgccggggccctaaggaccgggagctgcggcccgaggagattgaagagctgcaggtcgccttccaggagtttgaccgagaccgggacggctacattggctgccgggagctgggtgcctgcatgcggaccctgggctacatgcccaccgagatggagctcatcgagatctcacaacaaatcagtggcggaaaggtggactttgaagacttcgtggagctgatgggccccaagctgctggcagagacggcagacatgatcggtgtccgggagctacgggacgccttccgggagttcgacaccaatggggacggccgcatcagcgtgggcgagctccgggcggccctcaaggccctgctgggggagcgcctcagccagcgggaggtggacgagatcctccaggacgtggacctcaatggggacggtctggtcgacttcgaagagtttgtgcgaatgatgtctcggtgagcctgtacagaagctggaggcagcataaaggactcaaggaccacagcctctgcccaccagcatgttccttgaagcccatcgcctctagcggggaccctcctttcctccccatcccacctgtgtgcagtgcccttgcctgccttcacccccaccaccacttctccaataaagccgcctggccttgtctctgtc

SEQ ID NO: 21667 - protein, 163 aa, Homo sapiens
MGNCAKRPWRRGPKDRELRPEEIEELQVAFQEFDRDRDGYIGCRELGACMRTLGYMPTEMELIEISQQISGGKVDFEDFVELMGPKLLAETADMIGVRELRDAFREFDTNGDGRISVGELRAALKALLGERLSQREVDEILQDVDLNGDGLVDFEEFVRMMSR

SEQ ID NO: 21668 - DNA, 961 bp, Homo sapiens
tcgggagcagctgggggctggcaggagtcctcaggcagcagcatccgccgaggcccacccgggccacccccggggttccaggcctggcatggttcagggcccatggggaactgtgccaagcggccctggcgccggggccctaaggaccccttgcagtggctcggctccccaccaaggggctcctgccccagccccagctccagccccaaggagcagggggaccccgcgccaggcgtccagggctactcggtgctcaacagcctggtggggcctgcctgcatcttcctgcggcccagcattgccgccacccaactcgtatgaccgggagctgcggcccgaggagattgaagagctgcaggtcgccttccaggagtttgaccgagaccgggacggctacattggctgccgggagctgggtgcctgcatgcggaccctgggctacatgcccaccgagatggagctcatcgagatctcacaacaaatcagtggcggaaaggtggactttgaagacttcgtggagctgatgggccccaagctgctggcagagacggcagacatgatcggtgtccgggagctacgggacgccttccgggagttcgacaccaatggggacggccgcatcagcgtgggcgagctccgggcggccctcaaggccctgctgggggagcgcctcagccagcgggaggtggacgagatcctccaggacgtggacctcaatggggacggtctggtcgacttcgaagagtttgtgcgaatgatgtctcggtgagcctgtacagaagctggaggcagcataaaggactcaaggaccacagcctctgcccaccagcatgttccttgaagcccatcgcctctagcggggaccctcctttcctccccatcccacctgtgtgcagtgcccttgcctgccttcacccccaccaccacttctccaataaagccgcctggccttgtctctgtc

SEQ ID NO: 21669 - protein, 226 aa, Homo sapiens
MVQGPWGTVPSGPGAGALRTPCSGSAPHQGAPAPAPAPAPRSRGTPRQASRATRCSTAWWGLPASSCGPALPPPNSYDRELRPEEIEELQVAFQEFDRDRDGYIGCRELGACMRTLGYMPTEMELIEISQQISGGKVDFEDFVELMGPKLLAETADMIGVRELRDAFREFDTNGDGRISVGELRAALKALLGERLSQREVDEILQDVDLNGDGLVDFEEFVRMMSR

SEQ ID NO: 21670 - DNA, 958 bp, Homo sapiens
tgggaaagagggaaaggcttccccggccagctgcgcggcgactccggggactccagggcgcccctctgcggccgacgcccggggtgcagcggccgccggggctggggccggcgggagtccgcgggaccctccagaagagcggccggcgccgtgactcagcactggggcggagcggggcgggaccacccttataaggctcggaggccgcgaggccttcgctggagtttcgccgccgcagtcttcgccaccatgccgccctacaccgtggtctatttcccagttcgaggccgctgcgcggccctgcgcatgctgctggcagatcagggccagagctggaaggaggaggtggtgaccgtggagacgtggcaggagggctcactcaaagcctcctgcctatacgggcagctccccaagttccaggacggagacctcaccctgtaccagtccaataccatcctgcgtcacctgggccgcacccttgggctctatgggaaggaccagcaggaggcagccctggtggacatggtgaatgacggcgtggaggacctccgctgcaaatacatctccctcatctacaccaactatgaggcgggcaaggatgactatgtgaaggcactgcccgggcaactgaagccttttgagaccctgctgtcccagaaccagggaggcaagaccttcattgtgggagaccagatctccttcgctgactacaacctgctggacttgctgctgatccatgaggtcctagcccctggctgcctggatgcgttccccctgctctcagcatatgtggggcgcctcagtgcccggcccaagctcaaggccttcctggcctcccctgagtacgtgaacctccccatcaatggcaacgggaaacagtgagggttggggggactctgagcgggaggcagagtttgccttcctttctccaggaccaataaaatttctaagagagcta

SEQ ID NO: 21671 - protein, 210 aa, Homo sapiens; identical to SEQ ID NO: 2807

SEQ ID NO: 21672 - DNA, 853 bp, Homo sapiens
tgggaaagagggaaaggcttccccggccagctgcgcggcgactccggggactccagggcgcccctctgcggccgacgcccggggtgcagcggccgccggggctggggccggcgggagtccgcgggaccctccagaagagcggccggcgccgtgactcagcactggggcggagcggggcgggaccacccttataaggctcggaggccgcgaggccttcgctggagtttcgccgccgcagtcttcgccaccatgccgccctacaccgtggtctatttcccagttcgaggccgctgcgcggccctgcgcatgctgctggcagatcagggccagagctggaaggaggaggtggtgaccgtggagacgtggcaggagggctcactcaaagcctcctgcctatacgggcagctccccaagttccaggacggagacctcaccctgtaccagtccaataccatcctgcgtcacctgggccgcacccttgggctctatgggaaggaccagcaggaggcagccctggtggacatggtgaatgacggcgtggaggacctccgctgcaaatacatctccctcatctacaccaactatatctccttcgctgactacaacctgctggacttgctgctgatccatgaggtcctagcccctggctgcctggatgcgttccccctgctctcagcatatgtggggcgcctcagtgcccggcccaagctcaaggccttcctggcctcccctgagtacgtgaacctccccatcaatggcaacgggaaacagtgagggttggggggactctgagcgggaggcagagtttgccttcctttctccaggaccaataaaatttctaagagagctacta

SEQ ID NO: 21673 - protein, 174 aa, Homo sapiens
MPPYTVVYFPVRGRCAALRMLLADQGQSWKEEVVTVETWQEGSLKASCLYGQLPKFQDGDLTLYQSNTILRHLGRTLGLYGKDQQEAALVDMVNDGVEDLRCKYISLIYTNYISFADYNLLDLLLIHEVLAPGCLDAFPLLSAYVGRLSARPKLKAFLASPEYVNLPINGNGKQ

SEQ ID NO: 21674 - DNA, 993 bp, Homo sapiens
tgggaaagagggaaaggcttccccggccagctgcgcggcgactccggggactccagggcgcccctctgcggccgacgcccggggtgcagcggccgccggggctggggccggcgggagtccgcgggaccctccagaagagcggccggcgccgtgactcagcactggggcggagcggggcgggaccacccttataaggctcggaggccgcgaggccttcgctggagtttcgccgccgcagtcttcgccaccatgccgccctacaccgtggtctatttcccagttcgaggccgctgcgcggccctgcgcatgctgctggcagatcagggccagagctggaaggaggaggtggtgaccgtggagacgtggcaggagggctcactcaaagcctcctgcctatacgggcagctccccaagttccaggacggagacctcaccctgtaccagtccaataccatcctgcgtcacctgggccgcacccttgggctctatgggaaggaccagcaggaggcagccctggtggacatggtgaatgacggcgtggaggacctccgctgcaaatacatctccctcatctacaccaactatgaggcgggcaaggatgactatgtgaaggcactgcccgggcaactgaagccttttgagaccctgctgtcccagaaccagggaggcaagaccttcattgtgggagaccagatctccttcgctgactacaacctgctggacttgctgctgatccatgaggtcctagcccctggctgcctggatgcgttccccctgctctcagcatatgtggggcgcctcagtgcccggcccaagctcaaggccttcctggcctcccctgagtacgtgaacctccccatcaatggcaacgggaaacagtgagggttggggggactctgagcgggaggcagagtttgccttcctttctccaggaccaataaaatttctaagagagctaaacctcacaaactagaagaggaagaaaaaaaaaga

SEQ ID NO: 21675 - protein, 210 aa, Homo sapiens; identical to SEQ ID NO: 2807

SEQ ID NO: 21676 - DNA, 668 bp, Homo sapiens
gccgtgactcagcactggggcggagcggggcgggaccacccttataaggctcggaggccgcgaggccttcgctggagtttcgccgccgcagtcttcgccaccactatacgggcagctccccaagttccaggacggagacctcaccctgtaccagtccaataccatcctgcgtcacctgggccgcacccttgggctctatgggaaggaccagcaggaggcagccctggtggacatggtgaatgacggcgtggaggacctccgctgcaaatacatctccctcatctacaccaactatgaggcgggcaaggatgactatgtgaaggcactgcccgggcaactgaagccttttgagaccctgctgtcccagaaccagggaggcaagaccttcattgtgggagaccagatctccttcgctgactacaacctgctggacttgctgctgatccatgaggtcctagcccctggctgcctggatgcgttccccctgctctcagcatatgtggggcgcctcagtgcccggcccaagctcaaggccttcctggcctcccctgagtacgtgaacctccccatcaatggcaacgggaaacagtgagggttggggggactctgagcgggaggcagagtttgccttcctttctccaggaccaataaaatttctaagagagcta

SEQ ID NO: 21677 - protein, 119 aa, Homo sapiens [sequence omitted]

SEQ ID NO: 21678 - DNA, 1027 bp, Homo sapiens
ggagtttcgccgccgcagtcttcgccaccagtgagtacgcgcggcccgcgtccccggggatggggctcagagctcccagcatggggccaacccgcagcatcaggcccgggctcccggcagggctcctcgcccacctcgagacccgggacgggggcctaggggacccaggacgtccccagtgccgttagcggctttcagggggcccggagcgcctcggggagggatgggaccccgggggcggggagggggggcagactgcgctcaccgcgccttggcatcctcccccgggctccagcaaacttttctttgttcgctgcagtgccgccctacaccgtggtctatttcccagttcgaggccgctgcgcggccctgcgcatgctgctggcagatcagggccagagctggaaggaggaggtggtgaccgtggagacgtggcaggagggctcactcaaagcctcctgcctatacgggcagctccccaagttccaggacggagacctcaccctgtaccagtccaataccatcctgcgtcacctgggccgcacccttgggctctatgggaaggaccagcaggaggcagccctggtggacatggtgaatgacggcgtggaggacctccgctgcaaatacatctccctcatctacaccaactatgaggcgggcaaggatgactatgtgaaggcactgcccgggcaactgaagccttttgagaccctgctgtcccagaaccagggaggcaagaccttcattgtgggagaccagatctccttcgctgactacaacctgctggacttgctgctgatccatgaggtcctagcccctggctgcctggatgcgttccccctgctctcagcatatgtggggcgcctcagtgcccggcccaagctcaaggccttcctggcctcccctgagtacgtgaacctccccatcaatggcaacgggaaacagtgagggttggggggactctgagcgggaggcagagtttgccttcctttctccaggaccaataaaatttctaagagagcta

SEQ ID NO: 21679 - protein, 191 aa, Homo sapiens
MLLADQGQSWKEEVVTVETWQEGSLKASCLYGQLPKFQDGDLTLYQSNTILRHLGRTLGLYGKDQQEAALVDMVNDGVEDLRCKYISLIYTNYEAGKDDYVKALPGQLKPFETLLSQNQGGKTFIVGDQISFADYNLLDLLLIHEVLAPGCLDAFPLLSAYVGRLSARPKLKAFLASPEYVNLPINGNGKQ

SEQ ID NO: 21680 - DNA, 1689 bp, Homo sapiens
ggagtttcgccgccgcagtcttcgccaccatgccgccctacaccgtggtctatttcccagttcgaggtaggagcatgtgtctggcagggaagggaggcaggggctggggctgcagcccacagcccctcgcccacccggagagatccgaacccccttatccctccgtcgtgtggcttttaccccgggcctccttcctgttccccgcctctcccgccatgcctgctccccgccccagtgttgtgtgaaatcttcggaggaacctgtttccctgttccctccctgcactcctgacccctccccgggttgctgcgaggcggagtcggcccggtccccacatctcgtacttctccctccccgcaggccgctgcgcggccctgcgcatgctgctggcagatcagggccagagctggaaggaggaggtggtgaccgtggagacgtggcaggagggctcactcaaagcctcctgcgtaagtgaccatgcccgggcaaggggagggggtgctgggccttagggggctgtgactaggatcgggggacgcccaagctcagtgcccctccctgagccatgcctcccccaacagctatacgggcagctccccaagttccaggacggagacctcaccctgtaccagtccaataccatcctgcgtcacctgggccgcacccttggtgagtcttgaacctccaagtccagggcaggcatgggcaagcctctgcccccggagcccttttgtttaaatcagctgccccgcagccctctggagtggaggaaactgagacccactgaggttacgtagtttgcccaaggtcaagcctgggtgcctgcaatccttgccctgtgccaggctgcctcccaggtgtcaggtgagctctgagcacctgctgtgtggcagtctctcatccttccacgcacatcctcttcccctcctcccaggctggggctcacagacagccccctggttggcccatccccagtgactgtgtgttgatcaggcgcccagtcacgcggcctgctcccctccacccaaccccagggctctatgggaaggaccagcaggaggcagccctggtggacatggtgaatgacggcgtggaggacctccgctgcaaatacatctccctcatctacaccaactatgaggcgggcaaggatgactatgtgaaggcactgcccgggcaactgaagccttttgagaccctgctgtcccagaaccagggaggcaagaccttcattgtgggagaccaggtgagcatctggccccatgctgttccttcctcgccaccctctgcttccagatggacacaggtgtgagccatttgtttagcaaagcagagcagacctaggggatgggcttaggccctctgcccccaattcctccagcctgctcccgctggctgagtccctggcccccctgccctgcagatctccttcgctgactacaacctgctggacttgctgctgatccatgaggtcctagcccctggctgcctggatgcgttccccctgctctcagcatatgtggggcgcctcagtgcccggcccaagctcaaggccttcctggcctcccctgagtacgtgaacctccccatcaatggcaacgggaaacagtgagggttggggggactctgagcgggaggcagagtttgccttcctttctccaggaccaataaaatttctaagagagctac

SEQ ID NO: 21681 - protein, 78 aa, Homo sapiens
MVNDGVEDLRCKYISLIYTNYEAGKDDYVKALPGQLKPFETLLSQNQGGKTFIVGDQVSIWPHAVPSSPPSASRWTQV

SEQ ID NO: 21682 - DNA, 725 bp, Homo sapiens
agtcttcgccaccatgccgccctacaccgtggtctatttcccagttcgaggccgctgcgcggccctgcgcatgctgctggcagatcagggccagagctggaaggaggaggtggtgaccgtggagacgtggcaggagggctcactcaaagcctcctgcctatacgggcagctccccaagttccaggacggagacctcaccctgtaccagtccaataccatcctgcgtcacctgggccgcacccttggtgagtcttgaacctccaagtccagggcaggcatgggcaagcctctgcccccggagcccttttgtttaaatcagctgccccgcagccctctggagtggaggaaactgagacccactgaggttacgtagtttgcccaaggtcaagcctgggtgcctgcaatccttgccctgtgccaggctgcctcccaggtgtcaggtgagctctgagcacctgctgtgtggcagtctctcatccttccacgcacatcctcttcccctcctcccaggctggggctcacagacagccccctggttggcccatccccagtgactgtgtgttgatcaggcgcccagtcacgcggcctgctcccctccacccaaccccagggctctatgggaaggaccagcaggaggcagccctggtggacatggtgaatgacggcgtggaggacctccgctgcaaatacatctccctcatctacaccaactatgtgagcatctg

SEQ ID NO: 21683 - protein, 80 aa, Homo sapiens [sequence omitted]

SEQ ID NO: 21684 - DNA, 823 bp, Homo sapiens
cagggcaggcatgggcaagcctctgcccccggagcccttttgtttaaatcagctgccccgcagccctctggagtggaggaaactgagacccactgaggttacgtagtttgcccaaggtcaagcctgggtgcctgcaatccttgccctgtgccaggctgcctcccaggtgtcaggtgagctctgagcacctgctgtgtggcagtctctcatccttccacgcacatcctcttcccctcctcccaggctggggctcacagacagccccctggttggcccatccccagtgactgtgtgttgatcaggcgcccagtcacgcggcctgctcccctccacccaaccccagggctctatgggaaggaccagcaggaggcagccctggtggacatggtgaatgacggcgtggaggacctccgctgcaaatacatctccctcatctacaccaactatgaggcgggcaaggatgactatgtgaaggcactgcccgggcaactgaagccttttgagaccctgctgtcccagaaccagggaggcaagaccttcattgtgggagaccagatctccttcgctgactacaacctgctggacttgctgctgatccatgaggtcctagcccctggctgcctggatgcgttccccctgctctcagcatatgtggggcgcctcagtgcccggcccaagctcaaggccttcctggcctcccctgagtacgtgaacctccccatcaatggcaacgggaaacagtgagggttggggggactctgagcgggaggcagagtttgccttcctttctccaggaccaataaaatttctaagagagctacta

SEQ ID NO: 21685 - protein, 119 aa, Homo sapiens [sequence omitted]

SEQ ID NO: 21686 - DNA, 414 bp, Homo sapiens
gggatgagagtaggatgatacatggtggtgtctggcaggaggcgggcaaggatgactatgtgaaggcactgcccgggcaactgaagccttttgagaccctgctgtcccagaaccagggaggcaagaccttcattgtgggagaccaggtgagcatctggccccatgctgttccttcctcgccaccctctgcttccagatggacacaggtgtgagccatttgtttagcaaagcagagcagacctaggggatgggcttaggccctctgcccccaattcctccagcctgctcccgctggctgagtccctggcccccctgccctgcagatctccttcgctgactacaacctgctggatctgagcgggaggcagagtttgccttcctttctccaggaccaataaaatttctaagagagct

SEQ ID NO: 21687 - protein, 65 aa, Homo sapiens [sequence omitted]

SEQ ID NO: 21688 - DNA, 438 bp, Homo sapiens
gaggcgggcaaggatgactatgtgaaggcactgcccgggcaactgaagccttttgagaccctgctgtcccagaaccagggaggcaagaccttcattgtgggagaccaggtgagcatctggccccatgctgttccttcctcgccaccctctgcttccagatggacacaggtatctccttcgctgactacaacctgctggacttgctgctgatccatgaggtcctagcccctggctgcctggatgcgttccccctgctctcagcatatgtggggcgcctcagtgcccggcccaagctcaaggccttcctggcctcccctgagtacgtgaacctccccatcaatggcaacgggaaacagtgagggttggggggactctgagcgggaggcagagtttgccttcctttctccaggaccaataaaatttctaagagagctacta

SEQ ID NO: 21689 - protein, 66 aa, Homo sapiens
MDTGISFADYNLLDLLLIHEVLAPGCLDAFPLLSAYVGRLSARPKLKAFLASPEYVNLPINGNGKQ

SEQ ID NO: 21690 - DNA, 2225 bp, Homo sapiens
gcagggtatcagcattgctgagtggcctgcccaggatgacacaactgccagaactcggcctgaggtctcctaacaacaaatcccccactggtccccacccactggagcacctacttgccaggcttctcaagcgaagaaggagatccactctgatgtcatctcccaggagccttctctgcagcatctcaggtcctggctctcacctcctcagcacccatcccatcctgtgtcactctgtatatcagcctccccagccagcctccaggccacaagccaagaggtatcaagggctcctccctgtcccactggccccacatccactgtgtctatctggtcaactttaccttccaaacattccctgcacagtgatagatggctgtggccctgtcatctctcacctgaaattaacaatgtatccttggggcctcccaccctcacatcttggctcctccagccccttctctgcaaacatggaacagtgggattattataaatctcagacccgttttgcccctttcctgcctgagagtttttgtggttccccactgccctcagaacaaagctcaagaccctttggcctggcattcaaggtcctttgtgctgccacctgtcaacctccccagttccagctcctttggctttgcccatacaagctggatctgcaccagaggatctgtcttcctcccaacttggccctagtcctcctaggagccctttggacgtcacctcccccaggaagctttctgcaaccaccctacaaccgtccctataaactttataaaaccaattagtgtggggaaaagcaagagagatcagattgttactgtgtctgtgtagaaagaagtagacataggagactccattttgttatgtactaagaaaaattcttctgccttgagattctgtgaccttacccccaaccccgtgctctctgaaacatgtgctgtgtcaactcagagttgaatggattaagggcggtgcaagatgtgctttgttaaacagatgcttgaaggcagcatgctcgttaagagtcatcaccactccctaatctcaagtacccagggacacaaaaactgcggaaggccgcagggacctctgcctaggaaagccaggtattgtccaaggtttctccccatgtgatagtctgaaatatggcctcgtgggaagggaaagacctgaccgtcccccagcccgacacccgtaaagggtctgtgctgaggaggattagtaaaagaggaaggaatgcctcttgcagttgagacaagaggaaggcatctgtctcctgcctgtccctgggcaatggaatgtctcggtataaaacccgattgtatgctccatctactgagatagggaaaaaccgccttagggctggaggtgggacctgcgggcagcaatactgctttgtaaagcattgagatgtttatgtgtatgcatatctaaaagcacagcacttaatcctttacattgtctatgatgcaaagacctttgttcacgtgtttgtctgctgaccctcttcccacaattgtcttgtgaccctgacacatccccctcttcgagaaacacccacagatgatcaataaatactaagggaactcagaggctggcgggatcctccatatgctgaacgctggttccccgggtccccttatttctttctctatactttgtctctgtgtctttttcttttccaaatctctcgtcccaccttacgagaaacacccacaggtgtgtaggggcaacccacccctacaaattagggaagaagtagggggaaaagatgaaaataaaccaagcctgcagcatactcagtattcatcatgaggtcagctgctctctgacctgcttcctcatggctggttggtgcctgttgtcccggagtgacaaagaccctagattatagctgcccttaactgctgtataaataacaacttgaacatgaaatgctaaattttccttttgaagtattccttcagatcctgcatgctgataaaactactgactcaactggtccccatgaggagctggctcaccaaagaatgcggtttccaatcccaattatttcatgccccttgcttaggcaatcaacaatcccaaatttccagccccttgccctccacaatctccttaaaaaattcagtccaaaactccttggggagatggatttgaaggtctcctcccatctccaaacttggtgccctgcaatcattaaactctttctctgctgc

SEQ ID NO: 21691 - protein, 251 aa, Homo sapiens; identical to SEQ ID NO: 2809

SEQ ID NO: 21692 - DNA, 744 bp, Homo sapiens
gaagttgaaggggcgcagcgataccggtgcgcggcgctggcgtcgggcgcgtgacgtctttcctgcgcgccacctagcgtctctatcgcgccagttcctcagcctcagtgctatgaaggtgacagcgtgaggtgacccatctggcccgccgcgatgctggcaacacggcggctgctcggctggtcgcttcccgcgcgggtatctgtgcgtttcagcggcgacacgacagcacccaagaaaacctcatttggctcgctgaaggatgaagaccggattttcaccaacctgtacggccgccatgactggaggctgaaaggttccctgagtcgaggtgactggtacaagacaaaggagatcctgctgaaggggcccgactggatcctgggcgagatcaagacatcgggtttgaggggccgtggaggcgctggcttccccactggcctcaagtggagcttcatgaataagccctcagatggcaggcccaagtatctggtggtgaacgcagacgagggggagccgggcacctgcaaggaccgggagatcttacgccatgatcctcacaagctgctggaaggctgcctggtggggggccgggccatgggcgcccgcgctgcctatatctacatccgaggggaattctacaatgaggcctccaatctgcaggtgggtagggagagatgtagacagatgagaaggtgttcagtgtgcactcacacacccctcacccagcacagttgttctgag

SEQ ID NO: 21693 - protein, 196 aa, Homo sapiens
MLATRRLLGWSLPARVSVRFSGDTTAPKKTSFGSLKDEDRIFTNLYGRHDWRLKGSLSRGDWYKTKEILLKGPDWILGEIKTSGLRGRGGAGFPTGLKWSFMNKPSDGRPKYLVVNADEGEPGTCKDREILRHDPHKLLEGCLVGGRAMGARAAYIYIRGEFYNEASNLQVGRERCRQMRRCSVCTHTPLTQHSCS

SEQ ID NO: 21694 - DNA, 1150 bp, Homo sapiens
gaagttgaaggggcgcagcgataccggtgcgcggcgctggcgtcgggcgcgtgacgtctttcctgcgcgccacctagcgtctctatcgcgccagttcctcagcctcagtgctatgaaggtgacagcgtgaggtgacccatctggcccgccgcgatgctggcaacacggcggctgctcggctggtcgcttcccgcgcgggtatctgtgcgtttcagcggcgacacgacagcacccaagaaaacctcatttggctcgctgaaggatgaagaccggattttcaccaacctgtacggccgccatgactggaggctgaaaggttccctgagtcgaggtgactggtacaagacaaaggagatcctgctgaaggggcccgactggatcctgggcgagatcaagacatcgggtttgaggggccgtggaggcgctggcttccccactggcctcaagtggagcttcatgaataagccctcagatggcaggcccaagtatctggtggtgaacgcagacgagggggagccgggcacctgcaaggaccgggagatcttacgccatgatcctcacaagctgctggaaggctgcctggtggggggccgggccatgggcgcccgcgctgcctatatctacatccgaggggaattctacaatgaggcctccaatctgcaggtggccatccgagaggcctatgaggcaggtctgattggcaagaatgcttgtggctctggctatgattttgacgtgtttgtggtgcgcggggctggggcctacatctgtggagaggagacagcgctcatcgagtccattgagggcaagcagggcaagccccgcctgaagccccccttccccgcagacgtgggagtgtttggctgccccacaactgtggccaacgtggagacagtggcagtgtcccccacaatctgccgccgtggaggtacctggtttgctggctttggcagagaacgcaactcaggcaccaaactattcaacatctctggccatgtcaaccacccttgcactgtggaggaggagatgtctgtgcccttgaaagaactgattgagaagcatgctgggggtgtcacgggcggctgggacaacctccttgctgtgatccctggcggctcgtctaccccactgatccccaaacaggcctggg

SEQ ID NO: 21695 - protein, 331 aa, Homo sapiens
MLATRRLLGWSLPARVSVRFSGDTTAPKKTSFGSLKDEDRIFTNLYGRHDWRLKGSLSRGDWYKTKEILLKGPDWILGEIKTSGLRGRGGAGFPTGLKWSFMNKPSDGRPKYLVVNADEGEPGTCKDREILRHDPHKLLEGCLVGGRAMGARAAYIYIRGEFYNEASNLQVAIREAYEAGLIGKNACGSGYDFDVFVVRGAGAYICGEETALIESIEGKQGKPRLKPPFPADVGVFGCPTTVANVETVAVSPTICRRGGTWFAGFGRERNSGTKLFNISGHVNHPCTVEEEMSVPLKELIEKHAGGVTGGWDNLLAVIPGGSSTPLIPKQA

SEQ ID NO: 21696 - DNA, 2568 bp, Homo sapiens
gaagttgaaggggcgcagcgataccggtgcgcggcgctggcgtcgggcgcgtgacgtctttcctgcgcgccacctagcgtctctatcgcgccagttcctcagcctcagtgctatgaaggtgacagcgtgaggtgacccatctggcccgccgcgatgctggcaacacggcggctgctcggctggtcgcttcccgcgcgggtatctgtgcgtttcagcggcgacacgacagcacccaagaaaacctcatttggctcgctgaaggatgaagaccggattttcaccaacctgtacggccgccatgactggaggctgaaaggttccctgagtcgaggtgactggtacaagacaaaggagatcctgctgaaggggcccgactggatcctgggcgagatcaagacatcgggtttgaggggccgtggaggcgctggcttccccactggcctcaagtggagcttcatgaataagccctcagatggcaggcccaagtatctggtggtgaacgcagacgagggggagccgggcacctgcaaggaccgggagatcttacgccatgatcctcacaagctgctggaaggctgcctggtggggggccgggccatgggcgcccgcgctgcctatatctacatccgaggggaattctacaatgaggcctccaatctgcaggtggccatccgagaggcctatgaggcaggtctgattggcaagaatgcttgtggctctggctatgattttgacgtgtttgtggtgcgcggggctggggcctacatctgtggagaggagacagcgctcatcgagtccattgagggcaagcagggcaagccccgcctgaagccccccttccccgcagacgtgggtaaggcctggcgtaaccctgggtcagactgtgtcctgtgacacccgggatctggctaggctccctttggattgttcttagggatttctgagtggcttcccggctggggccagatagagagtaggctggcaacaacacacaggctcccccagggccgcctgctgtccctcctcctgcctcggtcccctccgcaccagtgctgctctgtggctccaccttcacagtgcctgttctgaggctaagggcatggggtgaacaaggcaatgggcatctctggagtttggggtccagcagggataagaatgataaggggatattagagcaggggctctgccatgggtgcaggaccctgggacacacctccctgccaggaaacttgccccaccccctagcagccaccagttctcttcccatttccctgaaggagtgtttggctgccccacaactgtggccaacgtggagacagtggcagtgtcccccacaatctgccgccgtggaggtacctggtttgctggctttggcagagaacgcaactcaggcaccaaactattcaacatctctggccatgtcaaccacccttgcactgtggaggaggagatgtctgtgcccttgaaagaactgattgagaagcatgctggtaaggcctggggccagccaggtggtgggggggtgcgcagtgggggcaggtgtccacaaagagagcctgggcgggagggctcaggagacggggctgggtctaggggctgactaagggcctgggctcaggactaggcaggtgtgccggccccagccctgaccatgcatccctttggggaccgacttggggccccagggggtgtcacgggcggctgggacaacctccttgctgtgatccctggcggctcgtctaccccactgatccccaagtctgtgtgtgagacggtgctgatggacttcgatgcgctggtgcaggcacagacaggcctgggcacagctgcggtgatcgtcatggaccgctcggtaagggttcacacaccagccctggtccctgccctcctggttgctgtctccctccctgggcctcccagaaaaccctcttgccagcactcaggtctcagttcctgcagcctgagataaagcaaggtggaagaggagggaggaaggctgctctgaggagaataccccggagtctgggcagcacagggggcccagggaggctggaggaggccagaacgctgggtgggctgggaagagcttctggaactgggggaggggctgctgctagggggctgaggcccaggcttctgtctggccgtgggtgcctgctaattgcccctcgtcacccagacggacatcgtgaaagccatcgcccgcctcattgagttctataagcacgagagctgtggccagtgtaccccatgccgtgagggtgagcatcgggcaggttgggggcttgcttgctgtggcttcatttaacctcctccccaccacgtggcctgcagccctcaagcgccgccccacatcctggctggggagatcatcaggccctctcttgtggctgtggctgcaggtgtggactggatgaacaaggtgatggcacgtttcgtgaggggggatgcccggccggccgagatcgactccctgtgggagatcagcaagcagatagaaggccatacgatttgtgctctgggtgacggggccgcctggcctgtgcaggtattcaccacccttctgcg

SEQ ID NO: 21697 - protein, 246 aa, Homo sapiens [sequence omitted]

SEQ ID NO: 21698 - DNA, 1630 bp, Homo sapiens
gaagttgaaggggcgcagcgataccggtgcgcggcgctggcgtcgggcgcgtgacgtctttcctgcgcgccacctagcgtctctatcgcgccagttcctcagcctcagtgctatgaaggtgacagcgtgaggtgacccatctggcccgccgcgatgctggcaacacggcggctgctcggctggtcgcttcccgcgcgggtatctgtgcgtttcagcggcgacacgacagcacccaagaaaacctcatttggctcgctgaaggatgaagaccggattttcaccaacctgtacggccgccatgactggaggctgaaaggttccctgagtcgaggtgactggtacaagacaaaggagatcctgctgaaggggcccgactggatcctgggcgagatcaagacatcgggtttgaggggccgtggaggcgctggcttccccactggcctcaagtggagcttcatgaataagccctcagatggcaggcccaagtatctggtggtgaacgcagacgagggggagccgggcacctgcaaggaccgggagatcttacgccatgatcctcacaagctgctggaaggctgcctggtggggggccgggccatgggcgcccgcgctgcctatatctacatccgaggggaattctacaatgaggcctccaatctgcaggtggccatccgagaggcctatgaggcaggtctgattggcaagaatgcttgtggctctggctatgattttgacgtgtttgtggtgcgcggggctggggcctacatctgtggagaggagacagcgctcatcgagtccattgagggcaagcagggcaagccccgcctgaagccccccttccccgcagacgtgggagtgtttggctgccccacaactgtggccaacgtggagacagtggcagtgtcccccacaatctgccgccgtggaggtacctggtttgctggctttggcagagaacgcaactcaggcaccaaactattcaacatctctggccatgtcaaccacccttgcactgtggaggaggagatgtctgtgcccttgaaagaactgattgagaagcatgctgggggtgtcacgggcggctgggacaacctccttgctgtgatccctggcggctcgtctaccccactgatccccaagtctgtgtgtgagacggtgctgatggacttcgatgcgctggtgcaggcacagacaggcctgggcacagctgcggtgatcgtcatggaccgctcgacggacatcgtgaaagccatcgcccgcctcattgagttctataagcacgagagctgtggccagtgtaccccatgccgtgagggtgtggactggatgaacaaggtgatggcacgtttcgtgaggggggatgcccggccggccgagatcgactccctgtgggagatcagcaagcagatagaaggccatacgatttgtgctctgggtgacggggccgcctggcctgtgcagggtctgatccgccactttcggccggagctcgaggagcggatgcagcggtttgcccagcagcatcaggcccggcaggctgcctcttagcccaccaccctggcctgctgtcctgcgtctatccatgtggaatgctggacaataaagcgagtgctgcccaccctccagctgc

SEQ ID NO: 21699 - protein, 464 aa, Homo sapiens; identical to SEQ ID NO: 2811

SEQ ID NO: 21700 - DNA, 1469 bp, Homo sapiens
gtgacgtctttcctgcgcgccacctagcgtctctatcgcgccagttcctcagcctcagtgctatgaaggtgacagcgtgaggtgacccatctggcccgccgcgatgctggcaacacggcggctgctcggctggtcgcttcccgcgcgggtatctgtgcgtttcagcggcgacacgtcctcggcctggcggaagttttgcaggttgtgaagacccctagtctttcattctctccttgtcacagccttgtagggcgtgaaggggtcattgccccatttagggatgcgcacctcctgatttcccgtccactgctctgcgccctgaagtggctgaaaagtgctcttaaaaggatgggaatcccgtcgccctcagctggtgcgctctccactgggtcgtggggctcctcatttcatcctaagtgagcccctccatcacctgtgtgttaaggaggcatttctttcccatcagtaaacacatttcgcctcttcggccgaggtaggaatataaaaggcccctggcctacccaagttttggtccagcaggggagccaggccgggaaagggccaagctgccacactcggcttgtggggctgtgtggtgccgtgatgcagctgtgggtttggccaccgacagacctgggctcaaattggacctgctgcttttgactgtgagaccttccataagctccttttgctccaagcctcagttttctcctctgtgaaacagagaaaatcgttcctatcagagttcttatgaggatgaaatgggattttggatgtaaaatgcttccatccagtacctgctaaacaaaatgcttactaatggccgggcgcggtggctcacgcctgtaatcccagcactttgggaggctgaggcgggcggatcgcttgaggtcaggagttcgagaccagcctggccaatatggtgaaaccctgtctctactaaaagtgcaaaaattacccgggcgtggtggtgagtgcctgtaatcccagctatccagaggctgaggcacaagaattatttgaacctgggaggtggagtttgcagtgagctgagattacgccactgcactccagcctaggcaaaagagcaagagtctgtctcaaaaaaaaaaaaatgcttactaagtggcagtggtatctatgatgctatagatgcttccctagccctagcccagcccctcctaaatagggagacccaagattctgtagcttctggcccaatccctcatggccccagagcactctgggcctcctgaccctttgtctccctagacagcacccaagaaaacctcatttggctcgctgaaggatgaagaccggattttcaccaacctgtacggccgccatgactggaggtgagacagtgcccttagtgtgttgggtcccggagcaaggtgtccccttcattgccttccctattctgtccaggctgaaaggttccctgagtcgaggtgactggtacaagacaa

SEQ ID NO: 21701 - protein, 34 aa, Homo sapiens
MLATRRLLGWSLPARVSVRFSGDTSSAWRKFCRL

SEQ ID NO: 21702 - DNA, 3160 bp, Homo sapiens
gtcgcggccgcgcccgtgcacgagcagtccctggggtctgtagtggcctctggagagcccttctccccaggccaggcgggaaggcccccgctccggcctggttgaagtaggggaacgggtcccaacgcggggccgactcccttgaccctctgacttgctggcttcccttgttttacagtcctcggcctggcggaagttttgcaggttgtgaagacccctagtctttcattctctccttgtcacagccttgtagggcgtgaaggggtcattgccccatttagggatgcgcacctcctgatttcccgtccactgctctgcgccctgaagtggctgaaaagtgctcttaaaaggatgggaatcccgtcgccctcagctggtgcgctctccactgggtcgtggggctcctcatttcatcctaagtgagcccctccatcacctgtgtgttaaggaggcatttctttcccatcagtaaacacatttcgcctcttcggccgaggtaggaatataaaaggcccctggcctacccaagttttggtccagcaggggagccaggccgggaaagggccaagctgccacactcggcttgtggggctgtgtggtgccgtgatgcagctgtgggtttggccaccgacagacctgggctcaaattggacctgctgcttttgactgtgagaccttccataagctccttttgctccaagcctcagttttctcctctgtgaaacagagaaaatcgttcctatcagagttcttatgaggatgaaatgggattttggatgtaaaatgcttccatccagtacctgctaaacaaaatgcttactaatggccgggcgcggtggctcacgcctgtaatcccagcactttgggaggctgaggcgggcggatcgcttgaggtcaggagttcgagaccagcctggccaatatggtgaaaccctgtctctactaaaagtgcaaaaattacccgggcgtggtggtgagtgcctgtaatcccagctatccagaggctgaggcacaagaattatttgaacctgggaggtggagtttgcagtgagctgagattacgccactgcactccagcctaggcaaaagagcaagagtctgtctcaaaaaaaaaaaaatgcttactaagtggcagtggtatctatgatgctatagatgcttccctagccctagcccagcccctcctaaatagggagacccaagattctgtagcttctggcccaatccctcatggccccagagcactctgggcctcctgaccctttgtctccctagacagcacccaagaaaacctcatttggctcgctgaaggatgaagaccggattttcaccaacctgtacggccgccatgactggaggtgagacagtgcccttagtgtgttgggtcccggagcaaggtgtccccttcattgccttccctattctgtccaggctgaaaggttccctgagtcgaggtgactggtacaagacaaaggagatcctgctgaaggggcccgactggatcctgggcgagatcaagacatcgggtttgaggggccgtggaggcgctggcttccccactggcctcaagtggagcttcatgaataagccctcagatggcaggcccaagtatctggtggtgaacgcagacgagggggagccgggcacctgcaaggaccgggagatcttacgccatgatcctcacaagctgctggaaggctgcctggtggggggccgggccatgggcgcccgcgctgcctatatctacatccgaggggaattctacaatgaggcctccaatctgcaggtggccatccgagaggcctatgaggcaggtctgattggcaagaatgcttgtggctctggctatgattttgacgtgtttgtggtgcgcggggctggggcctacatctgtggagaggagacagcgctcatcgagtccattgagggcaagcagggcaagccccgcctgaagccccccttccccgcagacgtgggtaaggcctggcgtaaccctgggtcagactgtgtcctgtgacacccgggatctggctaggctccctttggattgttcttagggatttctgagtggcttcccggctggggccagatagagagtaggctggcaacaacacacaggctcccccagggccgcctgctgtccctcctcctgcctcggtcccctccgcaccagtgctgctctgtggctccaccttcacagtgcctgttctgaggctaagggcatggggtgaacaaggcaatgggcatctctggagtttggggtccagcagggataagaatgataaggggatattagagcaggggctctgccatgggtgcaggaccctgggacacacctccctgccaggaaacttgccccaccccctagcagccaccagttctcttcccatttccctgaaggagtgtttggctgccccacaactgtggccaacgtggagacatgggggcaggtgtccacaaagagagcctgggcgggagggctcaggagacggggctgggtctaggggctgactaagggcctgggctcaggactaggcaggtgtgccggccccagccctgaccatgcatccctttggggaccgacttggggccccagggggtgtcacgggcggctgggacaacctccttgctgtgatccctggcggctcgtctaccccactgatccccaagtctgtgtgtgagacggtgctgatggacttcgatgcgctggtgcaggcacagacaggcctgggcacagctgcggtgatcgtcatggaccgctcgacggacatcgtgaaagccatcgcccgcctcattgagttctataagcacgagagctgtggccagtgtaccccatgccgtgagggtgtggactggatgaacaaggtgatggcacgtttcgtgaggggggatgcccggccggccgagatcgactccctgtgggagatcagcaagcagatagaaggccatacgatttgtgctctgggtgacggggccgcctggcctgtgcagggtctgatccgccactttcggccggagctcgaggagcggatgcagcggtttgcccagcagcatcaggcccggcaggctgcctcttagcccaccaccctggcctgctgtcctgcgtctatccatgtggaatgctggacaataaagcgagtgctgcccaccctccagctgc

SEQ ID NO: 21703 - protein, 234 aa, Homo sapiens
MKTGFSPTCTAAMTGGETVPLVCWVPEQGVPFIAFPILSRLKGSLSRGDWYKTKEILLKGPDWILGEIKTSGLRGRGGAGFPTGLKWSFMNKPSDGRPKYLVVNADEGEPGTCKDREILRHDPHKLLEGCLVGGRAMGARAAYIYIRGEFYNEASNLQVAIREAYEAGLIGKNACGSGYDFDVFVVRGAGAYICGEETALIESIEGKQGKPRLKPPFPADVGKAWRNPGSDCVL

SEQ ID NO: 21704 - DNA, 1387 bp, Homo sapiens
gggtttggccaccgacagacctgggctcaaattggacctgctgcttttgactgtgagaccttccataagctccttttgctccaagcctcagttttctcctctgtgaaacagagaaaatcgttcctatcagagttcttatgaggatgaaatgggattttggatgtaaaatgcttccatccagtacctgctaaacaaaatgcttactaatggccgggcgcggtggctcacgcctgtaatcccagcactttgggaggctgaggcgggcggatcgcttgaggtcaggagttcgagaccagcctggccaatatggtgaaaccctgtctctactaaaagtgcaaaaattacccgggcgtggtggtgagtgcctgtaatcccagctatccagaggctgaggcacaagaattatttgaacctgggaggtggagtttgcagtgagctgagattacgccactgcactccagcctaggcaaaagagcaagagtctgtctcaaaaaaaaaaaaatgcttactaagtggcagtggtatctatgatgctatagatgcttccctagccctagcccagcccctcctaaatagggagacccaagattctgtagcttctggcccaatccctcatggccccagagcactctgggcctcctgaccctttgtctccctagacagcacccaagaaaacctcatttggctcgctgaaggatgaagaccggattttcaccaacctgtacggccgccatgactggaggtgagacagtgcccttagtgtgttgggtcccggagcaaggtgtccccttcattgccttccctattctgtccaggctgaaaggttccctgagtcgaggtgactggtacaagacaaaggagatcctgctgaaggggcccgactggatcctgggcgagatcaagacatcgggtttgaggggccgtggaggcgctggcttccccactggcctcaagtggagcttcatgaataagccctcagatggcaggcccaagtatctggtggtgaacgcagacgagggggagccgggcacctgcaaggaccgggagatcttacgccatgatcctcacaagctgctggaaggctgcctggtggggggccgggccatgggcgcccgcgctgcctatatctacatccgaggggaattctacaatgaggcctccaatctgcaggtgggtagggagagatgtagacagatgagaaggtgttcagtgtgcactcacacacccctcacccagcacagttgttctgaggtgttagtacctggtctgtcagtggttgaactgggggagtggtggccagtcctgcatgcatcccaaatgggacttggctcccaaagcctccttccagggctcctaatgctgctggtgtaaattttttttttttgct

SEQ ID NO: 21705 - protein, 224 aa, Homo sapiens
MKTGFSPTCTAAMTGGETVPLVCWVPEQGVPFIAFPILSRLKGSLSRGDWYKTKEILLKGPDWILGEIKTSGLRGRGGAGFPTGLKWSFMNKPSDGRPKYLVVNADEGEPGTCKDREILRHDPHKLLEGCLVGGRAMGARAAYIYIRGEFYNEASNLQVGRERCRQMRRCSVCTHTPLTQHSCSEVLVPGLSVVELGEWWPVLHASQMGLGSQSLLPGLLMLLV

SEQ ID NO: 21706 - DNA, 2593 bp, Homo sapiens
ctgtctcaaaaaaaaaaaaatgcttactaagtggcagtggtatctatgatgctatagatgcttccctagccctagcccagcccctcctaaatagggagacccaagattctgtagcttctggcccaatccctcatggccccagagcactctgggcctcctgaccctttgtctccctagacagcacccaagaaaacctcatttggctcgctgaaggatgaagaccggattttcaccaacctgtacggccgccatgactggaggtgagacagtgcccttagtgtgttgggtcccggagcaaggtgtccccttcattgccttccctattctgtccaggctgaaaggttccctgagtcgaggtgactggtacaagacaaaggagatcctgctgaaggggcccgactggatcctgggcgagatcaagacatcgggtttgaggggccgtggaggcgctggcttccccactggcctcaagtggagcttcatgaataagccctcagatggcaggcccaagtatctggtggtgaacgcagacgagggggagccgggcacctgcaaggaccgggagatcttacgccatgatcctcacaagctgctggaaggctgcctggtggggggccgggccatgggcgcccgcgctgcctatatctacatccgaggggaattctacaatgaggcctccaatctgcaggtggccatccgagaggcctatgaggcaggtctgattggcaagaatgcttgtggctctggctatgattttgacgtgtttgtggtgcgcggggctggggcctacatctgtggagaggagacagcgctcatcgagtccattgagggcaagcagggcaagccccgcctgaagccccccttccccgcagacgtgggtaaggcctggcgtaaccctgggtcagactgtgtcctgtgacacccgggatctggctaggctccctttggattgttcttagggatttctgagtggcttcccggctggggccagatagagagtaggctggcaacaacacacaggctcccccagggccgcctgctgtccctcctcctgcctcggtcccctccgcaccagtgctgctctgtggctccaccttcacagtgcctgttctgaggctaagggcatggggtgaacaaggcaatgggcatctctggagtttggggtccagcagggataagaatgataaggggatattagagcaggggctctgccatgggtgcaggaccctgggacacacctccctgccaggaaacttgccccaccccctagcagccaccagttctcttcccatttccctgaaggagtgtttggctgccccacaactgtggccaacgtggagacagtggcagtgtcccccacaatctgccgccgtggaggtacctggtttgctggctttggcagagaacgcaactcaggcaccaaactattcaacatctctggccatgtcaaccacccttgcactgtggaggaggagatgtctgtgcccttgaaagaactgattgagaagcatgctggtaaggcctggggccagccaggtggtgggggggtgcgcagtgggggcaggtgtccacaaagagagcctgggcgggagggctcaggagacggggctgggtctaggggctgactaagggcctgggctcaggactaggcaggtgtgccggccccagccctgaccatgcatccctttggggaccgacttggggccccagggggtgtcacgggcggctgggacaacctccttgctgtgatccctggcggctcgtctaccccactgatccccaagtctgtgtgtgagacggtgctgatggacttcgatgcgctggtgcaggcacagacaggcctgggcacagctgcggtgatcgtcatggaccgctcggtaagggttcacacaccagccctggtccctgccctcctggttgctgtctccctccctgggcctcccagaaaaccctcttgccagcactcaggtctcagttcctgcagcctgagataaagcaaggtggaagaggagggaggaaggctgctctgaggagaataccccggagtctgggcagcacagggggcccagggaggctggaggaggccagaacgctgggtgggctgggaagagcttctggaactgggggaggggctgctgctagggggctgaggcccaggcttctgtctggccgtgggtgcctgctaattgcccctcgtcacccagacggacatcgtgaaagccatcgcccgcctcattgagttctataagcacgagagctgtggccagtgtaccccatgccgtgagggtgagcatcgggcaggttgggggcttgcttgctgtggcttcatttaacctcctccccaccacgtggcctgcagccctcaagcgccgccccacatcctggctggggagatcatcaggccctctcttgtggctgtggctgcaggtgtggactggatgaacaaggtgatggcacgtttcgtgaggggggatgcccggccggccgagatcgactccctgtgggagatcagcaagcagatagaaggccatacgatttgtgctctgggtgacggggccgcctggcctgtgcaggtattcaccacccttctgcg

SEQ ID NO: 21707 - protein, 234 aa, Homo sapiens; identical to SEQ ID NO: 21703

SEQ ID NO: 21708 - DNA, 252 bp, Homo sapiens
ggagtgtttggctgccccacaactgtggccaacgtggagacagtggcagtgtcccccacaatctgccgccgtggaggtacctggtttgctggctttggcagagaacgcaactcaggcaccaaactattcaacatctctggccatgtcaaccacccttgcactgtggaggaggagatgtctgtgcccttgaaagaactgattgagaagcatgctgggggtgtcacgggcggctgggacaacctccttgctgtg

SEQ ID NO: 21709 - protein, 66 aa, Homo sapiens
SVWLPHNCGQRGDSGSVPHNLPPWRYLVCWLWQRTQLRHQTIQHLWPCQPPLHCGGGDVCALERTD

SEQ ID NO: 21710 - DNA, 878 bp, Homo sapiens
gccccacaactgtggccaacgtggagacagtggcagtgtcccccacaatctgccgccgtggaggtacctggtttgctggctttggcagagaacgcaactcaggcaccaaactattcaacatctctggccatgtcaaccacccttgcactgtggaggaggagatgtctgtgcccttgaaagaactgattgagaagcatgctggtaaggcctggggccagccaggtggtgggggggtgcgcagtgggggcaggtgtccacaaagagagcctgggcgggagggctcaggagacggggctgggtctaggggctgactaagggcctgggctcaggactaggcaggtgtgccggccccagccctgaccatgcatccctttggggaccgacttggggccccagggggtgtcacgggcggctgggacaacctccttgctgtgatccctggcggctcgtctaccccactgatccccaagtctgtgtgtgagacggtgctgatggacttcgatgcgctggtgcaggcacagacaggcctgggcacagctgcggtgatcgtcatggaccgctcggtgtggactggatgaacaaggtgatggcacgtttcgtgaggggggatgcccggccggccgagatcgactccctgtgggagatcagcaagcagatagaaggccatacgatttgtgctctgggtgacggggccgcctggcctgtgcagggtctgatccgccactttcggccggagctcgaggagcggatgcagcggtttgcccagcagcatcaggcccggcaggctgcctcttagcccaccaccctggcctgctgtcctgcgtctatccatgtggaatgctggacaataaagcgagtgctgcccaccctccagctgc

SEQ ID NO: 21711 - protein, 73 aa, Homo sapiens
MNKVMARFVRGDARPAEIDSLWEISKQIEGHTICALGDGAAWPVQGLIRHFRPELEERMQRFAQQHQARQAAS

SEQ ID NO: 21712 - DNA, 1100 bp, Homo sapiens
gctcaggactaggcaggtgtgccggccccagccctgaccatgcatccctttggggaccgacttggggccccagggggtgtcacgggcggctgggacaacctccttgctgtgatccctggcggctcgtctaccccactgatccccaagtctgtgtgtgagacggtgctgatggacttcgatgcgctggtgcaggcacagacaggcctgggcacagctgcggtgatcgtcatggaccgctcggtaagggttcacacaccagccctggtccctgccctcctggttgctgtctccctccctgggcctcccagaaaaccctcttgccagcactcaggtctcagttcctgcagcctgagataaagcaaggtggaagaggagggaggaaggctgctctgaggagaataccccggagtctgggcagcacagggggcccagggaggctggaggaggccagaacgctgggtgggctgggaagagcttctggaactgggggaggggctgctgctagggggctgaggcccaggcttctgtctggccgtgggtgcctgctaattgcccctcgtcacccagacggacatcgtgaaagccatcgcccgcctcattgagttctataagcacgagagctgtggccagtgtaccccatgccgtgagggtgagcatcgggcaggttgggggcttgcttgctgtggcttcatttaacctcctccccaccacgtggcctgcagccctcaagcgccgccccacatcctggctggggagatcatcaggccctctcttgtggctgtggctgcaggtgtggactggatgaacaaggtgatggcacgtttcgtgaggggggatgcccggccggccgagatcgactccctgtgggagatcagcaagcagatagaaggccatacgatttgtgctctgggtgacggggccgcctggcctgtgcagggtctgatccgccactttcggccggagctcgaggagcggatgcagcggtttgcccagcagcatcaggcccggcaggctgcctcttagcccaccaccctggcctgctgtcctgcgtctatccatgtggaatgctggacaataaagcgagtgctgcccaccctcca

SEQ ID NO: 21713 - protein, 73 aa, Homo sapiens; identical to SEQ ID NO: 21711

SEQ ID NO: 21714 - DNA, 741 bp, Homo sapiens
tcgtcatggaccgctcggtaagggttcacacaccagccctggtccctgccctcctggttgctgtctccctccctgggcctcccagaaaaccctcttgccagcactcaggtctcagttcctgcagcctgagataaagcaaggtggaagaggagggaggaaggctgctctgaggagaataccccggagtctgggcagcacagggggcccagggaggctggaggaggccagaacgctgggtgggctgggaagagcttctggaactgggggaggggctgctgctagggggctgaggcccaggcttctgtctggccgtgggtgcctgctaattgcccctcgtcacccagacggacatcgtgaaagccatcgcccgcctcattgagttctataagcacgagagctgtggccagtgtaccccatgccgtgagggtgtggactggatgaacaaggtgatggcacgtttcgtgaggggggatgcccggccggccgagatcgactccctgtgggagatcagcaagcagatagaaggccatacgatttgtgctctgggtgacggggccgcctggcctgtgcagggtctgatccgccactttcggccggagctcgaggagcggatgcagcggtttgcccagcagcatcaggcccggcaggctgcctcttagcccaccaccctggcctgctgtcctgcgtctatccatgtggaatgctggacaataaagcgagtgctgcccaccctccagctgc

SEQ ID NO: 21715 - protein, 73 aa, Homo sapiens; identical to SEQ ID NO: 21711

SEQ ID NO: 21716 - DNA, 1617 bp, Homo sapiens
atggcgggcactgcggcagcaggtgggcagcctccccgggttagcatgcaggagcacatggccatcgatgtgagcccgggccccatccggcccatccgcctcatttcccactacttcccgcacttttacccttttgcggagcctgccctgcaccctccgaacctgcgccccgcagcggcgtccgccgtccgctctgcaccccagctgcagcccgacccagagccagaaggagactcagacgacagcactgccctgggcaccctggagttcacacttctttttgaagcggacaacagtgccctgcattgcacggctcatcgtgccaagggcctcaagccattggcctcaggctccgcggatgcctatgtcaaagccaatctgctgccaggggccagcaaggccagccagcttcggacacacaccgttcggggcacgagggtacctgtctgggaggagacactcacctatcacggcttcacccgccaggatgctgagtgcaagacccttaggtctgacctgggcggccaccaggctgtgtgtgtgcgaggacccatggtacagcgacagtggcaggcaccttccctgggggagctgcgggtgcccctgaggaagctggtgccaaaccgagccaggagctttgacatctgtctggagaagcggaggctggccaagaggcccaagagcctggacacagcctgtggcatgtccctctatgaggtggtgccgggtgccccgccccctggtggagccacaagttgctgcagctgtcgattagctaagcccaagtggctgaagcccaccaaggtggcatggacaggccacttcacccagcgccagccccgtgtaccctccgccccagatcccaagcacaacagcgcccggagcatggaggaggtggagacagaggtggcctgggaggaatgtgggcacgtcctactgtcactgtgctacagctctcagcagggtggcttgctggtaggtgtgctgcgctgcgcccacctggcccccatggatgccaatggttactcggaccccttcgtgcgccttttcctgcatccaaatgcagggaagaaatctaaattcaaaaccagtgttcacaggaagaccctgaaccccgagttcaatgaggaattcttttactcaggcccacgggaggagctggcccagaagacgctgctggtgtctgtgtgggactatgacctaggcacggctgatgacttcattggtgagtgggaacatgaggagctggggtgggggcccagtaggctcctggcggttcctgacccatcccccatggcaggcggggtgcagctgggcagccatgccagtggggagcgcctgcggcactggcttgagtgcctgggccacagtgaccaccgcctgaagctgtggcacccgctggacagcaagcctgtccagctcagcgactagcccatgggccctgcctgccgcccctccactacagctgcctgaaacgtccccacaaaaatgatggcggctggggctgccttaccctcatgcccagccccaagtcagagaggtgtttcctctctccccgctttcacattcaccccaccccaaatcatggagccgaaataaacatctccttcaagccag

SEQ ID NO: 21717 - protein, 476 aa, Homo sapiens
MAGTAAAGGQPPRVSMQEHMAIDVSPGPIRPIRLISHYFPHFYPFAEPALHPPNLRPAAASAVRSAPQLQPDPEPEGDSDDSTALGTLEFTLLFEADNSALHCTAHRAKGLKPLASGSADAYVKANLLPGASKASQLRTHTVRGTRVPVWEETLTYHGFTRQDAECKTLRSDLGGHQAVCVRGPMVQRQWQAPSLGELRVPLRKLVPNRARSFDICLEKRRLAKRPKSLDTACGMSLYEVVPGAPPPGGATSCCSCRLAKPKWLKPTKVAWTGHFTQRQPRVPSAPDPKHNSARSMEEVETEVAWEECGHVLLSLCYSSQQGGLLVGVLRCAHLAPMDANGYSDPFVRLFLHPNAGKKSKFKTSVHRKTLNPEFNEEFFYSGPREELAQKTLLVSVWDYDLGTADDFIGEWEHEELGWGPSRLLAVPDPSPMAGGVQLGSHASGERLRHWLECLGHSDHRLKLWHPLDSKPVQLSD

SEQ ID NO: 21718 - DNA, 1857 bp, Homo sapiens
tgataagggggctaatatccaaaagaaacaaggaactcaagaaacaaatatccccatttaaacatgggcaaaggacctgaacatacatttctcaaaagacacgtgaaaaaatgctcaacatcgctaatcgtgaaggaaatagaagttaaaatctcaatgagataccatctcacacctgttagaaaagctactaccaaaccatgggagacaacaaatgctcgtgaggatgtggaggaaagggaagccttatgtgctgtttgtgggaaggtaaatgagcacagccattttggaaaatcatatggcagtcccttagaacactaaaaatagagctaccgtgtgatccagcaacctcacttgtgggtagtatccacaggaattgaagtcagcatgctgaagaggtgtctgcctccgtgttcactgcagtgccattcacaacagctaagacacggcagcaacctgactgcccagcatcagacggatggataggatggtctgtctatactgttcagccttaacaaagatggacattctatcatttgtgacaacatggatgaacctggaggacgatatgctaagtgaaataagctaggcacagaaagacaaatactatacggtctgatttttatggggaatctgaaaaagttgaactcctagaagcagagagaatggtggtcaccaggggctggagagtgggggactagggatggggagaggggagacattgctcttagggtacaaagttccagtcaggaagagtaagctgaaggccctgttgcacagcatgacaaacatccctaacaatagcgccttgtgtatttcacagttgcctgaagagcacattttaagtgttctttttttcattagcctgactgactctttctacaatgcatattgtagaaattgcatttctacacatatcacatcagaacaccatattgtaccccatacacacctacggttatgttgattaaaaattaaaagaataactggggagaagagaggaatgtgggcacgtcctactgtcactgtgctacagctctcagcagggtggcttgctggtaggtgtgctgcgctgcgcccacctggcccccatggatgccaatggttactcggaccccttcgtgcgcctgtgagtgaactggggtaggcaggcgggaggtgaggataaggcggtgactcctcacctctccagggccacacctaacccgccaatcttccccgatcagtttcctgcatccaaatgcagggaagaaatctaaattcaaaaccagtgttcacaggaagaccctgaaccccgagttcaatgaggtgagccagggccaggcaggtcccagccaaccctggccttgacatgctgagccactaccctaccgtggcctgcttcttaagctgtgggagagccgaggctgcctccttcccgcctctctgcccttctccctgcaggaattcttttactcaggcccacgggaggagctggcccagaagacgctgctggtgtctgtgtgggactatgacctaggcacggctgatgacttcattggcggggtgcagctgggcagccatgccagtggggagcgcctgcggcactggcttgagtgcctgggccacagtgaccaccgcctgaagctgtggcacccgctggacagcaagcctgtccagctcagcgactagcccatgggccctgcctgccgcccctccactacagctgcctgaaacgtccccacaaaaatgatggcggctggggctgccttaccctcatgcccagccccaagtcagagaggtgtttcctctctccccgctttcacattcaccccaccccaaatcatggagccgaaataaacatctccttcaagccag

SEQ ID NO: 21719 - protein, 31 aa, Homo sapiens
MTSLAGCSWAAMPVGSACGTGLSAWATVTTA

SEQ ID NO: 21720 - DNA, 1875 bp, Homo sapiens
tccccttccacactgtggaagctttgttctttcactctttgcaataaatcttgctactgttcactctttgggtccacactgcttttatgagctataacactcaccgcaaaggtctgcagcttcactcctgaagccagcgagaccacaagcccactgggaggaacgaacaactccaggcgcgcaatgaacaactccaggcgcgccgccttaagagctgtaacactcaccgcgaaggtctgcagtttcactcctaagccagcgagaccacgaacccaccagaaggaagaaactccaaacacatctgaacattagaaggaacaaactccagatgcgccaccttaagagctgtaacactcaccgcgagggtccacggcttcattcttgaagtcagtgagagaccaagaacccaccaattccggacacattttggcgaccatgaagggactttcgcctattgccaagcggtgagacaatcgctgagcagtgagaccatcacctattgccgagcggtgagaccattgcctatcgccaagcaaatcgaggccatcaagctacagatggtcttacaaatggaaccccaaatgagttcaactaacaacttctaccgaggacccctggactgaccagctggcacttcccctggcctagagagttcccctctgaaggacactacaactgcaaagccccttcttcgcccctatccagcaggaagtagctagagcagtcatcggccaaattcccaacagcagttggggtgtcctgttgattgaggggagacagcatgctggcagtcctcacagccctcactcgctcgctcactctcggcacctcctctgcctgggctcccactttggcagcacttgaggagcccttcagctctgtatctagctactctgatgggtccttggagaacctttatgtctagctcagggattgtaaatacaccaatcagcaccctgtgtctagctcagggtttgtgaatgcaccaatggacactctgtatctagctactctggtggggccttggagaacctttgtgtcaacactctgtatctaactaacctggtggggatgtggagaacctttgtgtctagctcagggattgtaaacgcaccaatcagtgccctgtcaaaccactcggctctaccaatcagcaggatgtgggtggggccagataagagaataaaagcaggctgcccgagccagcagtggcaacccgctcaggtccccttccacactgtggaagctttgttctttcgctctttgcaatacatcttgctactgctcactctttgggtccacactgcttttatgagctgtaacactcaccacaaaggtctgtagcttcactcctgagccagcgagaccacgaactcaccagaaggaagaaactccaaacacatccgaacatcagaagaaacaaactccagacgcaccaccttaagagctgtaacactcactgtgagggtccatggcttcattcttgaagtcagtgagaccaagaacccaccaattccggacacacaaccggccatgtgacaggctcagggaaggacatgtgactcaaggcaggccagtgaagtgcaattctaggttagactggccgggaaggagcggccgtgttttctgttgatggatgctgctgccctctcctcaacctctcacgctctgcactacagacaacctccttggggctgaggccagcacagcgcaaagcacagcaagaggggagcccgagcccctggatccagccatcctccacggcaagctcagaccacccgctccctcagctctttcacagaaccctggtctacctagttgatgtcttatataattccactattatctgtgattaattaatgtggaaccacatga

SEQ ID NO: 21721 - protein, 90 aa, Homo sapiens
MWRTFVSSSGIVNAPISALSNHSALPISRMWVGPDKRIKAGCPSQQWQPAQVPFHTVEALFFRSLQYILLLLTLWVHTAFMSCNTHHKGL

SEQ ID NO: 21722 - DNA, 747 bp, Homo sapiens
agtgtcccggccgcgcaggacttgacatgctgcccgactgcctgtcggccgagggcgagctgcgctgccgccggctgctggcaggggccacggcccggctccgcgcgcggcccgcgtcggccgcggtgctcgtgccgctctgctcagtgcgtggggtcccggcgctgctgtacacgctgcggtccagccgcctgaccgggaggcacaagggcgacgtcagtttcccaggcggcaagtgcgacccggctgaccaagatgtggtgcacacggccctgcgggaaacccgggaggagctgggcctggcagtgcccgaggagcacgtgtggggcctgctgcggcctgtgtatgatccgcaaaaggccaccgtggtgccagtgcttgctggtgtaggcccactggatccccagagcctcaggcccaactcggaggaggtagatgaggtgtttgcactgccgctggcccacctgctgcagacgcagaatcagggctatacccacttctgccggggtggccacttccgctacacactacccgtcttcctgcatggaccacaccgggtctggggcctcacagctgtcatcactgagtttgccctgcagctgctggcacctggtacctaccagccccgcctggccggcctgacctgctcaggggctgagggtctggcccgccctaagcagcccctggcttcaccctgtcaggccagctccactccaggactgaataaaggtctttgacagctctaga

SEQ ID NO: 21723 - protein, 236 aa, Homo sapiens
MLPDCLSAEGELRCRRLLAGATARLRARPASAAVLVPLCSVRGVPALLYTLRSSRLTGRHKGDVSFPGGKCDPADQDVVHTALRETREELGLAVPEEHVWGLLRPVYDPQKATVVPVLAGVGPLDPQSLRPNSEEVDEVFALPLAHLLQTQNQGYTHFCRGGHFRYTLPVFLHGPHRVWGLTAVITEFALQLLAPGTYQPRLAGLTCSGAEGLARPKQPLASPCQASSTPGLNKGL

SEQ ID NO: 21724 - DNA, 809 bp, Homo sapiens
cggccgcgcaggacttgacatgctgcccgactgcctgtcggccgagggcgagctgcgctgccgccggctgctggcaggggccacggcccggctccgcgcgcggcccgcgtcggccgcggtgctcgtgccgctctgctcagtgcgtggggtcccggcgctgctgtacacgctgcggtccagccgcctgaccgggaggcacaagggcgacgtcagtttcccaggcggcaagtgcgacccggctgaccaagatgtggtgcacacggccctgcgggaaacccgggaggagctgggcctggcagtgcccgaggagcacgtgtggggcctgctgcggcctgtgtatgatccgcaaaaggccaccgtggtgccagtgcttgctggtgtaggcccactggatccccagagcctcaggcccaactcggaggaggtgagctgggggatatgagggggttgggctgttccagtcctctgtctaccctctctgcctcctgcctgcaggtagatgaggtgtttgcactgccgctggcccacctgctgcagacgcagaatcagggctatacccacttctgccggggtggccacttccgctacacactacccgtcttcctgcatggaccacaccgggtctggggcctcacagctgtcatcactgagtttgccctgcagctgctggcacctggtacctaccagccccgcctggccggcctgacctgctcaggggctgagggtctggcccgccctaagcagcccctggcttcaccctgtcaggccagctccactccaggactgaataaaggtctttgacagctcta

SEQ ID NO: 21725 - protein, 140 aa, Homo sapiens; identical to SEQ ID NO: 2813

SEQ ID NO: 21726 - DNA, 1620 bp, Homo sapiens
ccgctgccgctctgcagccccccaggcgggacgcgtcgcgcgggctgccccttctccctctcagctttcggagggacccgggctgagcgccccgccccgcctcgccccgcctcttccctcgcccgatcccgcgccctcagtgtcccggccgcgcaggacttgacatgctgcccgactgcctgtcggccgagggcgagctgcgctgccgccggctgctggcaggggccacggcccggctccgcgcgcggcccgcgtcggccgcggtgctcgtgccgctctgctcagtgcgtggggtcccggcgctgctgtacacgctgcggtccagccgcctgaccgggaggcacaagggcgacgtcaggtacagcggccgggaactcctcgccctttgccggaggctacaggagcccggggctggcagggacctctggcagggcacttagccccttcgagcctcggtttccgcctccgtaaaatgggtctggggagagtccctccgcccaagggctgcagcgagaggtcagcgatccgtgtccgtcggccccggtgcacctgccggggcgccacgtcctcgccgcgtgggcccctcgtacgcgtccttgcgcgcacgcctgggccgggacacccctttgagctgtttcccgcttagagggcggacgccgccccctgccggcgactacggagaggttcgggccccgcccggcgggaattaagaacatcctgaggacaatgtcagtgttgctggggccaccataggccgaatttgggtatctgagccccaggatcttcttgcccctgctgcagaccctcttatcctgcgctgtcccgggcctctcttccttatccccattgctcagggaggtaaactggcctccagaggtcgcatggcttgcctggggcctcccagtaaactaggggcagaggcaggcgacacttcggtgggccagtggccccccccgcactgccgataccccgacctctccgtggccccaagagtccaaggaccagactccttgtgtctgtttagtttcccaggcggcaagtgcgacccggctgaccaagatgtggtgcacacggccctgcgggaaacccgggaggagctgggcctggcagtgcccgaggagcacgtgtggggcctgctgcggcctgtgtatgatccgcaaaaggccaccgtggtgccagtgcttgctggtgtaggcccactggatccccagagcctcaggcccaactcggaggaggtgagctgggggatatgagggggttgggctgttccagtcctctgtctaccctctctgcctcctgcctgcaggtagatgaggtgtttgcactgccgctggcccacctgctgcagacgcagaatcagggctatacccacttctgccggggtggccacttccgctacacactacccgtcttcctgcatggaccacaccgggtctggggcctcacagctgtcatcactgagtttgccctgcagctgctggcacctggtacctaccagccccgcctggccggcctgacctgctcaggggctgagggtctggcccgccctaagcagcccctggcttcaccctgtcaggccagctccactccaggactgaataaaggtctttgacagctcta

SEQ ID NO: 21727 - protein, 123 aa, Homo sapiens
MACLGPPSKLGAEAGDTSVGQWPPPHCRYPDLSVAPRVQGPDSLCLFSFPGGKCDPADQDVVHTALRETREELGLAVPEEHVWGLLRPVYDPQKATVVPVLAGVGPLDPQSLRPNSEEVSWGI

SEQ ID NO: 21728 - DNA, 361 bp, Homo sapiens
cccgactgcctgtcggccgagggcgagctgcgctgccgccggctgctggcaggggccacggcccggctccgcgcgcggcccgcgtcggccgcggtgctcgtgccgctctgctcagtgcgtggggtcccggcgctgctgtacacgctgcggtccagccgcctgaccgggaggcacaagggcgacgtcagtttcccaggcggcaagtgcgacccggctgaccaagatctgctggcacctggtacctaccagccccgcctggccggcctgacctgctcaggggctgagggtctggcccgccctaagcagcccctggcttcaccctgtcaggccagctccactccaggactgaataaaggtcttt

SEQ ID NO: 21729 - protein, 119 aa, Homo sapiens
PDCLSAEGELRCRRLLAGATARLRARPASAAVLVPLCSVRGVPALLYTLRSSRLTGRHKGDVSFPGGKCDPADQDLLAPGTYQPRLAGLTCSGAEGLARPKQPLASPCQASSTPGLNKG

SEQ ID NO: 21730 - DNA, 1547 bp, Homo sapiens
acgagtggtgaccaccccttccagcaggcaggttcccagccccagccaagcagtgtttctccaggagccggacagcctctctgtctccatggcagccttcctatctgctggcctcggcatacttgcaccctcagagacctaccccctacctacaaccagctctggctgggagccccggctggggtcaccattcccatcaggcccttgcaccagctctactggggcccaagctgtggccgagcccactgggcagggccccaagaacccacgtgtgtccagagtgacagttcagctggagatgaagcctctgtgggaggaattcaaccagctgggcactgagatgatcgtcaccaaggcaggcaggaggatgttcccccccttccaggtgaagatcctgggcatggactccctggccgactacgccctgctcatggacttcatccccctggacgacaagagatacaggtatgccttccacagctcggcctggctggtggcgggcaaggcagacccagccacacctggccgcgtgcacttccaccccgactcgccagccaagggtgcccagtggatgcgccagattgtgtcctttgacaagctcaagctgaccaacaacctgctggatgacaatggccacatcattctcaactctatgcaccgctaccagccccgtttccacgtggtcttcgtggacccacgcaaggacagtgagcgctatgcccaggagaacttcaagtccttcatcttcacagagacccagttcacagcagtgacagcctatcagaaccacaggatcacccagctgaaaatcgccagcaacccttttgccaaaggctttagagagagtgacctggactcctggcctgtggccccacggcccctgctcagtgtcccagcccggagtcacagcagcctcagtccctgtgtgctgaagggtgccacagacagggagaaagaccccaacaaagcttcagcttccacctccaagacccctgcttggctccatcatcagctgctgcccccacctgaggtcctgctggccccggccacctacaggcctgtcacgtatcagagcctgtactctggagccccgagccacctagggatcccaaggacccgaccagcaccataccccctccccaacatccgggctgatagggatcaaggaggcctgcctctcccagctgggctggggctcctgtcccccactgtggtgtgcctggggcctggccaggactcccagtgatgccagaagccctggggggaagccctgctaccctggaccttacaccgggtgtgggaatcagcctctgccccgccccctccagccccatctctgtctcaaggagagcagggtaggtgaaagtctagagaaagaggctacctgcccagggtcacagcaaggctgggaccatggcaagcttggaaccaggacttctatctcccaaccccagcagcctgaatactgtgccctcttgctttgggggtaactcccgaaaaccctgccttacctctcccttccccctaacattaaactatttggcatg

SEQ ID NO: 21731 - protein, 385 aa, Homo sapiens; identical to SEQ ID NO: 2815

SEQ ID NO: 21732 - DNA, 327 bp, Homo sapiens
gaccccagcactccgacctttggctgcatgaacctcagcccgtcccacccaccccctgctgtctgccagcttgccacaaaacttcccatctgtggatctccaggcccatgaataccagcctgtctgcgagttagacgccagtcctgcttcctaacccaagacacacctccccaacctcagtcttcccatctgaacgatgggtcctgaggcacagctctgagcacagaggtcccttctgccacctaccatgcaccatgttccttgccaggcctccccaacccctggcctcaatttccctttctataaaatggaagatgtccagaggtc

SEQ ID NO: 21733 - protein, 40 aa, Homo sapiens [sequence omitted]

SEQ ID NO: 21734 - DNA, 609 bp, Homo sapiens
ccctgcgtcgcgtggctgtgactgggggcacgcatggcaacgagatgtcgggcgtctacctggcccggcactggctgcatgcccccgcagagctgcagagagccagcttctccgctgtgcctgtgctggccaacccggcagccacatccggctgccgccgctactggacttcccccgcaccgaggccgggcacctggcaggcactgtgcatcctcagctgcaggaccgagacttccagccactgcagcctggtgctcccatcttccagatgttcagtggggaggacctgctctatgagggagagtccacggtgtaccccgtgttcattaacgaggctgcctactatgagaagggcgttgcctttgtccagactgagaagttcacattcaccgtgcctgccatgcccgcgctgacccctgccccgagcccagcttcctaacccaagacacacctccccaacctcagtcttcccatctgaacgatgggtcctgaggcacagctctgagcacagaggtcccttctgccacctaccatgcaccatgttccttgccaggcctccccaacccctggcctcaatttccctttctataaaatggaagatgtccagag

SEQ ID NO: 21735 - protein, 122 aa, Homo sapiens
MSGVYLARHWLHAPAELQRASFSAVPVLANPAATSGCRRYWTSPAPRPGTWQALCILSCRTETSSHCSLVLPSSRCSVGRTCSMRESPRCTPCSLTRLPTMRRALPLSRLRSSHSPCLPCPR

SEQ ID NO: 21736 - DNA, 1069 bp, Homo sapiens
tgtctgcgagttagacgccagtcctggtggcccgggaagcccagatccgcatcagcgagctgcagagagccagcttctccgctgtgcctgtgctggccaacccggcagccacatccggctgccgccgctacgtggaccatgacctcaaccgcaccttcaccagcagcttcctcaattccaggcccaccccggacgacccatatgaggtgacaagagcccgagagctgaaccagctgctggggcccaaggcctcgggccaggcctttgactttgtccttgacctgcacaacaccacggccaacatgggcacctgcttaatcgcgaagtcctcccacgaagtctttgccatgcacctgtgccgccatctgcagctgcagtaccccgagctgtcctgccaggtcttcctgtaccagcggtctggggaggagagctacaacctggactctgtggccaaaaatggactgggtctggagctgggcccccagccacagggtgtgctgcgggctgacattttctcaaggatgaggaccctggtggccacagttctggacttcatcgaactcttcaaccagggtacggcctttcctgcctttgagatggaagcctatagacccgtgggcgtcgtggacttcccccgcaccgaggccgggcacctggcaggcactgtgcatcctcagctgcaggaccgagacttccagccactgcagcctggtgctcccatcttccagatgttcagtggggaggacctgctctatgagggagagtccacggtgtaccccgtgttcattaacgaggctgcctactatgagaagggcgttgcctttgtccagactgagaagttcacattcaccgtgcctgccatgcccgcgctgacccctgccccgagcccagcttcctaacccaagacacacctccccaacctcagtcttcccatctgaacgatgggtcctgaggcacagctctgagcacagaggtcccttctgccacctaccatgcaccatgttccttgccaggcctccccaacccctggcctcaatttccctttctataaaatggaagatgtccagag

SEQ ID NO: 21737 - protein, 198 aa, Homo sapiens
MGTCLIAKSSHEVFAMHLCRHLQLQYPELSCQVFLYQRSGEESYNLDSVAKNGLGLELGPQPQGVLRADIFSRMRTLVATVLDFIELFNQGTAFPAFEMEAYRPVGVVDFPRTEAGHLAGTVHPQLQDRDFQPLQPGAPIFQMFSGEDLLYEGESTVYPVFINEAAYYEKGVAFVQTEKFTFTVPAMPALTPAPSPAS

SEQ ID NO: 21738 - DNA, 1393 bp, Homo sapiens
tcaacccacggggcaaagtccactttcttccctgaaggagcagcacagaacaaaagctccaggcagctgcttccgctgtttcgggggtagggcggagtgacagccccacgggccacgcagcaagcagaagatccccgggagtcaccctcaaccctctggggccacgtgggcccatgaataccagcctgtctgcgagttagacgccagtcctggtggcccgggaagcccagatccgcatcagcggttctgcaccccacaccagcatgtgctcactgcctgtgccccgggagcccctgcgtcgcgtggctgtgactgggggcacgcatggcaacgagatgtcgggcgtctacctggcccggcactggctgcatgcccccgcagagctgcagagagccagcttctccgctgtgcctgtgctggccaacccggcagccacatccggctgccgccgctacgtggaccatgacctcaaccgcaccttcaccagcagcttcctcaattccaggcccaccccggacgacccatatgaggtgacaagagcccgagagctgaaccagctgctggggcccaaggcctcgggccaggcctttgactttgtccttgacctgcacaacaccacggccaacatgggcacctgcttaatcgcgaagtcctcccacgaagtctttgccatgcacctgtgccgccatctgcagctgcagtaccccgagctgtcctgccaggtcttcctgtaccagcggtctggggaggagagctacaacctggactctgtggccaaaaatggactgggtctggagctgggcccccagccacagggtgtgctgcgggctgacattttctcaaggatgaggaccctggtggccacagttctggacttcatcgaactcttcaaccagggtacggcctttcctgcctttgagatggaagcctatagacccgtgggcgtcgtggacttcccccgcaccgaggccgggcacctggcaggcactgtgcatcctcagctgcaggaccgagacttccagccactgcagcctggtgctcccatcttccagatgttcagtggggaggacctgctctatgagggagagtccacggtgtaccccgtgttcattaacgaggctgcctactatgagaagggcgttgcctttgtccagactgagaagttcacattcaccgtgcctgccatgcccgcgctgacccctgccccgagcccagcttcctaacccaagacacacctccccaacctcagtcttcccatctgaacgatgggtcctgaggcacagctctgagcacagaggtcccttctgccacctaccatgcaccatgttccttgccaggcctccccaacccctggcctcaatttccctttctataaaatggaagatgtccagag

SEQ ID NO: 21739 - protein, 319 aa, Homo sapiens; identical to SEQ ID NO: 2817

SEQ ID NO: 21740 - DNA, 2724 bp, Homo sapiens
gcagtgagacaagggtaggcatgggaattgggaggtgcagccctgccccacgcctgttgggtaacactgagcatcaccccattgattaccccattgccaggcgtgggcacgggagttggtttgggagctgccagtctcctgggaggatcgcagtcagcagagcagggctgaggcctgggggtaggagcagagcctgcgcatctggaggcagcatgtccaagaaagggagtggaggtgcagcgaaggacccaggggcagagcccacgctgggatggaccccttcgaggacacgctgcggcggctgcgtgaggccttcaactgagggcgcacgcggccggccgagttccgggctgcgcagctccagggcctgggccacttccttcaagaaaacaagcagcttctgcgcgacgtgctggcccaggacctgcataagccagctttcgaggcagacatatctgagctcatcctttgccagaacgaggttgactacgctctcaagaacctgcaggcctggatgaaggatgaaccacggtccacgaacctgttcatgaagctggactcggtcttcatctggaaggaaccctttggcctggtcctcatcatcgcaccctggaactacccactgaacctgaccctggtgctcctggtgggcgccctcgccgcagggagttgcgtggtgctgaagccgtcagaaatcagccagggcacagagaaggtcctggctgaggtgctgccccagtacctggaccagagctgctttgccgtggtgctgggcggaccccaggagacagggcagctgctagagcacaagttggactacatcttcttcacagggagccctcgtgtgggcaagattgtcatgactgctgccaccaagcacctgacgcctgtcaccctggagctggggggcaagaacccctgctacgtggacgacaactgcgacccccagaccgtggccaaccgcgtggcctggttctgctacttcaatgccggccagacctgcgtggcccctgactacgtcctgtgcagccccgagatgcaggagaggctgctgcccgccctgcagagcaccatcacccgtttctatggcgacgacccccagagctccccaaacctgggccacatcatcaaccagaaacagttccagcggctgcgggcattgctgggctgcagccgcgtggccattgggggccagagcaacgagagcgatcgctacatcgcccccacggtgctggtggacgtgcaggagacggagcctgtgatgcaggaggagatcttcgggcccatcctgcccatcgtgaacgtgcagagcgtggacgaggccatcaagttcatcaaccggcaggagaagcccctggccctgtacgccttctccaacagcagccaggttgtgaaccagatgctggagcggaccagcagcggcagctttggaggcaatgagggcttcacctacatatctctgctgtccgtgccattcgggggagtcggccacagtgggatgggccggtaccacggcaagttcaccttcgacaccttctcccaccaccgcacctgcctgctcgccccctccggcctggagaaattaaaggagatccactacccaccctataccgactggaaccagcagctgttacgctggggcatgggctcccagagctgcaccctcctgtgagcgtcccacccgcctccaacgggtcacacagagaaacctgagtctagccatgaggggcttatgctcccaactcacattgttcctccagaccgcaggttcccccagcctcaggttgctggagctgtcacatgactgcatcctgcctgccagggctgcaaagcaaggtcttgcttctatctgggggacgctgctcgagagaggccaagaggccgcagaacatgccaggtgtcctcactcaccccaccctccccaattccagccctttgccctctcggtcagggttggccagacccagtcacaggggcagtgtcaccctggaaaatacagtgccctgccttcttaggggcatcagccctgaacggttgagagcgtggagccctccaggcctttgctctcccctctaggcacacgcgcacttccatctctgccccatcccaactgcaccagcactgcctcccccagggatcctctcacatcccacactggtctctgcaccacccctctggttcacaccgcaccctgcactcacccacagcagctccatccactgggaaaactggggtttgcatcactccactgcacagtgttagtgggacctgggggcaagtcccttgacttctctgagcctcagtttccttatgtgaaagttgctggaaccaaaatggagtcacttatgccaaactctaataaaatggagtcggggggccacatagaagccctcacacacacatgcccgtaacaggatttatcacaagacacgcctgcatgtagaccagacacagggcgtatggaaagcacgtcctcaagactgtagtattccagatgagctgcagatgcttacctaccacggccgtctccaccagaaaaccatcgccaactcctgcgatcagcttgtgacttacaaaccttgtttaaaagctgcttacatggacttctgtcctttaaaagcttccccttggctgtggccctctgtgtatgcctgggatccttccaagcactcatagcccagataggaatcctctgctcctcccaaataaattcatctgttctgg

SEQ ID NO: 21741 - protein, 385 aa, Homo sapiens
MKDEPRSTNLFMKLDSVFIWKEPFGLVLIIAPWNYPLNLTLVLLVGALAAGSCVVLKPSEISQGTEKVLAEVLPQYLDQSCFAVVLGGPQETGQLLEHKLDYIFFTGSPRVGKIVMTAATKHLTPVTLELGGKNPCYVDDNCDPQTVANRVAWFCYFNAGQTCVAPDYVLCSPEMQERLLPALQSTITRFYGDDPQSSPNLGHIINQKQFQRLRALLGCSRVAIGGQSNESDRYIAPTVLVDVQETEPVMQEEIFGPILPIVNVQSVDEAIKFINRQEKPLALYAFSNSSQVVNQMLERTSSGSFGGNEGFTYISLLSVPFGGVGHSGMGRYHGKFTFDTFSHHRTCLLAPSGLEKLKEIHYPPYTDWNQQLLRWGMGSQSCTLL

SEQ ID NO: 21742 - DNA, 2493 bp, Homo sapiens
gtgaagaaggatgtggttgcttccccttccaccataactgatggaccccttcgaggacacgctgcggcggctgcgtgaggccttcaactgagggcgcacgcggccggccgagttccgggctgcgcagctccagggcctgggccacttccttcaagaaaacaagcagcttctgcgcgacgtgctggcccaggacctgcataagccagctttcgaggcagacatatctgagctcatcctttgccagaacgaggttgactacgctctcaagaacctgcaggcctggatgaaggatgaaccacggtccacgaacctgttcatgaagctggactcggtcttcatctggaaggaaccctttggcctggtcctcatcatcgcaccctggaactacccactgaacctgaccctggtgctcctggtgggcgccctcgccgcagggagttgcgtggtgctgaagccgtcagaaatcagccagggcacagagaaggtcctggctgaggtgctgccccagtacctggaccagagctgctttgccgtggtgctgggcggaccccaggagacagggcagctgctagagcacaagttggactacatcttcttcacagggagccctcgtgtgggcaagattgtcatgactgctgccaccaagcacctgacgcctgtcaccctggagctggggggcaagaacccctgctacgtggacgacaactgcgacccccagaccgtggccaaccgcgtggcctggttctgctacttcaatgccggccagacctgcgtggcccctgactacgtcctgtgcagccccgagatgcaggagaggctgctgcccgccctgcagagcaccatcacccgtttctatggcgacgacccccagagctccccaaacctgggccacatcatcaaccagaaacagttccagcggctgcgggcattgctgggctgcagccgcgtggccattgggggccagagcaacgagagcgatcgctacatcgcccccacggtgctggtggacgtgcaggagacggagcctgtgatgcaggaggagatcttcgggcccatcctgcccatcgtgaacgtgcagagcgtggacgaggccatcaagttcatcaaccggcaggagaagcccctggccctgtacgccttctccaacagcagccaggttgtgaaccagatgctggagcggaccagcagcggcagctttggaggcaatgagggcttcacctacatatctctgctgtccgtgccattcgggggagtcggccacagtgggatgggccggtaccacggcaagttcaccttcgacaccttctcccaccaccgcacctgcctgctcgccccctccggcctggagaaattaaaggagatccactacccaccctataccgactggaaccagcagctgttacgctggggcatgggctcccagagctgcaccctcctgtgagcgtcccacccgcctccaacgggtcacacagagaaacctgagtctagccatgaggggcttatgctcccaactcacattgttcctccagaccgcaggttcccccagcctcaggttgctggagctgtcacatgactgcatcctgcctgccagggctgcaaagcaaggtcttgcttctatctgggggacgctgctcgagagaggccaagaggccgcagaacatgccaggtgtcctcactcaccccaccctccccaattccagccctttgccctctcggtcagggttggccagacccagtcacaggggcagtgtcaccctggaaaatacagtgccctgccttcttaggggcatcagccctgaacggttgagagcgtggagccctccaggcctttgctctcccctctaggcacacgcgcacttccatctctgccccatcccaactgcaccagcactgcctcccccagggatcctctcacatcccacactggtctctgcaccacccctctggttcacaccgcaccctgcactcacccacagcagctccatccactgggaaaactggggtttgcatcactccactgcacagtgttagtgggacctgggggcaagtcccttgacttctctgagcctcagtttccttatgtgaaagttgctggaaccaaaatggagtcacttatgccaaactctaataaaatggagtcggggggccacatagaagccctcacacacacatgcccgtaacaggatttatcacaagacacgcctgcatgtagaccagacacagggcgtatggaaagcacgtcctcaagactgtagtattccagatgagctgcagatgcttacctaccacggccgtctccaccagaaaaccatcgccaactcctgcgatcagcttgtgacttacaaaccttgtttaaaagctgcttacatggacttctgtcctttaaaagcttccccttggctgtggccctctgtgtatgcctgggatccttccaagcactcatagcccagataggaatcctctgctcctcccaaataaattcatctgttctgg

SEQ ID NO: 21743 - protein, 385 aa, Homo sapiens; identical to SEQ ID NO: 21741

SEQ ID NO: 21744 - DNA, 1317 bp, Homo sapiens
gcccccacggtgctggtggacgtgcaggagacggagcctgtgatgcaggaggagatcttcgggcccatcctgcccatcgtgaacgtgcagagcgtggacgaggccatcaagttcatcaaccggcaggagaagcccctggccctgccacagtgggatgggccggtaccacggcaagttcaccttcgacaccttctcccaccaccgcacctgcctgctcgccccctccggcctggagaaattaaaggagatccactacccaccctataccgactggaaccagcagctgttacgctggggcatgggctcccagagctgcaccctcctgtgagcgtcccacccgcctccaacgggtcacacagagaaacctgagtctagccatgaggggcttatgctcccaactcacattgttcctccagaccgcaggttcccccagcctcaggttgctggagctgtcacatgactgcatcctgcctgccagggctgcaaagcaaggtcttgcttctatctgggggacgctgctcgagagaggccaagaggccgcagaacatgccaggtgtcctcactcaccccaccctccccaattccagccctttgccctctcggtcagggttggccagacccagtcacaggggcagtgtcaccctggaaaatacagtgccctgccttcttaggggcatcagccctgaacggttgagagcgtggagccctccaggcctttgctctcccctctaggcacacgcgcacttccatctctgccccatcccaactgcaccagcactgcctcccccagggatcctctcacatcccacactggtctctgcaccacccctctggttcacaccgcaccctgcactcacccacagcagctccatccactgggaaaactggggtttgcatcactccactgcacagtgttagtgggacctgggggcaagtcccttgacttctctgagcctcagtttccttatgtgaaagttgctggaaccaaaatggagtcacttatgccaaactctaataaaatggagtcggggggccacatagaagccctcacacacacatgcccgtaacaggatttatcacaagacacgcctgcatgtagaccagacacagggcgtatggaaagcacgtcctcaagactgtagtattccagatgagctgcagatgcttacctaccacggccgtctccaccagaaaaccatcgccaactcctgcgatcagcttgtgacttacaaaccttgtttaaaagctgcttacatggacttctgtcctttaaaagcttccccttggctgtggccctctgtgtatgcctgggatcct

SEQ ID NO: 21745 - protein, 108 aa, Homo sapiens
MQEEIFGPILPIVNVQSVDEAIKFINRQEKPLALPQWDGPVPRQVHLRHLLPPPHLPARPLRPGEIKGDPLPTLYRLEPAAVTLGHGLPELHPPVSVPPASNGSHRET

SEQ ID NO: 21746 - DNA, 1295 bp, Homo sapiens
ctcgtgtgggcaagattgtcatgactgctgccaccaagcacctgacgcctgtcaccctggagctggggggcaagaacccctgctacgtggacgacaactgcgacccccagaccgtggccaaccgcgtggcctggttctgctacttcaatgccggccagacctgcgtggcccctgactacgtcctgtgcagccccgagatgcaggagaggctgctgcccgccctgcagagcaccatcaccctataccgactggaaccagcagctgttacgctggggcatgggctcccagagctgcaccctcctgtgagcgtcccacccgcctccaacgggtcacacagagaaacctgagtctagccatgaggggcttatgctcccaactcacattgttcctccagaccgcaggttcccccagcctcaggttgctggagctgtcacatgactgcatcctgcctgccagggctgcaaagcaaggtcttgcttctatctgggggacgctgctcgagagaggccaagaggccgcagaacatgccaggtgtcctcactcaccccaccctccccaattccagccctttgccctctcggtcagggttggccagacccagtcacaggggcagtgtcaccctggaaaatacagtgccctgccttcttaggggcatcagccctgaacggttgagagcgtggagccctccaggcctttgctctcccctctaggcacacgcgcacttccatctctgccccatcccaactgcaccagcactgcctcccccagggatcctctcacatcccacactggtctctgcaccacccctctggttcacaccgcaccctgcactcacccacagcagctccatccactgggaaaactggggtttgcatcactccactgcacagtgttagtgggacctgggggcaagtcccttgacttctctgagcctcagtttccttatgtgaaagttgctggaaccaaaatggagtcacttatgccaaactctaataaaatggagtcggggggccacatagaagccctcacacacacatgcccgtaacaggatttatcacaagacacgcctgcatgtagaccagacacagggcgtatggaaagcacgtcctcaagactgtagtattccagatgagctgcagatgcttacctaccacggccgtctccaccagaaaaccatcgccaactcctgcgatcagcttgtgacttacaaaccttgtttaaaagctgcttacatggacttctgtcctttaaaagcttccccttggctgtggccctctgtgtatgcctgggatcct

SEQ ID NO: 21747 - protein, 108 aa, Homo sapiens
MTAATKHLTPVTLELGGKNPCYVDDNCDPQTVANRVAWFCYFNAGQTCVAPDYVLCSPEMQERLLPALQSTITLYRLEPAAVTLGHGLPELHPPVSVPPASNGSHRET

SEQ ID NO: 21748 - DNA, 806 bp, Homo sapiens
acacacagacacccatacacagaaaggcacacaaagacacagacacacacatagccatacacatgaagatgcacagaacacaaagacacacagaccctggggtggctggagggtgcccgtgaaggaggggcagccctggccacccagttcaagccaccccatccggcaggatggaccccttcgaggacacgctgcggcggctgcgtgaggccttcaactgagggcgcacgcggccggccgagttccgggctgcgcagctccagggcctgggccacttccttcaagaaaacaagcagcttctgcgcgacgtgctggcccaggacctgcataaggtgggccgtggagagtgggccccggcaggggctggagcagcgtccctgtcctctttcaggagggcccgtgccccctagtgactggctatgtccctagttttattcctgtttgtttaacagaccccctccctggcatgtggagtgtggcaggcacctgaccttcactcctgaacactcacagccaccctgtgatgcaggctccatggctgtccccatgttgcagatgaggaaactgaggcactcaggggttaacatcgcttgcccaaggccacacagccaggaagtcacagatcagaattgcagccatgcgcagttcccaggggacggcagtgcctcccataggagctgtatttatatgtccagtggtggtggtgcctgcgtgtgccctcctcaaattctagacccctcctggcccaggtctgggcctgaccactctgaattccacctccaccacagccagctttcgaggcagac

SEQ ID NO: 21749 - protein, 89 aa, Homo sapiens
MAVPMLQMRKLRHSGVNIACPRPHSQEVTDQNCSHAQFPGDGSASHRSCIYMSSGGGACVCPPQILDPSWPRSGPDHSEFHLHHSQLSR

SEQ ID NO: 21750 - DNA, 577 bp, Homo sapiens
gggctgaggcctgggggtaggagcagagcctgcgcatctggaggcagcatgtccaagaaagggagtggaggtgcagcgaaggacccaggggcagagcccacgctgggcagatgctgctggctccgtgattatttcaccgagcaccagatgtgcacatgtgaggacaggcgacgactgcccagaaagggcaggggttcctctgccccacctgcctcacctgggaaagctgtgaccacgctgaggccaggttcctgggatgaacatcaggacacctgtgtgccatagctcatcccagactcctccaatccgggtcttgattcaggccggaggcggtcatccctccaaaggcaccagggagccatggaagaggttagagctgagctgatgtggccaggagctgcttgagcgccgggtggaggctgctgacgctcgcatgccaggcaaagctttgggtcagggccctggaacctgggacctggaagcgctccaggccaataccgcccgctaccagagaagggcccaggccccacccaggttctagcccaagggcttgagcaaagacagtagatgaatattt

SEQ ID NO: 21751 - protein, 78 aa, Homo sapiens
MSKKGSGGAAKDPGAEPTLGRCCWLRDYFTEHQMCTCEDRRRLPRKGRGSSAPPASPGKAVTTLRPGSWDEHQDTCVP

SEQ ID NO: 21752 - DNA, 698 bp, Homo sapiens
tgggagctgccagtctcctgggaggatcgcagtcagcagagcagggctgaggcctgggggtaggagcagagcctgcgcatctggaggcagcatgtccaagaaagggagtggaggtgcagcgaaggacccaggggcagagcccacgctggaaatactacattcgcatttagaaagtctggaagctgcaggaagatgttgagaagacagtgaaaggcacgaggcacacattggcacatggtgtcacaaggctggtgtgaggagaggggctggggggcctccctcctcgcactgaggctgtgaggagggcaaatcaagtcgtctctgggagcctcggtttccctgtccttccaactgggtaataataatagctgtgaggctcagatgagatgtgcatgccagctacctggccccagatgccagctctgacttctttctgggccctgcaccaggcatggccactgccaagggaatgagtcccctctccatatgacaggtcccatcaggcctccaccttcctgtgtgtcttatttctcagcatctgcccccacagggcttttgcacacgttggtccctctgtccagatcacctgccctccaagaggccctcccctacggcttccccgcagcagtcagagccaggggtgggtctctggccacctctggaagaagccctggcccaccgatcatgtttgtaatgat

SEQ ID NO: 21753 - protein, 35 aa, Homo sapiens
MSKKGSGGAAKDPGAEPTLEILHSHLESLEAAGRC

SEQ ID NO: 21754 - DNA, 3930 bp, Homo sapiens
gagctttactggcaaactgggaggagagactcatctcaaacaaacaaaaaaggaaatgtaattgccattgtaacaatgtcgtggaggggaccctccataggcgattaggtcatgaaggctctgcccccatgaattaattaatcctgttatggcaggagtaggttagtgatcacgagactgggtgtgttataaaagtgaggtcggcctgatttcctccctgtctcacatgcttgcttctgccttacacccttctgccacaagatgacccttgcccaaagccagcaccatgctcttggacttcccagcctccaaaactgggagaaataaatttcttttatcagttgtccaatttgtggtgttaatttgcagactaagacaggctttctaataacgtttgttggggctacttggatttttgaggcaacatattcccacttacacatttcatgaaaacctctttattcaatttctcctaagtctgctcattataaacagccacttcacacaagccctccaggctgtgtagggaacggctccaccatggcaccctggtggccctgaacatatccacacaggctacagaggcgaaagctcaaactgaggctcatctgagtcatgacaggacactttgtgatcctccagagagtgggaggcctgtaggagctgctaccactcccgttggctccctgtctcccccaggaggctgtcatgagaaggttctgcatggccttcgggttctgatgaggcctgccactgtctgtcctgccctcttctgaacagagttgctgttgcaggaaatcagggaccctgaacggagtgaccagctggagccgtgccataggaacataaattgtgaagatttcattttaatatggacatttatcagttcccaaataatacttttataatttcttatgcctgtctttactttaatctcttaatcctgttatcttcataagctaggatgtacatcacctcaggaccactgtgataattgtgttaactgtacaaattgattgtaaaacatgtgtgtttgaacaatatgaaatcagtgcaccttgaaaaagaacagaataacagtgatttttagggaacaagggaagacaaccataaggtctgactgcctgtggggtcaggcaaaaagagccatattttcttcttgcagagagcctataaacggacatgcaagtaggaaacatattgctaaattcttttcctagcaaggaatattaagattaatatcctgggaaaggaatgcattccttgggggaggtctataataaccgctctgggaatgtctgtcttgtgcagttgagataaggactgagatatgctctggtctcctgcagtaccctcaggcttaccagggtggggaaaaactctgccctggtaaatttgtggtcagactggttctctgctcttgaaccctcttttctgttgtttaagatgtctatcaagacaatatatgcactgctgaacatagacccttatcagtagttctgcttttgccctttgccttgtgatctttgttagacccttattagtggttctgctttttgccctttgaagcatgtgatctttgtacttactccctgttctcacaccccctccccttttgaaacccttaagaaaaacttgctggttttgaggatcaggcaggcctcatggtcctactgatatgtgatgtcaccccggcagcctagctgtaaaattcctctctttatactgtctctctatttctcagccagccgacacttatggaaaatagaaagaacctacattgaaatattgggggtgggttcccccaatatctggcacaccaacgtggttttctttttcctaagtgcatgtgggaacccgattccctttggtaggtatgtagaaacgttcatcggtccggtccacagaaacccttgttcggctccctgacaactggtgagttgtctgtgtattgtccggggtaactatgagtcatgcagaatctaaacattatgcttatctctgctatattaaactcctgttaaaacagggaggagtttgggtacccatggaaaatatggtcacccatttcagggcggtggaagaacactgtccttggtttcctcaaaagggaacgttagatgtggaactttgggattgtgttggtgcaaaattccgggaaccggtcccaacaggaaattatgctcccgtcactgtttggggtgattgggccttggtacgtgccatcctaatgacataccaatcctgtgaccccctgcagttaccacagttttctgaatctggagaccctctacctcttcctcagctttcctctcccactcggcctttgttatctgctcagcttctcccttcacctactcctccccaacctgagaatgttgaggattcaatatctaactccggtgactttggcttaatgtcaccccctgatgattttatttcttttcacgaattgctggtacttgtagctcccgcggccccgacttggacagcccgagaccatatctatgctatcttccctcttcaaacctttgcagcctttgcctccggagccatctaatggctctgggaccaaactacaatttatctgtaattctgcagaccctcccccgtccaccacagcccctcaccctcctgtcatttcggtccctcaaccggtcactttgccatccactcaaactgcttctctgtacccttcttcaagcatggacacccctgccactctggttgcacaggattgggcaataatcaccagcttctgccccttctgctcccccaatgcccctttctcgtgctctcatactggcccgacctcctcaacctcagtttcccttatctacacatacttttcctgtcacttctatgctgactccgtctcatgtgcctgttcttgaaacttccatgcaacacttattatgccagaacaaagaaacaagtggattagaggcgtgggcttatccggtcgcgctggaacctgccaatgctcaaggggtacaagtgcgtcaatatgcgctgctcaatcttacctttttaaaaaaattcaaggatgcttgtactcagtatgatcctgcttctccttatgttaaaaggtattacagactctttgtactgaggtcattttgcttcctttagactgggaccttttggcaaaagctgttctaactccatctcagcattaaaattctgtacttggtggtcagaggaggcccatctgcaggctcagctaaatcaggctgatggcattccaattactcaggctcagctcacaggctccaataattactctgacaataccacccaattaggctttgatgctgtcaccacggatcaagtaacaaaggtgtgtgtaagagcttgggataaattacacactcctgccaagctcctgtttcttttactactgttaaacagggtcacaataaattatatcctaattttttggctaaattacaagatgctgttgaaaaatctgtaattggacaagctcggtgtcaaatacttaaaatttctggatttgatccaaatttaactatggttcctttaaatcagctcgaagttcaagccgcttttcaacattgcatactgtggcaaattcacttggctgattttatcggtgttattgatgatcattatccaaaaaacaaattgtttgattttataaaaatgacttcttgggtggtccctcgattgaccaaagatcagcccattcctgaggccgttacagtgttcactgatggctccagtaacagaaatgctggttatgtgagtcctacagacaagcttatttctaccccttataccactgatcaaaaggcagagttaattctgaaattattgccttacaagatctccccaaaacgttattgtctctgattctgtttatgttgtacatgccacaaaaaatatagaaatcgctactatcgaacataa

SEQ ID NO: 21755 - protein, 197 aa, Homo sapiens [sequence omitted]

SEQ ID NO: 21756 - DNA, 977 bp, Homo sapiens
catctcacccaccatagcagggaatgagtccctctaaactattccctcaggaatagtaagagccagcccctcttccccccctggctcttaggacccccatcgcaggggggtgaggcaccccccgcgatgcggggagtacgagtcagcccttctcctcccctggctcttagggcacctatcgcaggggggtgaggcaccccccgcaatgcggggagggctgagactggggtctgggctgttccggacttcaacactcaccccttgtccccccgcagggctatggcgtgtgcttggtggggctggagcggctggcttacctcctcgtggcttacagcctgggcacctcagccgcctcactcctgggcctgctgggcctgtggctgccacgcccggtgcccctcatggctggagcaggggtgcacctgctcctcaccttcatcctctttttctgggcccctgtgcctcgggtcctgcaacacatctggatcctctgtgtggcagctgccctttggggtgtgggcagcgccctgaacaatactggactcagcacactcctgggaatcttgtacgaagacaaggagagacaggacttcatcttcaccatctaccactggtggcaggctgtggccatcttcaccgtgtacctgggctcgagcctgcacatgaaggctaagctggcgatgctgctggtgacgctggtggcggccgcggtctcctacctgcggatggagcagaagctgcggcggggcgtggccccgcctcagccccgcatcccgcggccccagcacaaggtgcgcggttaccgctacttggaggacaactcggaggagagcgacgctgaggacgagcatggggacggcgcggaggaggaggcgccgcccgcggggcccaggcctggccccgagcccgctggactcggccgccggccctgcccgtacgaacaggcgcagaggggagacggaccggaggagcagtga

SEQ ID NO: 21757 - protein, 191 aa, Homo sapiens; identical to SEQ ID NO: 5068

SEQ ID NO: 21758 - DNA, 1694 bp, Homo sapiens
atggaaaccaaactccgaattgatgactcctttgaggaagccgagagctgtaaggaaagccaggaacaggggcaagggagagatgcatcccgaatgattgctgtgccaattcattctggaatcctcgatgtgatctcagctgccctttccatacttgacacagtgattgtggcaccaactggtctagctgtggtctacaaggaacccccaaagggaggggcacaggctgtgaccatctatgacaagccggcatctttctttaaagagacacctctggacctgcagcaccggctcttcatgaagctgggcggcacgcactctccgttcagggcccgttcagaacctgaggaaccagccacagagccgtcggccttcatggagtgggatgctgggagcgggctggtgatgcttctccgcgagcagccagccctgctggtcagcagcacaggctggacagaggatgaagacttctccatcctgctggcagctttagaaaagtttgagcaactgactgttgatggacacaaccttccttctctcgtctgtgtgataacaggccaagggcctctgacggagtattacagccgccccatccaccagaagcatttccagcacatccaggtctgcaacccttggctggaggccgaggactaccccctgcttctagggtcggtggacctgggtgtctgtctgcacacatcctccagtggcctggacctgcccatgaaggtggtggacatgttcgggtgctgtttgcctgcgtgtgctgtgaacttcaagtgtttacatgagctggtgaaacatgaagaaaatggcctggtctttgaggactcagaggaactggcagctcagctgcagatgcttttctcaaactttcctgatcctgcgggcaagctaaaccagttctggaagaacctgcgggaatcgcagcagctccgatgggatgagagctgggtgcagagtgtgctccatttggttatggacacataactcctgggccagaggctaaaaccccgggacccctgctgtccttcccgcagcttcttctcggagtctcagggcaaaccctttcgagcagcgcctcccagtggccagaaggtgaaatgacggcagtggtgccgcctggtaaatgaattggttctgtgacccgggaagctgtgcttggctctgatttcttttctggaggctcggaaacacttcctatcttcttctgttcttcacgccccatgcccctgctagcggattactgttctgcgacttccgtgtgacctctgcagtactcctcatcctgcgtttgctctccaggtgtcatctttccgccgtgttcctaacattttgattcctgtcttgaaaaaagcacctgctgcactgtaagcccagggatgtggcagctgcagtgggcttggctttgtgaagaaccgagttgtgtccacattgggggaacatcatacttgatacacacgtttttatttgcacaaagaaaatgctatttttggagccagagatttcatgtctgattgatggcgattttcttaagaaccagaactgctggcagaaagggagcacccacatgcttagatagctgatgtcttattagagggcagtttgtggttcctgatttggaaattaacattctccaaacattccagtccaatgaaagttttatccgctttcccatataaaaactcttccca

SEQ ID NO: 21759 - protein, 329 aa, Homo sapiens
METKLRIDDSFEEAESCKESQEQGQGRDASRMIAVPIHSGILDVISAALSILDTVIVAPTGLAVVYKEPPKGGAQAVTIYDKPASFFKETPLDLQHRLFMKLGGTHSPFRARSEPEEPATEPSAFMEWDAGSGLVMLLREQPALLVSSTGWTEDEDFSILLAALEKFEQLTVDGHNLPSLVCVITGQGPLTEYYSRPIHQKHFQHIQVCNPWLEAEDYPLLLGSVDLGVCLHTSSSGLDLPMKVVDMFGCCLPACAVNFKCLHELVKHEENGLVFEDSEELAAQLQMLFSNFPDPAGKLNQFWKNLRESQQLRWDESWVQSVLHLVMDT

SEQ ID NO: 21760 - DNA, 2687 bp, Homo sapiens
attgcagcaggtaatgcccagccccgggcactctgtgcaggcggtgtccttgaagctctacccagctcttggctctgggaaaagggaacaatggacactgtcgggcatggacatgatggggcttccagaagagttactctgggcctccagggtgacgtcaaaggacaggggtgtctcttaaggtgaccttccagccacagcccttttgttggagacaggcatactcccgttacagtcatcaccacatggctctgtcccagagtcatgactgtgtctttcagagaccacaggaggaaaacaaccacttctgggatgaggacagggcccttgagagaaggtggtgtttggctgggccaccgaaaacccctcgcccctgccagcacactcagtctcctctctggtcgaacagagctctgcctgtggtcctgggtcccagccctgaaaaccacaggtccagcggtggccagggacacaggcccacccctgcaagccagcagacaaattggcagacgcctgaaacacgaagttcatggcaggatcaggctttgtgtcattcacagccctctagataggccgagaaccagaactcattttttaaggaacaccagtgagtctggagatttttttcttttgcttcggtcttttgcagctttctctactaagggttctcctttttcacccaagtaattgcctttccatctaatggcccaaatggtcaaatggcatctactagtctcatatgaccgctgcctctctggcctcgccctgctgctgaggtcagcatgacctggaactgtccgctggtccctttcagtaacctgaagctttcaccgtagacgtgctgtatagcccagaagccatcgtgtcgctggtcggggtcctgcggaggctggctgcctgccgggagcaccagcgggctcctcaagtctatgtggcccttaccatctgcaacccagagacgtgccagctgttcaccactgagctatgccgggctgggatcagatgggaagtggaacctcgtcatgaccagaaactgtttccctacgaagagcacttggagatggcaatgctgaacctcacactgtaggactcacatacgactccaacgggattgtgagaatcaagtcactctagtgggaagagtttttatatgggaaagcggataaaactttcattggactggaatgtttggagaatgttaatttccaaatcaggaaccacaaactgccctctaataagacatcagctatctaagcatgtgggtgctccctttctgccagcagttctggttcttaagaaaatcgccatcaatcagacatgaaatctctggctccaaaaatagcattttctttgtgcaaataaaaacgtgtgtatcaagtatgatgttcccccaatgtggacacactcggttccccacaaagccaagcccgctgcagctgccacatccctggacacattcggttcctcacaaagccaagcccgctgcagctgccacatccgtggacacactcggttcttcacaaagccaagcccactgcagctgccacatccctgggcttacagtgcagcaggtgcttttttcaagacaggaatcaaaatgttaggaacacggcggaaagatgacacctggagagcaaacgcaggatgaggagtactgcagaggtcacacggaagtcgcagaacagtaatccgctagcaggggcatggggcgtgaagaacagaagaagataggaagtgtttccgagcctccagaaaagaaatcagagccaagcacagcttcccgggtcacagaaccaattcatttaccaggcggcaccactgccgtcatttcaccttctggccactgggaggcgctgctcgaaagggtttgccctgagactccgagaagaagctgcgggaaggacagcaggggtcccggggttttagcctctggcccaggagttatgtgtccataaccaaatggagcacactctgcacccagctctcatcccatcggagctgctgcgattcccgcaggttcttccagaactggtttagcttgcccgcaggatcaggaaagtttgagaaaagcatctgcaaaaaaataaagagcagagcttaactcatttcctgtccccaccccatcccaggtcaccacctggctgaccccaggtccccgacccaacaacaaaccctcccaagttcctaactccctcacttggactcgagactcttcacgccccagcagcgctccgcctccaacttgacatcacgctttctgtcccactttcccacacttcgtgccctggagcacctcccggcctctacacgctgtatgttcccctgcgagcaccctcctcttggcctctggccaagtcccacccatctgtgggtaacaagggggtgttggtgttcttttcagccttgctaaactgtctgaatcaaggatcacaaactacagcctgcaggccaaatccagcccacagcctgtgtttgtaaataaagttttattggaacaaagccacaccccttaatcgaagatgatctgtggctactttcacaccacaacagagtaccatggttctgacagagactaggagacacagtctaaatgacttctgacctggacctttactgaaaatcctgccaatcattctgttggcaagaatgatgtattacttttagcaataagaaacaagtaacctttg

SEQ ID NO: 21761 - protein, 47 aa, Homo sapiens
MWPLPSATQRRASCSPLSYAGLGSDGKWNLVMTRNCFPTKSTWRWQC

SEQ ID NO: 21762 - DNA, 1871 bp, Homo sapiens
ccgcccacgtcatggcgcccgaggagaacgcggggaccgaactcttgctgcagagtttggagcgccgcttcctggcggcgcgtgcactgcgctccttcccctggcagagcttagaagcaaagttaagagactcatcagattctgagctgctgcgggatattttgcagaaggccgggctgggatcagatgggaagtggaacctcgtcatgaccagaaactgtttccctacgaagagcacttggagatggcaatgctgaacctcacactgtaggactcacatacgactccaacgggattgtgagaatcaagtcactctagtgggaagagtttttatatgggaaagcggataaaactttcattggactggaatgtttggagaatgttaatttccaaatcaggaaccacaaactgccctctaataagacatcagctatctaagcatgtgggtgctccctttctgccagcagttctggttcttaagaaaatcgccatcaatcagacatgaaatctctggctccaaaaatagcattttctttgtgcaaataaaaacgtgtgtatcaagtatgatgttcccccaatgtggacacactcggttccccacaaagccaagcccgctgcagctgccacatccctggacacattcggttcctcacaaagccaagcccgctgcagctgccacatccgtggacacactcggttcttcacaaagccaagcccactgcagctgccacatccctgggcttacagtgcagcaggtgcttttttcaagacaggaatcaaaatgttaggaacacggcggaaagatgacacctggagagcaaacgcaggatgaggagtactgcagaggtcacacggaagtcgcagaacagtaatccgctagcaggggcatggggcgtgaagaacagaagaagataggaagtgtttccgagcctccagaaaagaaatcagagccaagcacagcttcccgggtcacagaaccaattcatttaccaggcggcaccactgccgtcatttcaccttctggccactgggaggcgctgctcgaaagggtttgccctgagactccgagaagaagctgcgggaaggacagcaggggtcccggggttttagcctctggcccaggagttatgtgtccataaccaaatggagcacactctgcacccagctctcatcccatcggagctgctgcgattcccgcaggttcttccagaactggtttagcttgcccgcaggatcaggaaagtttgagaaaagcatctgcaaaaaaataaagagcagagcttaactcatttcctgtccccaccccatcccaggtcaccacctggctgaccccaggtccccgacccaacaacaaaccctcccaagttcctaactccctcacttggactcgagactcttcacgccccagcagcgctccgcctccaacttgacatcacgctttctgtcccactttcccacacttcgtgccctggagcacctcccggcctctacacgctgtatgttcccctgcgagcaccctcctcttggcctctggccaagtcccacccatctgtgggtaacaagggggtgttggtgttcttttcagccttgctaaactgtctgaatcaaggatcacaaactacagcctgcaggccaaatccagcccacagcctgtgtttgtaaataaagttttattggaacaaagccacaccccttaatcgaagatgatctgtggctactttcacaccacaacagagtaccatggttctgacagagactaggagacacagtctaaatgacttctgacctggacctttactgaaaatcctgccaatcattctgttggcaagaatgatgtattacttttagcaataagaaacaagtaacctttg

SEQ ID NO: 21763 - protein, 81 aa, Homo sapiens; identical to SEQ ID NO: 5076

SEQ ID NO: 21764 - DNA, 2030 bp, Homo sapiens
gctgcggccccgcccacgtcatggcgcccgaggagaacgcggggaccgaactcttgctgcagagtttggagcgccgcttcctggcggcgcgtgcactgcgctccttcccctggcagagcttagaagcaaagttaagagactcatcagattctgagctgctgcgggatattttgcagaagacgtgctgtatagcccagaagccatcgtgtcgctggtcggggtcctgcggaggctggctgcctgccgggagcaccagcgggctcctcaagtctatgtggcccttaccatctgcaacccagagacgtgccagctgttcaccactgagctatgccgggctgggatcagatgggaagtggaacctcgtcatgaccagaaactgtttccctacgaagagcacttggagatggcaatgctgaacctcacactgtaggactcacatacgactccaacgggattgtgagaatcaagtcactctagtgggaagagtttttatatgggaaagcggataaaactttcattggactggaatgtttggagaatgttaatttccaaatcaggaaccacaaactgccctctaataagacatcagctatctaagcatgtgggtgctccctttctgccagcagttctggttcttaagaaaatcgccatcaatcagacatgaaatctctggctccaaaaatagcattttctttgtgcaaataaaaacgtgtgtatcaagtatgatgttcccccaatgtggacacactcggttccccacaaagccaagcccgctgcagctgccacatccctggacacattcggttcctcacaaagccaagcccgctgcagctgccacatccgtggacacactcggttcttcacaaagccaagcccactgcagctgccacatccctgggcttacagtgcagcaggtgcttttttcaagacaggaatcaaaatgttaggaacacggcggaaagatgacacctggagagcaaacgcaggatgaggagtactgcagaggtcacacggaagtcgcagaacagtaatccgctagcaggggcatggggcgtgaagaacagaagaagataggaagtgtttccgagcctccagaaaagaaatcagagccaagcacagcttcccgggtcacagaaccaattcatttaccaggcggcaccactgccgtcatttcaccttctggccactgggaggcgctgctcgaaagggtttgccctgagactccgagaagaagctgcgggaaggacagcaggggtcccggggttttagcctctggcccaggagttatgtgtccataaccaaatggagcacactctgcacccagctctcatcccatcggagctgctgcgattcccgcaggttcttccagaactggtttagcttgcccgcaggatcaggaaagtttgagaaaagcatctgcaaaaaaataaagagcagagcttaactcatttcctgtccccaccccatcccaggtcaccacctggctgaccccaggtccccgacccaacaacaaaccctcccaagttcctaactccctcacttggactcgagactcttcacgccccagcagcgctccgcctccaacttgacatcacgctttctgtcccactttcccacacttcgtgccctggagcacctcccggcctctacacgctgtatgttcccctgcgagcaccctcctcttggcctctggccaagtcccacccatctgtgggtaacaagggggtgttggtgttcttttcagccttgctaaactgtctgaatcaaggatcacaaactacagcctgcaggccaaatccagcccacagcctgtgtttgtaaataaagttttattggaacaaagccacaccccttaatcgaagatgatctgtggctactttcacaccacaacagagtaccatggttctgacagagactaggagacacagtctaaatgacttctgacctggacctttactgaaaatcctgccaatcattctgttggcaagaatgatgtattacttttagcaataagaaacaagtaacctttg

SEQ ID NO: 21765 - protein, 131 aa, Homo sapiens; identical to SEQ ID NO: 5074

SEQ ID NO: 21766 - DNA, 2738 bp, Homo sapiens
atgtgtttcaacaaaggcagccatggctttgataatgtcctcatggatatgaagaccatattcagagatttcgggccagatttcaagaggaatggcctggccgagacttttaacagcatccacatctaccccttcgtgtcagcttcggagccccaggaacatgatgccaacagctccaaacagatagcacgggagtccaggcctggcttccgcccggtctccgggcaacgctgcggccccgcccacgtcatggcgcccgaggagaacgcggggaccgaactcttgctgcagagtttggagcgccgcttcctggcggcgcgtgcactgcgctccttcccctggcagagcttagaagcaaagttaagagactcatcagattctgagctgctgcgggatattttgcagaagactgtgaagcatcctgtgtgtgtgaagcaccggccatcagtcaagtatgcctggtgctttctctcagaactcatcaaaaagcacgaggctgtccacacagagcctttggacgagctgtacgaggtgctggcggagaccctgatggccaaggagtccacccagggccaccggagctatttgctgccctcaggaggctcagtcacactcttcaagaacacagccatcatctcccacggcatcacaggcctggtcacatgagatgctgccctctaccttgcagaatgggccatcgagaacccggcagccttctctcataggatggtcctagagcttggcagtggcgccggcctcacaggcctggccatctgcaagatgtgccgcccctgggcatacatcttcagcgactgtcacagccgggtccttgagaagctctgagggaatgtccttctcagtggcctctcattagaggcagatatctctgccaacttagacagccccagggtgacagtggcccagctggactgggacgtcgcgacggtccgtcagcaatctgcaatccagccagatgttgtcattgcagcagacgtgctgtatagcccagaagccatcgtgtcgctggtcggggtcctgcggaggctggctgcctgccgggagcaccagcgggctcctcaagtctatgtggcccttaccatctgcaacccagagacgtgccagctgttcaccactgagctatgccgggctgggatcagatgggaagtggaacctcgtcatgaccagaaactgtttccctacgaagagcacttggagatggcaatgctgaacctcacactgtaggactcacatacgactccaacgggattgtgagaatcaagtcactctagtgggaagagtttttatatgggaaagcggataaaactttcattggactggaatgtttggagaatgttaatttccaaatcaggaaccacaaactgccctctaataagacatcagctatctaagcatgtgggtgctccctttctgccagcagttctggttcttaagaaaatcgccatcaatcagacatgaaatctctggctccaaaaatagcattttctttgtgcaaataaaaacgtgtgtatcaagtatgatgttcccccaatgtggacacactcggttccccacaaagccaagcccgctgcagctgccacatccctgggcttacagtgcagcaggtgcttttttcaagacaggaatcaaaatgttaggaacacggcggaaagatgacacctggagagcaaacgcaggatgaggagtactgcagaggtcacacggaagtcgcagaacagtaatccgctagcaggggcatggggcgtgaagaacagaagaagataggaagtgtttccgagcctccagaaaagaaatcagagccaagcacagcttcccgggtcacagaaccaattcatttaccaggcggcaccactgccgtcatttcaccttctggccactgggaggcgctgctcgaaagggtttgccctgagactccgagaagaagctgcgggaaggacagcaggggtcccggggttttagcctctggcccaggagttatgtgtccataaccaaatggagcacactctgcacccagctctcatcccatcggagctgctgcgattcccgcaggttcttccagaactggtttagcttgcccgcaggatcaggaaagtttgagaaaagcatctgcaaaaaaataaagagcagagcttaactcatttcctgtccccaccccatcccaggtcaccacctggctgaccccaggtccccgacccaacaacaaaccctcccaagttcctaactccctcacttggactcgagactcttcacgccccagcagcgctccgcctccaacttgacatcacgctttctgtcccactttcccacacttcgtgccctggagcacctcccggcctctacacgctgtatgttcccctgcgagcaccctcctcttggcctctggccaagtcccacccatctgtgggtaacaagggggtgttggtgttcttttcagccttgctaaactgtctgaatcaaggatcacaaactacagcctgcaggccaaatccagcccacagcctgtgtttgtaaataaagttttattggaacaaagccacaccccttaatcgaagatgatctgtggctactttcacaccacaacagagtaccatggttctgacagagactaggagacacagtctaaatgacttctgacctggacctttactgaaaatcctgccaatcattctgttggcaagaatgatgtattacttttagcaataagaaacaagtaacctttg

SEQ ID NO: 21767 - protein, 221 aa, Homo sapiens
MCFNKGSHGFDNVLMDMKTIFRDFGPDFKRNGLAETFNSIHIYPFVSASEPQEHDANSSKQIARESRPGFRPVSGQRCGPAHVMAPEENAGTELLLQSLERRFLAARALRSFPWQSLEAKLRDSSDSELLRDILQKTVKHPVCVKHRPSVKYAWCFLSELIKKHEAVHTEPLDELYEVLAETLMAKESTQGHRSYLLPSGGSVTLFKNTAIISHGITGLVT

SEQ ID NO: 21768 - DNA, 2511 bp, Homo sapiens
attgcagcaggtaatgcccagccccgggcactctgtgcaggcggtgtccttgaagctctacccagctcttggctctgggaaaagggaacaatggacactgtcgggcatggacatgatggggcttccagaagagttactctgggcctccagggtgacgtcaaaggacaggggtgtctcttaaggtgaccttccagccacagcccttttgttggagacaggcatactcccgttacagtcatcaccacatggctctgtcccagagtcatgactgtgtctttcagagaccacaggaggaaaacaaccacttctgggatgaggacagggcccttgagagaaggtggtgtttggctgggccaccgaaaacccctcgcccctgccagcacactcagtctcctctctggtcgaacagagctctgcctgtggtcctgggtcccagccctgaaaaccacaggtccagcggtggccagggacacaggcccacccctgcaagccagcagacaaattggcagacgcctgaaacacgaagttcatggcaggatcaggctttgtgtcattcacagccctctagataggccgagaaccagaactcattttttaaggaacaccagtgagtctggagatttttttcttttgcttcggtcttttgcagctttctctactaagggttctcctttttcacccaagtaattgcctttccatctaatggcccaaatggtcaaatggcatctactagtctcatatgaccgctgcctctctggcctcgccctgctgctgaggtcagcatgacctggaactgtccgctggtccctttcagtaacctgaagctttcaccgtagacgtgctgtatagcccagaagccatcgtgtcgctggtcggggtcctgcggaggctggctgcctgccgggagcaccagcgggctcctcaagtctatgtggcccttaccatctgcaacccagagacgtgccagctgttcaccactgagctatgccgggctgggatcagatgggaagtggaacctcgtcatgaccagaaactgtttccctacgaagagcacttggagatggcaatgctgaacctcacactgtaggactcacatacgactccaacgggattgtgagaatcaagtcactctagtgggaagagtttttatatgggaaagcggataaaactttcattggactggaatgtttggagaatgttaatttccaaatcaggaaccacaaactgccctctaataagacatcagctatctaagcatgtgggtgctccctttctgccagcagttctggttcttaagaaaatcgccatcaatcagacatgaaatctctggctccaaaaatagcattttctttgtgcaaataaaaacgtgtgtatcaagtatgatgttcccccaatgtggacacactcggttccccacaaagccaagcccgctgcagctgccacatccctggacacattcggttcctcacaaagccaagcccgctgcagctgccacatccgtggacacactcggttcttcacaaagccaagcccactgcagctgccacatccctgggcttacagtgcagcaggtgcttttttcaagacaggaatcaaaatgttaggaacacggcggaaagatgacacctggagagcaaacgcaggatgaggagtactgcagaggtcacacggaagtcgcagaacagtaatccgctagcaggggcatggggcgtgaagaacagaagaagataggaagtgtttccgagcctccagaaaagaaatcagagccaagcacagcttcccgggtcacagaaccaattcatttaccaggcggcaccactgccgtcatttcaccttctggccactgggaggcgctgctcgaaagggtttgccctgagactccgagaagaagctgcgggaaggacagcaggggtcccggggttttagcctctggcccaggagttatgtgtccataaccaaatggagcacactctgcacccagctctcatcccatcggagctgctgcgattcccgcaggttcttccagaactggtttagcttgcccgcaggatcaggaaagtttgagaaaagcatctgcaaaaaaataaagagcagagcttaactcatttcctgtccccaccccatcccaggtcaccacctggctgaccccaggtccccgacccaacaacaaaccctcccaagttcctaactccctcacttggactcgagactcttcacgccccagcagcgctccgcctccaacttgacatcacgctttctgtcccactttcccacacttcgtgccctggagcacctcccggcctctacacgctgtatgttcccctgcgagcaccctcctcttggcctctggccaagtcccacccatctgtgggtaacaagggggtgttggtgttcttttcagccttgctaaactgtctgaatcaaggatcacaaactacagcctgcaggccaaatccagcccacagcctgtgtttgtaaataaagttttattggaacaaagccacacccctt

SEQ ID NO: 21769 - protein, 47 aa, Homo sapiens; identical to SEQ ID NO: 21761

SEQ ID NO: 21770 - DNA, 1695 bp, Homo sapiens
ccgcccacgtcatggcgcccgaggagaacgcggggaccgaactcttgctgcagagtttggagcgccgcttcctggcggcgcgtgcactgcgctccttcccctggcagagcttagaagcaaagttaagagactcatcagattctgagctgctgcgggatattttgcagaaggccgggctgggatcagatgggaagtggaacctcgtcatgaccagaaactgtttccctacgaagagcacttggagatggcaatgctgaacctcacactgtaggactcacatacgactccaacgggattgtgagaatcaagtcactctagtgggaagagtttttatatgggaaagcggataaaactttcattggactggaatgtttggagaatgttaatttccaaatcaggaaccacaaactgccctctaataagacatcagctatctaagcatgtgggtgctccctttctgccagcagttctggttcttaagaaaatcgccatcaatcagacatgaaatctctggctccaaaaatagcattttctttgtgcaaataaaaacgtgtgtatcaagtatgatgttcccccaatgtggacacactcggttccccacaaagccaagcccgctgcagctgccacatccctggacacattcggttcctcacaaagccaagcccgctgcagctgccacatccgtggacacactcggttcttcacaaagccaagcccactgcagctgccacatccctgggcttacagtgcagcaggtgcttttttcaagacaggaatcaaaatgttaggaacacggcggaaagatgacacctggagagcaaacgcaggatgaggagtactgcagaggtcacacggaagtcgcagaacagtaatccgctagcaggggcatggggcgtgaagaacagaagaagataggaagtgtttccgagcctccagaaaagaaatcagagccaagcacagcttcccgggtcacagaaccaattcatttaccaggcggcaccactgccgtcatttcaccttctggccactgggaggcgctgctcgaaagggtttgccctgagactccgagaagaagctgcgggaaggacagcaggggtcccggggttttagcctctggcccaggagttatgtgtccataaccaaatggagcacactctgcacccagctctcatcccatcggagctgctgcgattcccgcaggttcttccagaactggtttagcttgcccgcaggatcaggaaagtttgagaaaagcatctgcaaaaaaataaagagcagagcttaactcatttcctgtccccaccccatcccaggtcaccacctggctgaccccaggtccccgacccaacaacaaaccctcccaagttcctaactccctcacttggactcgagactcttcacgccccagcagcgctccgcctccaacttgacatcacgctttctgtcccactttcccacacttcgtgccctggagcacctcccggcctctacacgctgtatgttcccctgcgagcaccctcctcttggcctctggccaagtcccacccatctgtgggtaacaagggggtgttggtgttcttttcagccttgctaaactgtctgaatcaaggatcacaaactacagcctgcaggccaaatccagcccacagcctgtgtttgtaaataaagttttattggaacaaagccacacccctt

SEQ ID NO: 21771 - protein, 81 aa, Homo sapiens; identical to SEQ ID NO: 5076

SEQ ID NO: 21772 - DNA, 1854 bp, Homo sapiens
gctgcggccccgcccacgtcatggcgcccgaggagaacgcggggaccgaactcttgctgcagagtttggagcgccgcttcctggcggcgcgtgcactgcgctccttcccctggcagagcttagaagcaaagttaagagactcatcagattctgagctgctgcgggatattttgcagaagacgtgctgtatagcccagaagccatcgtgtcgctggtcggggtcctgcggaggctggctgcctgccgggagcaccagcgggctcctcaagtctatgtggcccttaccatctgcaacccagagacgtgccagctgttcaccactgagctatgccgggctgggatcagatgggaagtggaacctcgtcatgaccagaaactgtttccctacgaagagcacttggagatggcaatgctgaacctcacactgtaggactcacatacgactccaacgggattgtgagaatcaagtcactctagtgggaagagtttttatatgggaaagcggataaaactttcattggactggaatgtttggagaatgttaatttccaaatcaggaaccacaaactgccctctaataagacatcagctatctaagcatgtgggtgctccctttctgccagcagttctggttcttaagaaaatcgccatcaatcagacatgaaatctctggctccaaaaatagcattttctttgtgcaaataaaaacgtgtgtatcaagtatgatgttcccccaatgtggacacactcggttccccacaaagccaagcccgctgcagctgccacatccctggacacattcggttcctcacaaagccaagcccgctgcagctgccacatccgtggacacactcggttcttcacaaagccaagcccactgcagctgccacatccctgggcttacagtgcagcaggtgcttttttcaagacaggaatcaaaatgttaggaacacggcggaaagatgacacctggagagcaaacgcaggatgaggagtactgcagaggtcacacggaagtcgcagaacagtaatccgctagcaggggcatggggcgtgaagaacagaagaagataggaagtgtttccgagcctccagaaaagaaatcagagccaagcacagcttcccgggtcacagaaccaattcatttaccaggcggcaccactgccgtcatttcaccttctggccactgggaggcgctgctcgaaagggtttgccctgagactccgagaagaagctgcgggaaggacagcaggggtcccggggttttagcctctggcccaggagttatgtgtccataaccaaatggagcacactctgcacccagctctcatcccatcggagctgctgcgattcccgcaggttcttccagaactggtttagcttgcccgcaggatcaggaaagtttgagaaaagcatctgcaaaaaaataaagagcagagcttaactcatttcctgtccccaccccatcccaggtcaccacctggctgaccccaggtccccgacccaacaacaaaccctcccaagttcctaactccctcacttggactcgagactcttcacgccccagcagcgctccgcctccaacttgacatcacgctttctgtcccactttcccacacttcgtgccctggagcacctcccggcctctacacgctgtatgttcccctgcgagcaccctcctcttggcctctggccaagtcccacccatctgtgggtaacaagggggtgttggtgttcttttcagccttgctaaactgtctgaatcaaggatcacaaactacagcctgcaggccaaatccagcccacagcctgtgtttgtaaataaagttttattggaacaaagccacacccctt

SEQ ID NO: 21773 - protein, 131 aa, Homo sapiens; identical to SEQ ID NO: 5074

SEQ ID NO: 21774 - DNA, 2562 bp, Homo sapiens
atgtgtttcaacaaaggcagccatggctttgataatgtcctcatggatatgaagaccatattcagagatttcgggccagatttcaagaggaatggcctggccgagacttttaacagcatccacatctaccccttcgtgtcagcttcggagccccaggaacatgatgccaacagctccaaacagatagcacgggagtccaggcctggcttccgcccggtctccgggcaacgctgcggccccgcccacgtcatggcgcccgaggagaacgcggggaccgaactcttgctgcagagtttggagcgccgcttcctggcggcgcgtgcactgcgctccttcccctggcagagcttagaagcaaagttaagagactcatcagattctgagctgctgcgggatattttgcagaagactgtgaagcatcctgtgtgtgtgaagcaccggccatcagtcaagtatgcctggtgctttctctcagaactcatcaaaaagcacgaggctgtccacacagagcctttggacgagctgtacgaggtgctggcggagaccctgatggccaaggagtccacccagggccaccggagctatttgctgccctcaggaggctcagtcacactcttcaagaacacagccatcatctcccacggcatcacaggcctggtcacatgagatgctgccctctaccttgcagaatgggccatcgagaacccggcagccttctctcataggatggtcctagagcttggcagtggcgccggcctcacaggcctggccatctgcaagatgtgccgcccctgggcatacatcttcagcgactgtcacagccgggtccttgagaagctctgagggaatgtccttctcagtggcctctcattagaggcagatatctctgccaacttagacagccccagggtgacagtggcccagctggactgggacgtcgcgacggtccgtcagcaatctgcaatccagccagatgttgtcattgcagcagacgtgctgtatagcccagaagccatcgtgtcgctggtcggggtcctgcggaggctggctgcctgccgggagcaccagcgggctcctcaagtctatgtggcccttaccatctgcaacccagagacgtgccagctgttcaccactgagctatgccgggctgggatcagatgggaagtggaacctcgtcatgaccagaaactgtttccctacgaagagcacttggagatggcaatgctgaacctcacactgtaggactcacatacgactccaacgggattgtgagaatcaagtcactctagtgggaagagtttttatatgggaaagcggataaaactttcattggactggaatgtttggagaatgttaatttccaaatcaggaaccacaaactgccctctaataagacatcagctatctaagcatgtgggtgctccctttctgccagcagttctggttcttaagaaaatcgccatcaatcagacatgaaatctctggctccaaaaatagcattttctttgtgcaaataaaaacgtgtgtatcaagtatgatgttcccccaatgtggacacactcggttccccacaaagccaagcccgctgcagctgccacatccctgggcttacagtgcagcaggtgcttttttcaagacaggaatcaaaatgttaggaacacggcggaaagatgacacctggagagcaaacgcaggatgaggagtactgcagaggtcacacggaagtcgcagaacagtaatccgctagcaggggcatggggcgtgaagaacagaagaagataggaagtgtttccgagcctccagaaaagaaatcagagccaagcacagcttcccgggtcacagaaccaattcatttaccaggcggcaccactgccgtcatttcaccttctggccactgggaggcgctgctcgaaagggtttgccctgagactccgagaagaagctgcgggaaggacagcaggggtcccggggttttagcctctggcccaggagttatgtgtccataaccaaatggagcacactctgcacccagctctcatcccatcggagctgctgcgattcccgcaggttcttccagaactggtttagcttgcccgcaggatcaggaaagtttgagaaaagcatctgcaaaaaaataaagagcagagcttaactcatttcctgtccccaccccatcccaggtcaccacctggctgaccccaggtccccgacccaacaacaaaccctcccaagttcctaactccctcacttggactcgagactcttcacgccccagcagcgctccgcctccaacttgacatcacgctttctgtcccactttcccacacttcgtgccctggagcacctcccggcctctacacgctgtatgttcccctgcgagcaccctcctcttggcctctggccaagtcccacccatctgtgggtaacaagggggtgttggtgttcttttcagccttgctaaactgtctgaatcaaggatcacaaactacagcctgcaggccaaatccagcccacagcctgtgtttgtaaataaagttttattggaacaaagccacacccctt

SEQ ID NO: 21775 - protein, 221 aa, Homo sapiens; identical to SEQ ID NO: 21767

SEQ ID NO: 21776 - DNA, 507 bp, Homo sapiens
agccaggtactatcctagattgtcttgtgatatttacaatctaggagaaggcaggagagagaactaagaacagagagcgtgttctgagatgtctgctgtgtttgcagacctagatttttggctggactattggcttgggatagatgaaaatcattccttgtatccccttatcttaaagtcaagactgaaccagcctccagactcaagccttcatgggagttcagataccatgaggaatgggtgtccctgcaatattgtcatggctgtcaaaagtgttattggagcctagaaactcctggagggcagagctgtgtctgccatcttcatcattgcattaccaccaccaagcacagtgcctggcacaaaagagttgctcaataaataaatcaggatgaatggataaatacatggataggcactttgagctacagatgagtttaaatactttgtgtttttcttagtcaaacatgtgcaattaagcatgtgataaatgatatgatgaccaca

SEQ ID NO: 21777 - protein, 66 aa, Homo sapiens
MSAVFADLDFWLDYWLGIDENHSLYPLILKSRLNQPPDSSLHGSSDTMRNGCPCNIVMAVKSVIGA

SEQ ID NO: 21778 - DNA, 3803 bp, Homo sapiens
acataagtcagaagtagaaaaagggacacaaactaagaagggtgctgagcgctcgtcacctggagggacttgtgcctctctcagtggtagtagaggggctacttcttcctgccacggtcatgattgagaggcaacgggtggcgagtctacaggggacgtcgtcgagcagacatgggataactttaagggagaagacagacaaggggaggggctcctgtgatgggatcagtcagatgcctgcctggccgctccccctgaggggacttgggctcctcttaacattggcaggctggtataaacttccggctcagatcaagctatgcctgatgctgccttaagccttatgaggtcgccacggaaccgcaggtgagggtctacttgaactccgtagctttagccgtggagctacaaactggaggacaagcgcaagcccttgtcctcactcattcattattcacacagagtatataacagtttttttttttttctttcttggagattcttcaagaaacttgaacaagagaaagatgagagatagaaagagagagagagtgaccggtctgccagaaaccaggactcagtcctccagcatcctgggatgtggactgagtcaagggagggccgctgtcagagccacttccctcctagaaagagacacagaggtgcctaacagaaaaccagggctctaccttctagcgtcctagagaaacaggcagagtcaaaagagggacaccctcatcagggccgcttccctcttactagaactgaagtcaaatctgacctacctgacctcagggtcagaagtcgaggactcagatgtggaatttttatggacacccacacggtagtcgatccgctctcctctgaaagacggtcacctttcggggacctaaaaattttttttcaggtggcaccccccctacaagccggccggccttctgggggagcccagagcgagcccggctcttgcctggtggcgtttcttgctggggcctccgaatgttgtacttgagcgagttagagaaaatgtcacactttgacatgaattaagagtctgtttatttagctgacggccaagaaatggctaactcttaaagttctcttggccccgaagaaagggctagattttcttttatacttcagtttagacaggggaaacgggtctagttaaaagaattttacagaagtaaagtaggcaaaaaagttaaaaggataaattgttacaggaaagtaaacagttctaggtgtaagggctttaagactattacaaagtgatagacgtggggctttaggcattatcaatcggacaaattcctaggaactgcggatattgctcgccacagtatcttatgagttaattgcattcttagatgtgctaagagtcagcttgcacaagttaagtccttgaggaaggggctgtcagtgaaaaggccaagataaaatctatctagctctcttagctaaaagaaagtcaattcaggtagaaacaaggctaagtgattaaaagaaaaggaaagtctaagaacaaagttaataaaaacaaggttaggcattacagatggggtcatccttatattcagcacagcgtttgtcctgaaacttcaatggagtgctcctagtttgataacttggaccatgccaaataaattgaatttctctttcttaacaacagatgtttgaatacagccccgtgaccctttctgctccttcctgccttcctcctctcctcttccttcccttccttttcaagagcagggtttgcaaactttttcttgaaagcatcagatagtaaatattttcgaattcgtgggccatacagtctcttatagtagttgctcaactctgccacccatagcatgaaagcagctgatatagttgaatatgagtccccacccaaaactcatgttgcaatccccagtgttagaggtggggtctggtgggaagagattggatcatgggggtggatttctcatgaatgatttagcctcatccctttggtcctgtccttgcaatagtgagtgagttcttgcaagatctggttgtttacgagtgtgtagcacctccctccttactctcttgctcccacttcaccttctgccatcattgtaagtaagtttcctgaggcctccacagaagctcagcagatgtcagtgtcatgctccctgtatagcctacaaaactgtgagccaattaaagctctttatatattgcccagtctcaggtatttctttatagcatgagagaacagccaaatccagcagccatagacaatatgtagcaaatggacatgactgtgtttcaataaaactttattgacaaacacatgcacaagcaggtcagatttggcccatgggcattagtgtcccaacctctgctctggagtattctcttcagcaacctctgcctcctgggttcaagcaattctcctgcctcagcctcccaagtagctgggattacaggcacctgccaccacacctggttaatttttgtattttttaatagaaatagggtttcaccttgttggccaggctggtctcaaactcctgacatcaggtgatccaaccacctcagcctcccaaaatgctgggattacagctgcccaccaccacacctggctaatttttgtatttttagtagagatgtgatttcactatgttgcctaggctggtctcgaactcctgatctcaagtgatccacctgcctcggcctcccaaagtgctgggattacaggtgtgagccactgcagctggcctctagatttttttttttttgatcgttgcttatttggtttgactttcattttttcccccattgtggtagtcattttctgaacgcctgttagtttgtccatctctctcctctgtagtccctagagtcagatgaactcctctgcaggtgcaatggtgtaacacactctagtgctgaattttgagcaggagaaagagagcaagagtgaccagtacccttggaaactctggcctcctgagaatttggtgtcttccctgcaaaggttgcaaacctgttaacccacaggccggagagagagagaagtcagaatcacgatctgttaagcttgagtttaatatttgatgcacagagatcactgagttttttgataagaattagagggggaagaaatagccagagaacaatttctatctccaggtgaggattcaggagataattctgcgaaaagaacttcctgagaactaagatggggaaaatcactggtattagaagagtgaaaaggtcagtaattaaggctacaactgtgctcttagaggcaaaagaagaaaatgagactgccaggcatgaataatgagaaatctttgatggaattagccatgcagaacagatattaaatgcatcctcattcttctcatagtcaaaagtatttgcctaagctggatgggaaaaagagaatcccatttcactaagtataaaagaggggattttagagaaggtctcagaagaaagagatgtggcggtttggtgaaactcaccagaggctgaaccctctccagcataacacacggattgggaggagtggggtggcattaggccaggtgcgtagcccagtgctgctctctctggacttgtttgctagctgaactcatccatttgcataattttcagtgccatttctcagctgatgagtcctgaacttttgtcttgaggttagacttctccttcaaacagcagtcttaaacactcaacttctttcttgttttttccacttgtcaactcatgaacacctcaaccttgttaaatccaaagccaaactcatggcttggagtggtagg

SEQ ID NO: 21779 - protein, 72 aa, Homo sapiens
MIERQRVASLQGTSSSRHGITLREKTDKGRGSCDGISQMPAWPLPLRGLGLLLTLAGWYKLPAQIKLCLMLP

SEQ ID NO: 21780 - DNA, 613 bp, Homo sapiens
ggggctacttcttcctgccacggtcatgattgagaggcaacgggtggcgagtctacaggggacgtcgtcgagcagacatgggataactttaagggagaagacagacaaggggaggggctcctgtgatgggatcagtcagatgcctgcctggccgctccccctgaggggacttgggctcctcttaacattggcaggctggtataaacttccggctcagatcaagctatgcctgatgctgccttaagccttatgaggtcgccacggaaccgcaggagatcatgctgctgtgatgccgggttttcttaacagcataaggaagacttgccccttgccctatcaaagagaatagttttggagggccgaagtgggaccaaaaaagatgcagttttcatttctattgggaaatgtgaaaaaaaaattgtcaactcttttagttaaaaacaacaacaacaaaaaaggaaacgagatgtggggccgccgcacgcaatatcgtgcattaaaaggatgttctactctggaggaaaatatctttgctgatgccagaccaacctaacacaaagaacttttggttttttaatgtgactgtgttttattttacactgtgtaattcact

SEQ ID NO: 21781 - protein, 72 aa, Homo sapiens; identical to SEQ ID NO: 21779

SEQ ID NO: 21782 - DNA, 329 bp, Homo sapiens
tgaggggacttgggctcctcttaacattggcaggctggtataaacttccggctcagatcaagctatgcctgatgctgccttaagccttatgaggtcgccacggaaccgcagaaactcctggagggcagagctgtgtctgccatcttcatcattgcattaccaccaccaagcacagtgcctggcacaaaagagttgctcaataaataaatcaggatgaatggataaatacatggataggcactttgagctacagatgagtttaaatactttgtgtttttcttagtcaaacatgtgcaattaagcatgtgataaatgatatgatgaccaca

SEQ ID NO: 21783 - protein, 50 aa, Homo sapiens
MPDAALSLMRSPRNRRNSWRAELCLPSSSLHYHHQAQCLAQKSCSINKSG

SEQ ID NO: 21784 - DNA, 4132 bp, Homo sapiens
catatatatatatatatacacacacacatatatatatacacattttctttatccactaattgttgatgggcatttgggctgattctatagttttgcaactgtgaattttgctgctgtaaacgtgtgcaaaagtatctttttcatataatgacttcttttcctctgggtagataccttgcagtgggattgctggatcaaatggtagatctacttttagttctttaaggaatctccatactgctttccatagtggtggtactagcttacattcccaccatcagtgtaaaagctttctttcaccacgtccgtgccaacatcaatttttgctttttttgtttttgtttttgttttggttttgagatggagtctcgctctgtcacccaggctggagtacagtggtgcgatatcagctcactgcaacctctgcctcccgggttcaagcaattctcctgcctcagtctcctgagtagctgggattacaggcaactgccaccatgcctggctaatttttgtattttcagtagagactcggtttcaccatgttggtcaggctggtctcaaactcctgacctcctgatccacccacctcagcctcccaaagtgctgggactacaggcgtgagccaccgcacctggccctatttttgtttattttacacgtggtattgcattgtgattttgatttgcatttccctggtaattagtgatgttgagcactttttcatgtgtttgttggccatttgtatatcttcttttgagaattgtctattcatgtccttggcacgctttttgatgggattatttttttcttgctgattagagttccctgtagattctggacattagtcctttgtcagatgcagtttgtgaaaattttctcccactctgtgggtgatctgcttactctgctgattatttcctatgctgtgcaggaggcttttagtttaattaagtcccatctatttatctttgtttctattgcatttgcttttgggttcttggtcatgaactgtttgcctaagcaaacgtgtagaagcgttttccaatgttatcttctagaatgtttatggtttcagaccttagatttaagtctttgatccatcttatgttgatttctgtataaggtgagagatgaggatccagttttattcttttacatgtggcttgccaattatcccagcactatttgttgtatagggtgtactttccctactttgtttttgtttactttgttgaagatcagttgggtgttaagtatttggctttatttctagcttctctactcggtcccattggtcatgtgcctatttttataccagcaccatgctgttttggtgactatagccttgtaatatagtttgaagttgggtaatgtgatgcctctagattggttctttttgcttagttttgctttggctgtgcagactcttttttagatccaattgaattttggcatttttttttccagttctataaagaatgatgatggtatattgataggaattgcattgaatttgtagactgcttttggcagtatggtcgttttcacaatattgagtctacccatccatgagcatggaatgtgtttccatttctttgtgtcatctatgatttctttcaacagtgttttgtagttttccttgtaggggtctttcacctccttggttaggtatattcctaagtatattatttttacagctattataaaagggtttgatttgattctcagcctggtagatgttggtgtatagcactgctactgatttgtgtacatagattttgtatcctgataaatggatttattgtatatttctaaatagcaataagatttgaaatattcccaacacaaagaaatgatcaatgtttgaggtgattaatatcctaaagaccctgatttgatcattacacattgcatgcatgtgccagaatctcacatggaccccacaaatgtgtacaattattctctatcaaaaacatttttttaagaaacatgcaggaatacactgtacctcttccttgctgtctctggatattgtcacatgaggacttgacatgcggattgtggcagcctctgtgaccaagagcagaagacaatagcagcatagaaacctcaaatgaaaaacctaacatctcaagctactaatttagccaaccttggcatcagctatctccggtcttagtacatgaggtgataagccccactgttcaagttgggtggccatcaattgctgcacaatagaagttaatgaggcttcttcctcctggaacccctactagaccctgacatacccattcagtcacaggcagaaagggaagcagagggtaaggagacctggctggctgtgccagatgcagatcttacctgtcctgcttagaacattcaaagctcaattggttaaacaaaaaaaggaaaaagacagtaaggagtataacactccccagatgcaacttaatctaacactctatactttaaattttctaaacatacatagaaatcagaccactacttctgcagaacattttactggtaaaaagaacagcccacatgagggaaaactgatttggtggaaagacaacaaaaacaaaacatgggaaataggtaaggtgataacatgggggagaggttttgctcgtgtttcaccaggagaaaatcagcttcctgtttggatacccactagacgtttgaagttctacaatgaacccatcagagatgcaaatgaaagtgcctccgcagagacagaaaacccacaatcgagcatcatcgacccgcagggtgaacaaaatggtgatatcagaagaacagataaagttaccatccaccaagaaaacagcacatgtggagagccagggagaagaatagaaagaaaaagagacagagatcagagacagacacagaaagtgagattggggagagagatagtgtaaaagagagagagagagagaccataagagaagggagacaaagagataaaaggtgcgagtcagtaggtgaggagaaagactgaaaactatgagaaacagcaactaagacacaaaggaggtgggagactgcccgggtgccgcagcacccacaccgtcctcttgccccctgtcacttgggttaaaaccaccggaaattccactattgcaaattttatattaatccttgtatgtctgacttttctattgttagtctacaggtgtatccagcagctccagagagacagcgaccagggagaaggggccatgatgatggtggtggttttgtcaaaacgaaaagggggatatgtaggggaaagaaagagagatcagactgttactgtgtctacatagaaagggaagacataagagactccattttgaaaaagatctgtactttaagcaattgctttgctgagatgttgttaatctgtagctttgccccagccactttgccccaaccactttgacccaacctggagctgaaaaaacatgtgtcgtatgaaatcaaggtttaagggatgtagggctgtgcaggacgtgccttgttaacaagatgtttccaagcagtatacttggtaaaagtcatcgccattctctagtctcaataaaccaggggcacaatgcactatggaaagccgcaaggagccctgcccttgaaagctgggtattgtccaaggtttctccccatgtgatagtctgaaaagtggcctcgtgggatgagaaagacctgacggtcccccagcccgacacccataaagggtctgtgctgagatgggctagtcaaagcggaaagcctcttgcagttgagatagaggaaggccactgtctcctgcctgcccctgggaactgaatgtctcggtataaaacccgattgtacatttgttcaattctgagatgggggaaaaaccgccctatggtgggaggtgagacatgtttgcagcaatgctgccttgttattctttactccactgagatgtttgggtggagagaaacatcaatctggcttacgcgcacgtccagtcatagtaccttcccttgaacttcattatgacatagattctattgctcacatgtttgttgctgaccttctccttattatcaccctgccctcctactacattcctttttgctgaaataatgaagataataatcaataaaaactgagggaaatc

SEQ ID NO: 21785 - protein, 191 aa, Homo sapiens [sequence omitted]

SEQ ID NO: 21786 - DNA, 455 bp, Homo sapiens
tacaaactcccttataaatcaagacagtgattcccagacaaattatcaaaagagtataaaagaagtcttctttgagtgtgaaatatctcatggaatatagcacatggcctcttcatgaagaatctactgggagagaagaagacaagctattctctcttacgtgatgacaaacttgttgaaatgtcatttcattttgtggctccagccccagggattctgactctgattctaaagggtctgcatgcagagtgagcaagccacctggatgattctcttgcaggtgttttaagggcaggagtttgagacaccctgatgcaaaagaacgaatcctcaaggaagttggctgtacatgtattttccttcctgccatctaatcttgtcttcctagcagtcctgggagagaagcagatgtggtttccaatcccactttccagaagaggagactgaggcagagg

SEQ ID NO: 21787 - protein, 45 aa, Homo sapiens
MKNLLGEKKTSYSLLRDDKLVEMSFHFVAPAPGILTLILKGLHAE

SEQ ID NO: 21788 - DNA, 1879 bp, Homo sapiens
atgggggagcaggtgcctggattatccaccctaacaaatctggacaaaggaaaacgaggttgcagtaaaaacagggataccataagcaaccacctctttcctcaacgatgtgatgaaagcaaaagccaagtagctccatatatccaacttaaaaatataaaaagttacgcccgtgggctgcagttggagctatggcggcagcagctgtcactgggcctagcctggggtgtggacctggggactccccagaaggccccgatgtggaggctcacggagcgtcggcggaaggcgcacaggatgctaaagctttacaacggcctctcagaaggggaagcggtgggactccctgcagggcccgaccccctggaccccactgatctgaacggggcacactttgacccggaagtttacctagacaagctgcctagagagtcccctctggcccagctgatggacagtgagacggacatggtgcagcagatccgggctctagacagcgacatgcaaaccctggtctatgagaactacgataaggagaccatcggggtgcaacctggttggggcggggaggaggtgcagggcctggccagagcgggcatggccgcaggcaggggacagcgactgcttgggccagggcaggcgagctcagcgcaggccagggcccggcgtgtccgcggtgcaggcagagcccccggagccatggccagcccttccggcagctccaaagccactggcaagccccgaggcagggatggccggcccaggagagaggaggacgacgtcactcccgaagagaagaggctgcggctgttgctggaggagggaagcgcacagcccgatgacggggaggacgcaccgcggccaggcaggaaggagaccggcacccagacaggtggcgacggcagaggagtaagtgacgcgggcgcgggggtccgggggtgccgggggtgccggggacgcggggtaggggcggcgggaggctccgtggccggccccgggttgaagttgagggcggccttcattcggaacccatttaggcagcacgggcagccctcctcgccgtgggcggcatcagagcccccctgcccagtcttggggttgctcctggatgccgtctgggaggcttgctcatggtgacatccttatctccccgtgcacgttaccgcattcagagcttgggtcacctggacactgaactcaggcgaattttctctgagatcctgggagaaggaggacagttctctggaaggttttccagggccgatcacggaaaggatgagaagggagaggtcctggtcggggacacaattacgatggcagtgtaacgccgggaaactttattgcatgaagtccctctcactccctctacctccttcttttacgtggactctgccaaagaccaggataccagaatgcagtggagtgaccaagtgtagtgggaccttgggaacctgagtctggagccaggcggctggggtttgcatcctggttctgcccctccttagctggctgacatggcacaagccacttaccctctctgagccttactgtcttcagtggcaaatggatctgtcaacaggcctcgttgcctggggttgttactgctgagattaagggaagctcgtccatagaagcacttagcgttgtgcctggcacatagtgtatggtggataaatgggacttaggactaaaactcatgccttggtgtgtttttgcagtgatgttttgttctggggtgcatcacaagagacaaggttcttggctgggcgtggtggctcaagccaataatcccagcactttgagaggctgaaaggggaggattgcttgagcccaggagtttaagaccagctgggcaacatggtgaagcctcatatctacc

SEQ ID NO: 21789 - protein, 378 aa, Homo sapiens
MGEQVPGLSTLTNLDKGKRGCSKNRDTISNHLFPQRCDESKSQVAPYIQLKNIKSYARGLQLELWRQQLSLGLAWGVDLGTPQKAPMWRLTERRRKAHRMLKLYNGLSEGEAVGLPAGPDPLDPTDLNGAHFDPEVYLDKLPRESPLAQLMDSETDMVQQIRALDSDMQTLVYENYDKETIGVQPGWGGEEVQGLARAGMAAGRGQRLLGPGQASSAQARARRVRGAGRAPGAMASPSGSSKATGKPRGRDGRPRREEDDVTPEEKRLRLLLEEGSAQPDDGEDAPRPGRKETGTQTGGDGRGVSDAGAGVRGCRGCRGRGVGAAGGSVAGPGLKLRAAFIRNPFRQHGQPSSPWAASEPPCPVLGLLLDAVWEACSW

SEQ ID NO: 21790 - DNA, 1229 bp, Homo sapiens
cccccgcgatgcggggagggctgagactgtggtctgggctgttccagacttcaacactcaccccttgtccccccgcagggctatggcgtgtgctcggtggggctggagcggctggcttacctcctcgtggcttacagcctgggcgcctcagccgcctcactcctgggcctgctgggcctgtggctgccacgcccggtgcccctggtggccggagcaggggtgcacctgctgctcaccttcatcctctttttctgggcccctgtgcctcgggtcctgcaacacagctggatcctctatgtggcagctgccctttggggtgtgggcagtgccctgaacaagactggactcagcacactcctgggaatcttgtacgaagacaaggagagacaggacttcatcttcaccatctaccactggtggcaggctgtggccatcttcaccgtgtacctgggctcgagcctgcacatgaaggctaagctggcggtgctgctggtgacgctggtggcggccgcggtctcctacctgcggatggagcagaagctgcgccggggcgtggccccgcgccagccccgcatcccgcggccccagcacaaggtgcgcggttaccgctacttggaggaggacaactcggacgagagcgacgcggagggcgagcatggggacggcgcggaggaggaggcgccgcccgcagggcccaggcctggccccgagcccgctggactcggccgccggccctgcccgtacgaacaggcgcaggggggagacgggccggaggagcagtgaggggccgcctggtccccggactcagcctccctcctcgccggcctcagtttaccacgtctgaggtcggggggaccccctccgagtcccgcgctgtcttcaaaggcccctgtctcccctcccccacgttggggacgcccctcccagagcccaggtcacctccgggcttccgcagccccctccaaggcggagtggagccttgggaacccctcggccaagcacaggggttcgaaaatacagctgaaaccccgcgggcccttagcacgcgccccagcgccggagcacggtcagggtcttcttgcgacccggcccgctccagatccccacagctctcggccgcggacccgggccgcgtgtgagcgcactttgcacctcctatccccagggtccgccgagagccacgattttttacagaaaatgagcaataaagagattttgtactgtcctga

SEQ ID NO: 21791 - protein, 155 aa, Homo sapiens
MRGGLRLWSGLFQTSTLTPCPPAGLWRVLGGAGAAGLPPRGLQPGRLSRLTPGPAGPVAATPGAPGGRSRGAPAAHLHPLFLGPCASGPATQLDPLCGSCPLGCGQCPEQDWTQHTPGNLVRRQGETGLHLHHLPLVAGCGHLHRVPGLEPAHEG

SEQ ID NO: 21792 - DNA, 2333 bp, Homo sapiens
cggggcgggggcaggtcccggccgccgggaggaagtggccgggcggtcgcagggactccggggcgaccgccgcgagtccgcagtagttcgggccatggaggcggagccgccgctctacccgatggcgggggctgcggggccgcagggcgacgaggacctgctcggggtcccggacgggcccgaggccccgctggacgagctggtgggcgcgtaccccaactacaacgaggaggaggaggagcgccgctactaccgccgcaagcgcctgggcgtgctcaagaacgtgctggctgccagcgccgggggcatgctcacctacggcgtctacctgggcctcctgcagatgcagctgatcctgcactacgacgagacctaccgcgaggtgaagtatggcaacatggggctgcccgacatcgacagcaaaatgctgatgggcatcaacgtgactcccatcgccgccctgctctacacacctgtgctcatcaggttttttggaacgaagtggatgatgttcctcgctgtgggcatctacgccctctttgtctccaccaactactgggagcgctactacacgcttgtgccctcggctgtggccctgggcatggccatcgtgcctctttgggcttccatgggcaactacatcaccaggatggcgcagaagtaccatgagtactcccactacaaggagcaggatgggcaggggatgaagcagcggcctccgcggggctcccacgcgccctatctcctggtcttccaagccatcttctacagcttcttccatctgagcttcgcctgcgcccagctgcccatgatttatttcctgaaccactacctgtatgacctgaaccacacgctgtacaatgtgcagagctgcggcaccaacagccacgggatcctcagcggcttcaacaagacggttctgcggacgctcccgcggagcggaaacctcattgtggtggagagcgtgctcatggcagtggcttcctggccatgctgctggtgctgggtttgtgcggagccgcttaccggcccacggaggagatcgatctgcgcagcgtgggctggggcaacatcttccagctgcccttcaagcacgtgcgtgactaccgcctgcgccacctcgtgcctttctttatctacagcggcttcgaggtgctctttgcctgcactggtatcgccttgggctatggcgtgtgctcggtggggctggagcggctggcttacctcctcgtggcttacagcctgggcgcctcagccgcctcactcctgggcctgctgggcctgtggctgccacgcccggtgcccctggtggccggagcaggggtgcacctgctgctcaccttcatcctctttttctgggcccctgtgcctcgggtcctgcaacacagctggatcctctatgtggcagctgccctttggggtgtgggcagtgccctgaacaagactggactcagcacactcctgggaatcttgtacgaagacaaggagagacaggacttcatcttcaccatctaccactggtggcaggctgtggccatcttcaccgtgtacctgggctcgagcctgcacatgaaggctaagctggcggtgctgctggtgacgctggtggcggccgcggtctcctacctgcggatggagcagaagctgcgccggggcgtggccccgcgccagccccgcatcccgcggccccagcacaaggtgcgcggttaccgctacttggaggaggacaactcggacgagagcgacgcggagggcgagcatggggacggcgcggaggaggaggcgccgcccgcagggcccaggcctggccccgagcccgctggactcggccgccggccctgcccgtacgaacaggcgcaggggggagacgggccggaggagcagtgaggggccgcctggtccccggactcagcctccctcctcgccggcctcagtttaccacgtctgaggtcggggggaccccctccgagtcccgcgctgtcttcaaaggcccctgtctcccctcccccacgttggggacgcccctcccagagcccaggtcacctccgggcttccgcagccccctccaaggcggagtggagccttgggaacccctcggccaagcacaggggttcgaaaatacagctgaaaccccgcgggcccttagcacgcgccccagcgccggagcacggtcagggtcttcttgcgacccggcccgctccagatccccacagctctcggccgcggacccgggccgcgtgtgagcgcactttgcacctcctatccccagggtccgccgagagccacgattttttacagaaaatgagcaataaagagattttgtactgtcctga

SEQ ID NO: 21793 - protein, 447 aa, Homo sapiens
MEAEPPLYPMAGAAGPQGDEDLLGVPDGPEAPLDELVGAYPNYNEEEEERRYYRRKRLGVLKNVLAASAGGMLTYGVYLGLLQMQLILHYDETYREVKYGNMGLPDIDSKMLMGINVTPIAALLYTPVLIRFFGTKWMMFLAVGIYALFVSTNYWERYYTLVPSAVALGMAIVPLWASMGNYITRMAQKYHEYSHYKEQDGQGMKQRPPRGSHAPYLLVFQAIFYSFFHLSFACAQLPMIYFLNHYLYDLNHTLYNVQSCGTNSHGILSGFNKTVLRTLPRSGNLIVVESVLMAVASWPCCWCWVCAEPLTGPRRRSICAAWAGATSSSCPSSTCVTTACATSCLSLSTAASRCSLPALVSPWAMACARWGWSGWLTSSWLTAWAPQPPHSWACWACGCHARCPWWPEQGCTCCSPSSSFSGPLCLGSCNTAGSSMWQLPFGVWAVP

SEQ ID NO: 21794 - DNA, 831 bp, Homo sapiens
cgggaggaagtggccgggcggtcgcagggactccggggcgaccgccgcgagtccgcagtagttcgggccatggaggcggagccgccgctctacccgatggcgggggctgcggggccgcagggcgacgaggacctgctcggggtcccggacgggcccgaggccccgctggacgagctggtgggcgcgtaccccaactacaacgaggaggaggaggagcgccgctactaccgccgcaagcgcctgggcgtgctcaagaacgtgctggctgccagcgccgggggcatgctcacctacggcgtctacctgggcctcctgcagatgcagctgatcctgcactacgacgagacctaccgcgaggtgaagtatggcaacatggggctgcccgacatcgacagcaaaatgctgatgggcatcaacgtgactcccatcgccgccctgctctacacacctgtgctcatcaggttttttggaacgaagtggatgatgttcctcgctgtgggcatctacgccctctttgtctccaccaactactgggagcgctactacacgcttgtgccctcggctgtggccctgggcatggccatcgtgcctctttgggcttccatgggcaactacatcaccagctctgggtgcaggacacacaggagtggcacaggtcgggctggggagagccttctctcctttgtggtccaggatggcgcagaagtaccatgagtactcccactacaaggagcaggatgggcaggggatgaagcagcggcctccgcggggctcccacgcgccctatctcctggtcttccaagccatcttctacagcttcttccatgtgag

SEQ ID NO: 21795 - protein, 214 aa, Homo sapiens
MEAEPPLYPMAGAAGPQGDEDLLGVPDGPEAPLDELVGAYPNYNEEEEERRYYRRKRLGVLKNVLAASAGGMLTYGVYLGLLQMQLILHYDETYREVKYGNMGLPDIDSKMLMGINVTPIAALLYTPVLIRFFGTKWMMFLAVGIYALFVSTNYWERYYTLVPSAVALGMAIVPLWASMGNYITSSGCRTHRSGTGRAGESLLSFVVQDGAEVP

SEQ ID NO: 21796 - DNA, 1012 bp, Homo sapiens
ccccgcggcgggggtggggttggggggtcaagtagcgcagcgtccccgggtcccagccagagcctcggtgtgggtgggggacgggggtccgggctcccggacagacctgccaccgtcagaattggaggccggcggagcaaggcgggtgggggtctgggcttagctggccaagtggccgcgggctggcagaaggcgtggcgcagcccgggaaccccgctgtcctgaggggcgctgtcagcgggaatgccttcggtgattggagctccctgcgaggcctgcatgccgtcttctgctcggtggcgcccaaagctaggctgctccctgcacgccgctctctgtcctgtccccaggcctcctgcagatgcagctgatcctgcactacgacgagacctaccgcgaggtgaagtatggcaacatggggctgcccgacatcgacagcaaaatgctgatgggcatcaacgtgactcccatcgccgccctgctctacacacctgtgctcatcaggttttttggaacgaagtggatgatgttcctcgctgtgggcatctacgccctctttgtctccaccaactactgggagcgctactacacgcttgtgccctcggctgtggccctgggcatggccatcgtgcctctttgggcttccatgggcaactacatcaccaggtgagcctggtgggcagcagggcaggaggctggagacctggccaagcctccactttattgccaactttggctgggggaccacaggaagccccttccgccctctgggcctcagtttccccacaccggggctggtctgctcctagctctgggtgcaggacacacaggagtggcacaggtcgggctggggagagccttctctcctttgtggtccaggatggcgcagaagtaccatgagtactcccactacaaggagcaggatgggcaggggatgaagcagcggcctccgcggggctcccacgcgccctatctcctggtcttccaagccatcttctacagcttcttccat

SEQ ID NO: 21797 - protein, 218 aa, Homo sapiens
MPSVIGAPCEACMPSSARWRPKLGCSLHAALCPVPRPPADAADPALRRDLPRGEVWQHGAARHRQQNADGHQRDSHRRPALHTCAHQVFWNEVDDVPRCGHLRPLCLHQLLGALLHACALGCGPGHGHRASLGFHGQLHHQVSLVGSRAGGWRPGQASTLLPTLAGGPQEAPSALWASVSPHRGWSAPSSGCRTHRSGTGRAGESLLSFVVQDGAEVP

SEQ ID NO: 21798 - DNA, 964 bp, Homo sapiens
ggaagtggccgggcggtcgcagggactccggggcgaccgccgcgagtccgcagtagttcgggccatggaggcggagccgccgctctacccgatggcgggggctgcggggccgcagggcgacgaggacctgctcggggtcccggacgggcccgaggccccgctggacgagctggtgggcgcgtaccccaactacaacgaggaggaggaggagcgccgctactaccgccgcaagcgcctgggcgtgctcaagaacgtgctggctgccagcgccgggggcatgctcacctacggcgtctacctgggcctcctgcagatgcagctgatcctgcactacgacgagacctaccgcgaggtgaagtatggcaacatggggctgcccgacatcgacagcaaaatgctgatgggcatcaacgtgactcccatcgccgccctgctctacacacctgtgctcatcaggttttttggaacgaagtggatgatgttcctcgctgtgggcatctacgccctctttgtctccaccaactactgggagcgctactacacgcttgtgccctcggctgtggccctgggcatggccatcgtgcctctttgggcttccatgggcaactacatcaccaggtgagcctggtgggcagcagggcaggaggctggagacctggccaagcctccactttattgccaactttggctgggggaccacaggaagccccttccgccctctgggcctcagtttccccacaccggggctggtctgctcctagctctgggtgcaggacacacaggagtggcacaggtcgggctggggagagccttctctcctttgtggtccaggatggcgcagaagtaccatgagtactcccactacaaggagcaggatgggcaggggatgaagcagcggcctccgcggggctcccacgcgccctatctcctggtcttccaagccatcttctacagcttcttccat

SEQ ID NO: 21799 - protein, 185 aa, Homo sapiens
MEAEPPLYPMAGAAGPQGDEDLLGVPDGPEAPLDELVGAYPNYNEEEEERRYYRRKRLGVLKNVLAASAGGMLTYGVYLGLLQMQLILHYDETYREVKYGNMGLPDIDSKMLMGINVTPIAALLYTPVLIRFFGTKWMMFLAVGIYALFVSTNYWERYYTLVPSAVALGMAIVPLWASMGNYITR

SEQ ID NO: 21800 - DNA, 888 bp, Homo sapiens
agtagttcgggccatggaggcggagccgccgctctacccgatggcgggggctgcggggccgcagggcgacgaggacctgctcggggtcccggacgggcccgaggccccgctggacgagctggtgggcgcgtaccccaactacaacgaggaggaggaggagcgccgctactaccgccgcaagcgcctgggcgtgctcaagaacgtgctggctgccagcgccgggggcatgctcacctacggcgtctacctgggtaggtgccgctcggggacccggggccgccccgcccgctcccagcccggcccgggaaacagaaaccgcgggccgccgcctcccgcccgctctcacttcccctccgctgccctcgcagctgcagccacggccccccgcggcgggggtggggttggggggtcaagtagcgcagcgtccccgggtcccagccagagcctcggtgtgggtgggggacgggggtccgggctcccggacagacctgccaccgtcagaattggaggccggcggagcaaggcgggtgggggtctgggcttagctggccaagtggccgcgggctggcagaaggcgtggcgcagcccgggaaccccgctgtcctgaggggcgctgtcagcgggaatgccttcggtgattggagctccctgcgaggcctgcatgccgtcttctgctcggtggcgcccaaagctaggctgctccctgcacgccgctctctgtcctgtccccaggcctcctgcagatgcagctgatcctgcactacgacgagacctaccgcgaggtgaagtatggcaacatggggctgcccgacatcgacagcaaaatgctgatgggcatcaacgtgactcccatcgccgccctgctctacacacctgtgctcatcaggt

SEQ ID NO: 21801 - protein, 197 aa, Homo sapiens
MEAEPPLYPMAGAAGPQGDEDLLGVPDGPEAPLDELVGAYPNYNEEEEERRYYRRKRLGVLKNVLAASAGGMLTYGVYLGRCRSGTRGRPARSQPGPGNRNRGPPPPARSHFPSAALAAAATAPRGGGGVGGSSSAASPGPSQSLGVGGGRGSGLPDRPATVRIGGRRSKAGGGLGLAGQVAAGWQKAWRSPGTPLS

SEQ ID NO: 21802 - DNA, 5300 bp, Homo sapiens
gagagggtgcacgtgacgctgggcagatgctgcctgctgagggtggggacaggggggtgaccaggtccagagggagggaccaggttgaatgttctgggctactgctgcctttgtagggccccgctcctgcagctgggatgggaaggcaggaggtggaatcagagccgaagggagaaaagggcgttcctgcctccgtgctggtgccagccagagctggcaggcagggtaggggcctagacattcccccgagccctgcctgtttacttgaagttcatcggaggagcactctgacgcactcgttcctcggcctggtgccaaggacccgtggtgaccctttcctccttccctctccgagtccctttcctccagatctcagcttggctgatgcttcctccaggcagcccacccagattatgccctcatccactgtcacagtggccccttgactctgctccccagcgttctgagttgtgccatgtgataaatgtctggttacactctacccacctcccaaccctgtccacatctcccttatttccccctcattagactgggaggcaggcccctctgtgcctacttatttgagacctagtgcttgaagcctctcatgttaccggtgtaatgatggcacctgccagctaatgatgagaccacacagtcggttctgagcccagggcccagcatcggtgagcgcaaggctgtgggtgattgttaagtggccaccttgagggcgggacctgctccggtctgcaggatggccctgctggaccagtgtgctactgagagcctggtcaggagccccaggccagccctcagctggagtgattgtggggccaggctgaacccaccatcttcctgctctgattgggagaagctgggcagtggcccgcacacaggacaggcaccatggtccccataggggatggctcgtcacgggagcaggactgagacccaggagccaagaacgagcctctcgagccaccatcaggcctgtctccgggctctgcctcttactggttgtgggaccttgggcaaatcactcaccttctctgcctcggtttcctcatctgtgaaatggggatgctaatggcacctggtgtcattgtgaggattaaatgacatcacgctgcataaaacatttgctgttgtgcccacagaaagtactcgacaaaggtcagctctgggtgttttgctaagtagcctgcaaatatttatctccctcaactccgcactctcctgggtccttctccattctactctcaccttcagacttctgccagtggtcaaaggcaaaccacgcctgtgcctctctcaccctttgtaagaatctctgcagaaaccacaaaaatgcaaggcacgtaacgtgaatggtggactgtgggccgggagctctgtgggggatggagttctgcagggaacattccagcaaccctcctagcaacgctgaaaccaactcaccagggccacaggacacatctctcccacagggcaaccagccctggcattgcccctacgggtcactcactctggactgaggcccccagggagtgcccagggcaggaccctggcaagcggagaagccaaggccgccttctgcctgagattggggggatcctgggcctgttatctcccgagggtgctgggcagccattgtggacacacagaatagggaactcctgaatcaggcactgggctggggtcccccaagcccacccccgcggcactcatcccacagtgtgaggttgtaaggagtgtgatccccatgcctgccctcgctcatttcaccaccacggccgcccactgagggaccactattcaccccactgaaggagatggaggctgaggctcagagagggccagagcttgcctgataccacccagctcctcacattggaaaacccaaatccagaagagcagaaggctatccacctcagctcccacctccctcacagtcccctggggatgggcagccaagtccttgggggaagggacactgggctggggcctggacggcagacccaaggctgggtggactccggtaggccagctgtgggaggggtgaccggtgaggggaggtctcttgctgtttggattccatttcctcggcctccctcctcactattgctgccactccccacactgcttaggttgtggggtctgagactgcctcttgcctcctgcggctgagccactgaggtccaggggctgatgggcccaagggtctctggggcgtggccccccatcacaggttgaggtgcatttggcccagacctgcagcttctggggtgggggggagttgccacatcatttggtgatgaagatagcggctgtttcctctggcctgggggccagggcaggaccagccacttcctctcaaggccacgggcctctaaaaacaatactcaggtgcccatgtgctgggcactatgccagcctgggtgctcgctgtgggtgcccacaggctccgggaacagagtggggaggaacggggctgacatatcacagggagtgaatggctggccgagccgctgcccccaacctcacagcagggaccgtccctgggcagggactccctgctcgttcacaccctggcctatcaagtgggttggattccagggaaacggaggctctgcccgttctctcattcttcctgcctcagtttcctcatctacaccatgggccttctaagagcatcctcccagcatggcatggtctgggggcccaatgacctgggtttaaactgcagcaaccacatgtgtgagtggggagaccttgggcaggttgcttgacctctttgtattcacgtttcccatctgtaaaattgggcactgcctgtggcacccataccactgtcgggagaattcaagcactgggaccccgggaagtgctcagtatccatggaggacggatgtaccagaggagggctcagggaggagacccctggggcaggggcctgaaggggccttgatccaaggtgggtgttggggagacaaggacatcaccctgagacccaactgaggacagggatgtggtgacagagggactgaacatggtgggtagagggcctgggggacccccatcagggcagccagaaggcggggatcactaggccaacttcaggggacccacaggcccaataccgcagggtctccgattctgatctcctgcagtgtagcttcattaaacaaacatgatgagaggctgtgattttgaactgagctcctgtactaggccccaacagaccagaccaaaccaaaatggaggcactcatgccaaatgccacatcatcaaaccgaagctttaaggaagcagacagagcccaaaaccacagaccagtttctccgggaagcaggagattccagtccacctgagccggcatcatcaggtcccctctgccttaccccttagaaaaaagcagtccgcttagaaaaaagcagtctgcagcgatccggtattaggcggtttggtgtttcctatttttctgtttcctcctttctgccttatgaaccccctgctctgccactgcctggtgggagctctcactccattttgtagaatggaggctgtccggattcacgaatcatgaatagaagccaatttgatctataactaaatgtgttgtcattttgtcttttgatggccttaagctggattttcatgaggcctcccaaagctcagcagcccctcccttggggagccagggaccagcgtatcccctcattggtggctcgggccaacccagccccgggtcacaaagaggctgaacagcctcggctccctgatggggcacagttcccgggatgagaagtgcctcctgcaggcggggcggggctggctggccactcctttcttggaccctgacaaagtccattgctaagaatgattctttcccagagtcattcatggccacatccctgcatcagcactgggcatgcaggctggtgcccaggaaacggctgttgctggaagggatacttgacccctgtggggaaggggcgcacagtccttcctggggcagctggacccagagctgttcccttggttcccttggagggtgtccgggaatcccaggaaaaggaggcggtggcaacccagctcggacaacggaagggtgcctgctggccaggggggtgcccgggacctcgctgccactccccagatctgcctctcctccttccgctttctcccccagcaggcaggcagatgagctcagccaggacacagtggcctctgagtgcagctgccggtggctaggcccgcctgggctgcctgtaacccggagttgctgagctggactctggcccgactgctggcccactacagccccagcctccccgggatactctacctgaggctctgccaagctgcccttcctcctggctgtcccgctctgcctggtggccctgctgttaagaaatgtccaacgcagggccagtccccgggggaggggtggggcggagttgccctagcctcgtgcctgactctggctctgggcgggctggaggctgcaagccaagatttcaccaccgcctccctcgggggcctcgacatctcctcccagaccacagagaagaagtcaacgcccagagggcgccaggctagagccacacagcagggctgagctccgagctgaggggcagcctgaggaggaggaggagaggctgtgcagcagggctgagcactgagctgagggccagcctgaggaggaggagtggggcagtgggccctgggaatcccggtgtggggtggggaactattattgtattaattatattctattataatattatgtggaatgttatggcccagaatagcaaggaagtctcgaccccccactcccagccttccctcaatgcctcccctaaggaataagaccactactactcctgctgccctcctcctaccaccttgcctggtttacaagacaggaggaaagagagaaggcaaaaagttagaaaaaaacagaagtaagagaaatagccagaagaccttggcgccaccacctggccctggtagttaaaaaaaagtgataataatatcaacccctgacctaaactacttgtgttatctgtaaattccagacattgtatgagaaagcactgcaaaactttctgttctgttagctgacgcatgcagcccccggtcacgttccccgagcttgctcgatttatcacgaccctttcacgtggaccccttaaagttgtaagcctttaaaaaggccaagaatgtctttttcagggagctcggctcttgacgcaagtctgctgatgctcccagctgaataaacctcttccttcttt

SEQ ID NO: 21803 - protein, 102 aa, Homo sapiens
MGRQEVESEPKGEKGVPASVLVPARAGRQGRGLDIPPSPACLLEVHRRSTLTHSFLGLVPRTRGDPFLLPSPSPFPPDLSLADASSRQPTQIMPSSTVTVAP

SEQ ID NO: 21804 - DNA, 1910 bp, Homo sapiens
ggacatttcttaacagcagggccaccaggcagagcgggacagccaggaggaagggcagcttggcagagcctcaggatggacccccttggggacacgctgcggcgactgcgggaggccttccacgcggggcgcacgcggccagctgagttccgggctgcgcagctccaaggcctgggccgcttcctgcaagaaaacaagcagcttctgcacgacgcactggcccaggacctgcacaagtcagccttcgagtcggaggtgtctgaggttgccatcagccagggcgaggtcaccctggccctcaggaactccgggcctggatgaaggacgagcgtgtgcccaagaacctggccacgcagctggactccgccttcatccggaaggagccctttggcctggtcctcatcattgcgccctggaactatccgctgaacctgacgctggtgcccctcgtgggagccctcgctgcagggaactgtgtggtgctgaagccatcggagattagcaagaacgtcgagaagatcctggccgaggtgctgccccaatacgtggaccagagctgctttgctgtggtgctgggcgggccccaggagacggggcagctgctagagcacaggttcgactacatcttcttcacagggagccctcgtgtgggcaagattgttatgactgctgccgccaaggcacccctcaaagcagcgcctgcctcctccctcctgggtcttccctctccctgcctcagcctcctccctcagccgctcccaaccatgagagccgaggtgggaggcatgggaaacagtgcagtgactcaccccctgcccccgcaccaaccacccatattcaggagaagaggacagacacggcacctctgagtcacccctctcctgtggagcgggcgtccgaggggccctggcatctgactcaggccacaccatggaatcactgcatccaaggccattcctgccctctctgagtctcagtttttccatttgttcagtggagagaattaaccattgatacctcctggctgggtgaggcggctcacacctgtaatcccagcactttgggaggccgaggcaggcggatcacctgaaatcaggagttcaagatcagcctggctaacatggcgaaaccccgtctctactaaaaatacaaaaattagcctggcgtggtggcgcatgcctgtaatcccagctactcaggaggctaaggcaggagaatcgcttgaacccgggaggtggaggttgccgtgagctgagattgcgtcactgaactccggcctgggtgacagaaggaggctctgccttaaaaaaaaaaaaaaaaaaaacctcctgggactgttgcaaggatgaaatgaaggattgagggattgagggattgctgagctggagctccaggtgtcctatctttctcagtggggtggcacggagcggggccgcctccctcttctctccaggcaggtggggctgtggttatgcgatagggtctcccttccctccagcccatgccagaggagcttgtaactctttatcctcatggtgcccactacgagtcatactcttccccatgctgctcatcctcctgggccccatccactcagccaaagcagaatgcagggtttcctgcctgacaacccttctcacctcccaagtcccacttttgaacaagctgatgattctgaaactggcccaatttcctaacaagccggatgcttgagaaacctacatttggacaatgagaggctgctcctgcggcctgcgggccacctcctcttccttggctcctgctttctttttagactatatcaacctacaactttagtcgggaagagggacaggggtggacctgagtttcgtctcctgtctctctggctgatgtcacctgaataaagccttcttccctggcaatactta

SEQ ID NO: 21805 - protein, 183 aa, Homo sapiens
MKDERVPKNLATQLDSAFIRKEPFGLVLIIAPWNYPLNLTLVPLVGALAAGNCVVLKPSEISKNVEKILAEVLPQYVDQSCFAVVLGGPQETGQLLEHRFDYIFFTGSPRVGKIVMTAAAKAPLKAAPASSLLGLPSPCLSLLPQPLPTMRAEVGGMGNSAVTHPLPPHQPPIFRRRGQTRHL

SEQ ID NO: 21806 - DNA, 2821 bp, Homo sapiens
gacatttcttaacagcagggccaccaggcagagcgggacagccaggaggaagggcagcttggcagagcctcaggatggacccccttggggacacgctgcggcgactgcgggaggccttccacgcggggcgcacgcggccagctgagttccgggctgcgcagctccaaggcctgggccgcttcctgcaagaaaacaagcagcttctgcacgacgcactggcccaggacctgcacaagtcagccttcgagtcggaggtgtctgaggttgccatcagccagggcgaggtcaccctggccctcaggaactccgggcctggatgaaggacgagcgtgtgcccaagaacctggccacgcagctggactccgccttcatccggaaggagccctttggcctggtcctcatcattgcgccctggaactatccgctgaacctgacgctggtgcccctcgtgggagccctcgctgcagggaactgtgtggtgctgaagccatcggagattagcaagaacgtcgagaagatcctggccgaggtgctgccccaatacgtggaccagagctgctttgctgtggtgctgggcgggccccaggagacggggcagctgctagagcacaggttcgactacatcttcttcacagggagccctcgtgtgggcaagattgttatgactgctgccgccaagcacctgacacctgtcaccctggagctggggggcaagaacccttgctacgtggacgacaactgcgacccccagaccgtggccaaccgcgtggcctggttccgctacttcaacgccggccagacctgcgtggcccccgactacgtcctatgcagccctgagatgcaggagaggctgctgcctgccctgcagagcaccatcacccgtttctatggcgacgacccccagagctccccaaacctgggccgcatcatcaaccagaaacagttccagcggctgcgggcattgctgggctgcggcgtgtggccattgggggccagagcgatgagagcgatcgctacatcgcccccacggtgctggtggatgtgcaggagatggagcctgtgatgcaggaggagatcttcgggcccatcctgcccatcgtgaacgtgcagagcttggacgaggccatcgagttcatcaaccggcgggagaagcccctggccctgtacgccttctccaacagcagccaggtggtcaagcgggtgctgacccagaccagcagcgggggcttctgtgggaacgacggcttcatgcacatgaccctggccagcctgccttttggaggagtgggtgccagtgggatgggccggtaccatggcaagttctccttcgacaccttctcccaccatcgcgcctgcctcctgcgcagcccggggatggagaagctcaacgccctccgctacccgccgcaatcgccgcgccgcctgaggatgctgctggtggccatggaggccaaggctgcagctgcacactgctctgagcccttccccaggcccaggctgtagaccaccatgacagctgtcgcctgcggctggtggagacggggcctgggctcccgggcccgaggaggaaaaggattgccaaggctccagggcacccctcaaagcagcgcctgcctcctccctcctgggtcttccctctccctgcctcagcctcctccctcagccgctcccaaccatgagagccgaggtgggaggcatgggaaacagtgcagtgactcaccccctgcccccgcaccaaccacccatattcaggagaagaggacagacacggcacctctgagtcacccctctcctgtggagcgggcgtccgaggggccctggcatctgactcaggccacaccatggaatcactgcatccaaggccattcctgccctctctgagtctcagtttttccatttgttcagtggagagaattaaccattgatacctcctggctgggtgaggcggctcacacctgtaatcccagcactttgggaggccgaggcaggcggatcacctgaaatcaggagttcaagatcagcctggctaacatggcgaaaccccgtctctactaaaaatacaaaaattagcctggcgtggtggcgcatgcctgtaatcccagctactcaggaggctaaggcaggagaatcgcttgaacccgggaggtggaggttgccgtgagctgagattgcgtcactgaactccggcctgggtgacagaaggaggctctgccttaaaaaaaaaaaaaaaaaaaacctcctgggactgttgcaaggatgaaatgaaggattgagggattgagggattgctgagctggagctccaggtgtcctatctttctcagtggggtggcacggagcggggccgcctccctcttctctccaggcaggtggggctgtggttatgcgatagggtctcccttccctccagcccatgccagaggagcttgtaactctttatcctcatggtgcccactacgagtcatactcttccccatgctgctcatcctcctgggccccatccactcagccaaagcagaatgcagggtttcctgcctgacaacccttctcacctcccaagtcccacttttgaacaagctgatgattctgaaactggcccaatttcctaacaagccggatgcttgagaaacctacatttggacaatgagaggctgctcctgcggcctgcgggccacctcctcttccttggctcctgctttctttttagactatatcaacctacaactttagtcgggaagagggacaggggtggacctgagtttcgtctcctgtctctctggctgatgtcacctgaataaagccttcttccctggcaatactta

SEQ ID NO: 21807 - protein, 248 aa, Homo sapiens
MKDERVPKNLATQLDSAFIRKEPFGLVLIIAPWNYPLNLTLVPLVGALAAGNCVVLKPSEISKNVEKILAEVLPQYVDQSCFAVVLGGPQETGQLLEHRFDYIFFTGSPRVGKIVMTAAAKHLTPVTLELGGKNPCYVDDNCDPQTVANRVAWFRYFNAGQTCVAPDYVLCSPEMQERLLPALQSTITRFYGDDPQSSPNLGRIINQKQFQRLRALLGCGVWPLGARAMRAIATSPPRCWWMCRRWSL

SEQ ID NO: 21808 - DNA, 2648 bp, Homo sapiens
cttaacagcagggccaccaggcagagcgggacagccaggaggaagggcagcttggcagagcctcaggatggacccccttggggacacgctgcggcgactgcgggaggccttccacgcggggcgcacgcggccagctgagttccgggctgcgcagctccaaggcctgggccgcttcctgcaagaaaacaagcagcttctgcacgacgcactggcccaggacctgcacaaggtgggctggggttgggggtatgagagggtgcactggggcaggggggcatggagggcagctgggacagcaggggatgaagacacctgcgccctccatgaagcggggctaaaagcagctcctcccctaggccagagccacccttgcacattcatccagtcacttatttctgtattcatgcagcaactatttgctgagcacctactatgtgccaggtactgttctaggctctggggatatagcagagaataaaacacagttcccatgcctacgaagatgaccttctatcggagacaataaaacagcaaataaataattgcacagcaaggccgggcatggtggctcacacctgtagtcccagcactttgggaggccgaggtgggcggatcgcttgaggccaggagttcaagaccatcctggccaacatggcgaaaccccgtctctactaacaatacaaaaattagctggatgtggtggtgggcacctgtaatcccagctactcaggaggctgaggcatgagaatcgcttgaacctgggaggtggaggttgcagtgagccaaggtcacaccactgcactccagcttgggcaacacagtgagactccatctcaaaaataataataaagataataattacacagcatattgggttgaaatatgtgccctggagacacacccagggtgaaggggagagagggggccaggatcagggtgctgttgtatatgtgggggtcagggaaggtttctctgagaagggggctttagagcagagacgtgaagatggaggggaggctccccatggatgctggggagatggcagcgggcacagcacgtgcaaaggccctgaggcaggaggtgctgggtgtttctgcttgaggagcagcaaggaggccagcatagctgtcgggggtgggagaggaagaaacagcaaagatgaggtctggggtatgggccacactatgtagggcctcggaggccgtgaggccttggccttctctctgggtacagcaggcatcatggcctctgtctagaccctgaaggcttggggcctcagcccctcccaatcccagtggcagccaaggcagaaccccaagaaacacacttcccccaacccctcacccatcagggcccatgcacctgcctgcccctgcctcaggacacctgcccctgcctcaggacaccacctgcccctgcctcagcacatctgccccaggggctgcccccggctcctattctctggacaaaatatctcctccctttgccttgaaggctgtagtgttcagaccttcccccagcccattgggctccctggggactgactcccccgccaccactgagcttctgccaccggccgcctgccggccttcatgagacttgacctgacgtctgtctggtcccttttctcccttcggctctgattccacctcctgccttcccatcccagctgcaggagcggggccctacaaaggcagcagtagcccagaacattcaacctggtccctccctctggacctggtcacccccctgtccccaccctcagcaggcagcatctgcccagcgtcacgtgcaccctctcagttaaccctttggtgaatctggttgggcaaccacacccagtggcccccagaagaggctcagagagagtgtgttcttgcccaagggcatgcagccaggaagagcagagccagagtttgaacctggctcaaaatagcccagtctcccaaagtcaggtcccaggtgacctaggaggtgtggcgggcaggccaccaggctcatggggccagagcacaggctgtgggaaagtccgtgtggaaggcaccttcccccagcctcagtggctaggaggtgccagtgggcgtggcgtcttcctccctcttggggctcagctgtagccctggccttgcccctggttcgctgagtgacctcaggcagggcatctccttctctgggcttcgctggtcctctggcccatccagcaccccactggcccgtccccctctgccctgacccgggagagcctgcaccccataacctcaggcgctgcctcagccagggagccagcctggccccagtgtccctgacctgttctccagcggcctgcagcctgctgcctggctggtctctcctcccttggggcgcagagggcagggagcactggctagccgagagcaggacaatgtccctattgattcgggtctcctcactcctgcttagaagcctgacagtggccctggcccctgggctgtgggaactgacagcatttacctaggggtggctgtgcctgtgtctcctgtggaccaatctccaccctgctctttgggagactgaggtgggaggattgtttgaggccaggagttcaagacctacctaggcaacacagcaaggcactctgcaaaaaatcaaaacaaactttttttgaaatt

SEQ ID NO: 21809 - protein, 136 aa, Homo sapiens [sequence omitted]

SEQ ID NO: 21810 - DNA, 2400 bp, Homo sapiens
caggatggacccccttggggacacgctgcggcgactgcgggaggccttccacgcggggcgcacgcggccagctgagttccgggctgcgcagctccaaggcctgggccgcttcctgcaagaaaacaagcagcttctgcacgacgcactggcccaggacctgcacaagtcagccttcgagtcggaggtgtctgaggttgccatcagccagggcgaggtcaccctggccctcaggaactccgggcctggatgaaggacgagcgtgtgcccaagaacctggccacgcagctggactccgccttcatccggaaggagccctttggcctggtcctcatcattgcgccctggaactatccgctgaacctgacgctggtgcccctcgtgggagccctcgctgcagggaactgtgtggtgctgaagccatcggagattagcaagaacgtcgagaagatcctggccgaggtgctgccccaatacgtggaccagagctccccaaacctgggccgcatcatcaaccagaaacagttccagcggctgcgggcattgctgggctgcggcgtgtggccattgggggccagagcgatgagagcgatcgctacatcgcccccacggtgctggtggatgtgcaggagatggagcctgtgatgcaggaggagatcttcgggcccatcctgcccatcgtgaacgtgcagagcttggacgaggccatcgagttcatcaaccggcgggagaagcccctggccctgtacgccttctccaacagcagccaggtggtcaagcgggtgctgacccagaccagcagcgggggcttctgtgggaacgacggcttcatgcacatgaccctggccagcctgccttttggaggagtgggtgccagtgggatgggccggtaccatggcaagttctccttcgacaccttctcccaccatcgcgcctgcctcctgcgcagcccggggatggagaagctcaacgccctccgctacccgccgcaatcgccgcgccgcctgaggatgctgctggtggccatggaggccaaggctgcagctgcacactgctctgagcccttccccaggcccaggctgtagaccaccatgacagctgtcgcctgcggctggtggagacggggcctgggctcccgggcccgaggaggaaaaggattgccaaggctccagggcacccctcaaagcagcgcctgcctcctccctcctgggtcttccctctccctgcctcagcctcctccctcagccgctcccaaccatgagagccgaggtgggaggcatgggaaacagtgcagtgactcaccccctgcccccgcaccaaccacccatattcaggagaagaggacagacacggcacctctgagtcacccctctcctgtggagcgggcgtccgaggggccctggcatctgactcaggccacaccatggaatcactgcatccaaggccattcctgccctctctgagtctcagtttttccatttgttcagtggagagaattaaccattgatacctcctggctgggtgaggcggctcacacctgtaatcccagcactttgggaggccgaggcaggcggatcacctgaaatcaggagttcaagatcagcctggctaacatggcgaaaccccgtctctactaaaaatacaaaaattagcctggcgtggtggcgcatgcctgtaatcccagctactcaggaggctaaggcaggagaatcgcttgaacccgggaggtggaggttgccgtgagctgagattgcgtcactgaactccggcctgggtgacagaaggaggctctgccttaaaaaaaaaaaaaaaaaaaacctcctgggactgttgcaaggatgaaatgaaggattgagggattgagggattgctgagctggagctccaggtgtcctatctttctcagtggggtggcacggagcggggccgcctccctcttctctccaggcaggtggggctgtggttatgcgatagggtctcccttccctccagcccatgccagaggagcttgtaactctttatcctcatggtgcccactacgagtcatactcttccccatgctgctcatcctcctgggccccatccactcagccaaagcagaatgcagggtttcctgcctgacaacccttctcacctcccaagtcccacttttgaacaagctgatgattctgaaactggcccaatttcctaacaagccggatgcttgagaaacctacatttggacaatgagaggctgctcctgcggcctgcgggccacctcctcttccttggctcctgctttctttttagactatatcaacctacaactttagtcgggaagagggacaggggtggacctgagtttcgtctcctgtctctctggctgatgtcacctgaataaagccttcttccctggcaatactta

SEQ ID NO: 21811 - protein, 150 aa, Homo sapiens
MEPVMQEEIFGPILPIVNVQSLDEAIEFINRREKPLALYAFSNSSQVVKRVLTQTSSGGFCGNDGFMHMTLASLPFGGVGASGMGRYHGKFSFDTFSHHRACLLRSPGMEKLNALRYPPQSPRRLRMLLVAMEAKAAAAHCSEPFPRPRL

SEQ ID NO: 21812 - DNA, 1066 bp, Homo sapiens
cccagcaaaggcaaaggagccctggaaggaaccacagagcccaggaagcactgtgccaggatggggcaggggtgagagtagagaaggcacagtggctcctgccggctttaatcctgccctctctgagtctcagtttttccatttgttcagtggagagaattaaccattgatacctcctggctgggtgaggcggctcacacctgtaatcccagcactttgggaggccgaggcaggcggatcacctgaaatcaggagttcaagatcagcctggctaacatggcgaaaccccgtctctactaaaaatacaaaaattagcctggcgtggtggcgcatgcctgtaatcccagctactcaggaggctaaggcaggagaatcgcttgaacccgggaggtggaggttgccgtgagctgagattgcgtcactgaactccggcctgggtgacagaaggaggctctgccttaaaaaaaaaaaaaaaaaaaacctcctgggactgttgcaaggatgaaatgaaggattgagggattgagggattgctgagctggagctccaggtgtcctatctttctcagtggggtggcacggagcggggccgcctccctcttctctccaggcaggtggggctgtggttatgcgatagggtctcccttccctccagcccatgccagaggagcttgtaactctttatcctcatggtgcccactacgagtcatactcttccccatgctgctcatcctcctgggccccatccactcagccaaagcagaatgcagggtttcctgcctgacaacccttctcacctcccaagtcccacttttgaacaagctgatgattctgaaactggcccaatttcctaacaagccggatgcttgagaaacctacatttggacaatgagaggctgctcctgcggcctgcgggccacctcctcttccttggctcctgctttctttttagactatatcaacctacaactttagtcgggaagagggacaggggtggacctgagtttcgtctcctgtctctctggctgatgtcacctgaataaagccttcttccctggcaatactta

SEQ ID NO: 21813 - protein, 54 aa, Homo sapiens
MVPTTSHTLPHAAHPPGPHPLSQSRMQGFLPDNPSHLPSPTFEQADDSETGPIS

SEQ ID NO: 21814 - DNA, 787 bp, Homo sapiens
agggggaacccgctggcccaatggcagcgtcctacagtgtagcctccgcctcccgattgactggcctgcttggcaaggcaagtagcggcggcgcttcaagatgcgctgcctgaccacgcctatgctgctgcgggccctggcccaggctgcacgtgcaggacctcctggtggccggagcctccacagcagtgcagtggcagccacctacaagtatgtgaacatgcaggatcccgagatggacatgaagtcagtgactgaccgggcagcccgcaccctgctgtggactgagctcttccgaggcctgggcatgaccctgagctacctgttccgggaaccggccaccatcaactacccgttcgagaagggcccgctgagccctcgcttccgtggggagcatgcgctgcgccggtacccatccggggaggagcgttgcattgcctgcaagctctgcgaggccatctgccccgcccaggccatcaccatcgaggctgagccaagagctgatggcagccgccggaccacccgctatgacatcgacatgaccaagtgcatctactgcggcttctgccaggaggcctgtcccgtggatgccatcgtcgagggccccaactttgagttctccacggagacccatgaggagctgctgtacaacaaggagaagttgctcaacaacggggacaagtgggaggccgagatcgccgccaacatccaggctgactacttgtatcggtgacgccccaccggcccgcagcccctgctgcccaataaaaccactccgaccccacgg

SEQ ID NO: 21815 - protein, 210 aa, Homo sapiens; identical to SEQ ID NO: 2829

SEQ ID NO: 21816 - DNA, 543 bp, Homo sapiens
cgctggcccaatggcagcgtcctacagtgtagcctccgcctcccgattgactggcctgcttggcaaggcaagtagcggcggcgcttcaagatgcgctgcctgaccacgcctatgctgctgcgggccctggcccaggctgcacgtgcaggacctcctggtggccggagcctccacagcagtgcagtggcagccacctacaagtatgtgaacatgcaggatcccgagatggacatgaagtcagtgactgaccgggcagcccgcaccctgctgtggactgagctcttccgaggcctgggcatgaccctgagctacctgttccgggaaccggccaccatcaactacccgttcgagaagggcccgctgagccctcgcttccgtggggagcatgcgctgcgccggtacccatccggggaggagcgttgcattgcctgcaagctctgcgaggccatctgccccgcccaggtgagcccctgccccaaccggccaccacgccagcccctgccactgggagagggaggccaggcagccctaggcccaaaccct

SEQ ID NO: 21817 - protein, 150 aa, Homo sapiens
MRCLTTPMLLRALAQAARAGPPGGRSLHSSAVAATYKYVNMQDPEMDMKSVTDRAARTLLWTELFRGLGMTLSYLFREPATINYPFEKGPLSPRFRGEHALRRYPSGEERCIACKLCEAICPAQVSPCPNRPPRQPLPLGEGGQAALGPN

SEQ ID NO: 21818 - DNA, 3880 bp, Homo sapiens
cgctggcccaatggcagcgtcctacagtgtagcctccgcctcccgattgactggcctgcttggcaaggcaagtagcggcggcgcttcaagatgcgctgcctgaccacgcctatgctgctgcgggccctggcccaggctgcacgtgcaggacctcctggtggccggagcctccacagcagtgcagtggcagccacctacagtgagtacctgggtggcctctagcctcaggtgttcctgactggtcctgctggagtaggggaagagacctgagttccagtcctggctttgtcaggggcgttcttctctgagcctgtttccacttttaaaatgattatggtgatggagactgactctgattcacaggggcagggtccatcattgccgaggttagcatgtgtgatctcagagctccctgggtgtgatggggagggggttgccaggtgtgagccatgggtacctgtgcctattgccagtccctggtgaaggcaaaggctcaagccccccacctaccccccttgattcctctttcaagccctgttgggcagggaagtgcgtctgggctccaatggccacccaagcacagggagaggtaggcacggacgggctcaggccagaggcggcctccagggtccttgctgaggctggggagaggtgtggtgagtgtacagcccctttgtagcccagcagttgcacctggaagtgagggccaggctgctctccctgaggctccagggagacagtgtgtgaggcctcttgccatggcctccctgcccgcctctctgcagagtatgtgaacatgcaggatcccgagatggacatgaagtcagtgactgaccgggcagcccgcaccctgctgtggactgagctcttccgaggtgcgtcctgggcatgaggggacagggaaggtgccgggtgggcacggatgcatgggggaggagggtgcccctgcccaccacacccgtgctgcccacaggcctgggcatgaccctgagctacctgttccgggaaccggccaccatcaactacccgttcgagaagggcccgctgagccctcgcttccgtggggagcatgcgctgcgccggtacccatccggggaggagcgttgcattgcctgcaagctctgcgaggccatctgccccgcccaggtgagcccctgccccaaccggccaccacgccagcccctgccactgggagagggaggccaggcagccctaggcccaaaccctagcccctgcttgatgtgcgtccccaggaagtccctttccccctctgagccacttccctcgtgaatgggaatgatgagggcttgttaccagagcacagagtcagtgagttggcagagtgaagcttccagccctgggcaggcgcctgacacacagaggttcccccttggggtctggccaagggtgtgacccctgggcctctgagccatggggtgacacctgaggccatccacgcctccctggatgtagccaccgtttccggagtcctgcttgtgtgcctgttgcagcttcccttccccagtggctgctcccctgaggcccggctttccgttctcttagtgggtctcgtgcttacccgtgggggccaggcctgccagcacgggaacaatatgactcggtcagagctctggtcagacccctgtgtgtgcctggcaggagccccggcagccgccgccgctactttctgtgtgcacagcaacccctcccagtgttctgtgactcgggtggctcctgtccagatcctagtttgtcctctggagcactcccaggtcctccaggccatgagctgcggccctgatgtctctactccagccacggactgagagtgcataggagtgtccccaaacagcagtcacgatggtcacaaccttggcttccagacagtgagtgctgtccacagacagacccggtgctgtgccatgtgtgtgactcacagcctctcctgtaatctccacaacccctcgaggaggtcgaggttattgtctccatctttataagcactaaaggatgagcctgccagccacaggtcccactgtgagttgtggacactacatttctgggatgggggcatatgagagtccttgccaagcacatttgaaggttttcccagccagcccctcccccagcgggctacccaggaactgagagttaggacgtgcccttgagtttgggctgtgcccccacttgctgtgtagctttggggagcccctcaacctctcggaaccttgtttttctcatccatcaaatggagagaagtagatttaaggcacaggattgcacccaacagtgtaggcattcttggcgatgttgcaggttcggctccagaccatcggggtaaactgagtcacacagctgttttggttttccagtgcatttaaaagttagatttagaccgggcacagtggctcatgcctgtaattccagcactttgagaagccgaggtgggcggatcacttgaggtcaagagttcgagaccagcctggccaacatagtgaaaccccgtctctactaaaaataacaaaacttagccgggcacgttggcaggtccctgtaatctcagctacttgctaggctgaggcacgataatcacttgaaccgggaggtgggggttgcagtgagccaaaattgaaaaaaaaaaaaaaaattagggccggttgcggtggctcacgcctgtaatcccagcactttgggaggccaaggtgggcggatcacaaggtcaggaattcaagaccagcctggccaacatgttgaaaccccgtctctagtaaaaatacaaaaattagccgggtgtggggttgcacacctgtagtcccagctactcaagaggctgaggcaggagaattgcttgaacctgggaggcggaggttgcagtgaactatgattgcaccaccatactccatcctgggccacagagcaagacttcgtctcaaaaaaaaaaaaaggatttacactgtactgtaggctgcgaagtgtctaaaacacaatgtatataccttaattaaaaatactttaggggccaggcacagtggctcacacctgtagtccaagtgctttgggaggtcaaggtgaggggattacttgagcccaggagtttgagaccagcctgggcaacatggcaaaaccccgactctacaacaacaacaaaaaatacaaaaaattagcccctgtaggcccagttacttgggaggttgaggtgggaggatcgcttgagcctgggaggttgaggctgcagtgagctatgagctgcaccactgtactccagcctgggtgacagggcaagactctgtctcaaaaaacaaaaacaacaacaaaaactttattcctaaaaagtgctgacccagagataagaagcaagcacatggttggtaaaatgacatcagtgagcttgctttatgcagggttgccccaaaccttcaatttgtaaaactcaaaatatctggaaagcttggtgaggcgaggcgggactgtaactcagcactcaccgcagggtgagacccttagggcagcgggtgctacactgaacaaagcggtgaacagccccctcgtgagagggggttcttggcagatgacgccagcagctgacaaacaggcaaggcaggccgggcacggtggctcacgcttgtaatcccagcactttgggagtccaaggtaagcggatcacaaggtcaagagatcgagaccatcctggtctacatggtgaaaccccatctctactaaaaaatacaaaaattagctgggcgtggtgatgcacacttgtagtcccagctactcagggggctgaggcaggagaatcacttgaaccgggaaggccgaggttgcagtgagccgagattgtgctgctgcactccagcctggcgacagagcgagactctatctc

SEQ ID NO: 21819 - protein, 43 aa, Homo sapiens
MRCLTTPMLLRALAQAARAGPPGGRSLHSSAVAATYSEYLGGL

SEQ ID NO: 21820 - DNA, 856 bp, Homo sapiens
cgctggcccaatggcagcgtcctacagtgtagcctccgcctcccgattgactggcctgcttggcaaggcaagtagcggcggcgcttcaagatgcgctgcctgaccacgcctatgctgctgcgggccctggcccaggctgcacgtgcaggacctcctggtggccggagcctccacagcagtgcagtggcagccacctacaagtatgtgaacatgcaggatcccgagatggacatgaagtcagtgactgaccgggcagcccgcaccctgctgtggactgagctcttccgaggcctgggcatgaccctgagctacctgttccgggaaccggccaccatcaactacccgttcgagaagggcccgctgagccctcgcttccgtggggagcatgcgctgcgccggtacccatccggggaggagcgttgcattgcctgcaagctctgcgaggccatctgccccgcccaggccatcaccatcgaggctgagccaagagctgatggcagccgccggaccacccgctatgacatcgacatgaccaagtgcatctactgcggcttctgccaggaggcctgtcccgtggatgccatcgtcgaggcacgtgaggcccccgggtgggagggggcctgaggctcctcagcagggcctaaccaccgtccctgcacctcaacctgcagggccccaactttgagttctccacggagacccatgaggagctgctgtacaacaaggagaagttgctcaacaacggggacaagtgggaggccgagatcgccgccaacatccaggctgactacttgtatcggtgacgccccaccggcccgcagcccctgctgcccaataaaaccactccgaccccacg

SEQ ID NO: 21821 - protein, 177 aa, Homo sapiens
MRCLTTPMLLRALAQAARAGPPGGRSLHSSAVAATYKYVNMQDPEMDMKSVTDRAARTLLWTELFRGLGMTLSYLFREPATINYPFEKGPLSPRFRGEHALRRYPSGEERCIACKLCEAICPAQAITIEAEPRADGSRRTTRYDIDMTKCIYCGFCQEACPVDAIVEAREAPGWEGA

SEQ ID NO: 21822 - DNA, 434 bp, Homo sapiens
aatggcagcgtcctacagtgtagcctccgcctcccgattgactggcctgcttggcaaggcaagtagcggcggcgcttcaagatgcgctgcctgaccacgcctatgctgctgcgggccctggcccaggctgcacgtgcaggtaggaccaaagaagcctttgctgggggtaggggagtccagtctcctggtatgacgtcacgcccttctttttgcaggacctcctggtggccggagcctccacagcagtgcagtggcagccacctacagtgagtacctgggtggcctctagcctcaggtgttcctgactggtcctgctggagtaggggaagagacctgagttccagtcctggctttgtcaggggcgttcttctctgagcctgtttccacttttaaaatgattatggtgatggagactgactctgattcacaggggc

SEQ ID NO: 21823 - protein, 62 aa, Homo sapiens
MRCLTTPMLLRALAQAARAGRTKEAFAGGRGVQSPGMTSRPSFCRTSWWPEPPQQCSGSHLQ

SEQ ID NO: 21824 - DNA, 607 bp, Homo sapiens
ggcaaggcaagtagcggcggcgcttcaagagtatgtgaacatgcaggatcccgagatggacatgaagtcagtgactgaccgggcagcccgcaccctgctgtggactgagctcttccgaggcctgggcatgaccctgagctacctgttccgggaaccggccaccatcaactacccgttcgagaagggcccgctgagccctcgcttccgtggggagcatgcgctgcgccggtacccatccggggaggagcgttgcattgcctgcaagctctgcgaggccatctgccccgcccaggccatcaccatcgaggctgagccaagagctgatggcagccgccggaccacccgctatgacatcgacatgaccaagtgcatctactgcggcttctgccaggaggcctgtcccgtggatgccatcgtcgagggccccaactttgagttctccacggagacccatgaggagctgctgtacaacaaggagaagttgctcaacaacggggacaagtgggaggccgagatcgccgccaacatccaggctgactacttgtatcggtgacgccccaccggcccgcagcccctgctgcccaataaaaccactccgaccccacgg

SEQ ID NO: 21825 - protein, 170 aa, Homo sapiens
MQDPEMDMKSVTDRAARTLLWTELFRGLGMTLSYLFREPATINYPFEKGPLSPRFRGEHALRRYPSGEERCIACKLCEAICPAQAITIEAEPRADGSRRTTRYDIDMTKCIYCGFCQEACPVDAIVEGPNFEFSTETHEELLYNKEKLLNNGDKWEAEIAANIQADYLYR

SEQ ID NO: 21826 - DNA, 926 bp, Homo sapiens
ggcgcttcaaggtgggtgttcacgttttggccgtgaaagtcgggcttgggcagcgtggcgtcgggggcgagtgtggtgtccccgttggcgccgccagctctgcgcctgggcttcccctcggctcactcaggatccgcggcctccgtgtccttcaggtgcagcggggagccggctctcagggcgcatgcgccgcccgctctgcgccaccggcctagttagggtcggagatcactgggaagatgcgctgcctgaccacgcctatgctgctgcgggccctggcccaggctgcacgtgcaggacctcctggtggccggagcctccacagcagtgcagtggcagccacctacaagtatgtgaacatgcaggatcccgagatggacatgaagtcagtgactgaccgggcagcccgcaccctgctgtggactgagctcttccgaggcctgggcatgaccctgagctacctgttccgggaaccggccaccatcaactacccgttcgagaagggcccgctgagccctcgcttccgtggggagcatgcgctgcgccggtacccatccggggaggagcgttgcattgcctgcaagctctgcgaggccatctgccccgcccaggccatcaccatcgaggctgagccaagagctgatggcagccgccggaccacccgctatgacatcgacatgaccaagtgcatctactgcggcttctgccaggaggcctgtcccgtggatgccatcgtcgagggccccaactttgagttctccacggagacccatgaggagctgctgtacaacaaggagaagttgctcaacaacggggacaagtgggaggccgagatcgccgccaacatccaggctgactacttgtatcggtgacgccccaccggcccgcagcccctgctgcccaataaaaccactccgaccccacgg

SEQ ID NO: 21827 - protein, 210 aa, Homo sapiens; identical to SEQ ID NO: 2829

SEQ ID NO: 21828 - DNA, 834 bp, Homo sapiens
aaggtgggtgttcacgttttggccgtgaaagtcgggcttgggcagcgtggcgtcgggggcgagtgtggtgtccccgttggcgccgccagctctgcgcctgggcttcccctcggctcactcaggatccgcggcctccgtgtccttcagatgcgctgcctgaccacgcctatgctgctgcgggccctggcccaggctgcacgtgcaggacctcctggtggccggagcctccacagcagtgcagtggcagccacctacaagtatgtgaacatgcaggatcccgagatggacatgaagtcagtgactgaccgggcagcccgcaccctgctgtggactgagctcttccgaggcctgggcatgaccctgagctacctgttccgggaaccggccaccatcaactacccgttcgagaagggcccgctgagccctcgcttccgtggggagcatgcgctgcgccggtacccatccggggaggagcgttgcattgcctgcaagctctgcgaggccatctgccccgcccaggccatcaccatcgaggctgagccaagagctgatggcagccgccggaccacccgctatgacatcgacatgaccaagtgcatctactgcggcttctgccaggaggcctgtcccgtggatgccatcgtcgagggccccaactttgagttctccacggagacccatgaggagctgctgtacaacaaggagaagttgctcaacaacggggacaagtgggaggccgagatcgccgccaacatccaggctgactacttgtatcggtgacgccccaccggcccgcagcccctgctgcccaataaaaccactccgaccccacgg

SEQ ID NO: 21829 - protein, 210 aa, Homo sapiens; identical to SEQ ID NO: 2829

SEQ ID NO: 21830 - DNA, 3934 bp, Homo sapiens
gtgggtgttcacgttttggccgtgaaagtcgggcttgggcagcgtggcgtcgggggcgagtgtggtgtccccgttggcgccgccagctctgcgcctgggcttcccctcggctcactcaggatccgcggcctccgtgtccttcagatgcgctgcctgaccacgcctatgctgctgcgggccctggcccaggctgcacgtgcaggacctcctggtggccggagcctccacagcagtgcagtggcagccacctacagtgagtacctgggtggcctctagcctcaggtgttcctgactggtcctgctggagtaggggaagagacctgagttccagtcctggctttgtcaggggcgttcttctctgagcctgtttccacttttaaaatgattatggtgatggagactgactctgattcacaggggcagggtccatcattgccgaggttagcatgtgtgatctcagagctccctgggtgtgatggggagggggttgccaggtgtgagccatgggtacctgtgcctattgccagtccctggtgaaggcaaaggctcaagccccccacctaccccccttgattcctctttcaagccctgttgggcagggaagtgcgtctgggctccaatggccacccaagcacagggagaggtaggcacggacgggctcaggccagaggcggcctccagggtccttgctgaggctggggagaggtgtggtgagtgtacagcccctttgtagcccagcagttgcacctggaagtgagggccaggctgctctccctgaggctccagggagacagtgtgtgaggcctcttgccatggcctccctgcccgcctctctgcagagtatgtgaacatgcaggatcccgagatggacatgaagtcagtgactgaccgggcagcccgcaccctgctgtggactgagctcttccgaggtgcgtcctgggcatgaggggacagggaaggtgccgggtgggcacggatgcatgggggaggagggtgcccctgcccaccacacccgtgctgcccacaggcctgggcatgaccctgagctacctgttccgggaaccggccaccatcaactacccgttcgagaagggcccgctgagccctcgcttccgtggggagcatgcgctgcgccggtacccatccggggaggagcgttgcattgcctgcaagctctgcgaggccatctgccccgcccaggtgagcccctgccccaaccggccaccacgccagcccctgccactgggagagggaggccaggcagccctaggcccaaaccctagcccctgcttgatgtgcgtccccaggaagtccctttccccctctgagccacttccctcgtgaatgggaatgatgagggcttgttaccagagcacagagtcagtgagttggcagagtgaagcttccagccctgggcaggcgcctgacacacagaggttcccccttggggtctggccaagggtgtgacccctgggcctctgagccatggggtgacacctgaggccatccacgcctccctggatgtagccaccgtttccggagtcctgcttgtgtgcctgttgcagcttcccttccccagtggctgctcccctgaggcccggctttccgttctcttagtgggtctcgtgcttacccgtgggggccaggcctgccagcacgggaacaatatgactcggtcagagctctggtcagacccctgtgtgtgcctggcaggagccccggcagccgccgccgctactttctgtgtgcacagcaacccctcccagtgttctgtgactcgggtggctcctgtccagatcctagtttgtcctctggagcactcccaggtcctccaggccatgagctgcggccctgatgtctctactccagccacggactgagagtgcataggagtgtccccaaacagcagtcacgatggtcacaaccttggcttccagacagtgagtgctgtccacagacagacccggtgctgtgccatgtgtgtgactcacagcctctcctgtaatctccacaacccctcgaggaggtcgaggttattgtctccatctttataagcactaaaggatgagcctgccagccacaggtcccactgtgagttgtggacactacatttctgggatgggggcatatgagagtccttgccaagcacatttgaaggttttcccagccagcccctcccccagcgggctacccaggaactgagagttaggacgtgcccttgagtttgggctgtgcccccacttgctgtgtagctttggggagcccctcaacctctcggaaccttgtttttctcatccatcaaatggagagaagtagatttaaggcacaggattgcacccaacagtgtaggcattcttggcgatgttgcaggttcggctccagaccatcggggtaaactgagtcacacagctgttttggttttccagtgcatttaaaagttagatttagaccgggcacagtggctcatgcctgtaattccagcactttgagaagccgaggtgggcggatcacttgaggtcaagagttcgagaccagcctggccaacatagtgaaaccccgtctctactaaaaataacaaaacttagccgggcacgttggcaggtccctgtaatctcagctacttgctaggctgaggcacgataatcacttgaaccgggaggtgggggttgcagtgagccaaaattgaaaaaaaaaaaaaaaattagggccggttgcggtggctcacgcctgtaatcccagcactttgggaggccaaggtgggcggatcacaaggtcaggaattcaagaccagcctggccaacatgttgaaaccccgtctctagtaaaaatacaaaaattagccgggtgtggggttgcacacctgtagtcccagctactcaagaggctgaggcaggagaattgcttgaacctgggaggcggaggttgcagtgaactatgattgcaccaccatactccatcctgggccacagagcaagacttcgtctcaaaaaaaaaaaaaggatttacactgtactgtaggctgcgaagtgtctaaaacacaatgtatataccttaattaaaaatactttaggggccaggcacagtggctcacacctgtagtccaagtgctttgggaggtcaaggtgaggggattacttgagcccaggagtttgagaccagcctgggcaacatggcaaaaccccgactctacaacaacaacaaaaaatacaaaaaattagcccctgtaggcccagttacttgggaggttgaggtgggaggatcgcttgagcctgggaggttgaggctgcagtgagctatgagctgcaccactgtactccagcctgggtgacagggcaagactctgtctcaaaaaacaaaaacaacaacaaaaactttattcctaaaaagtgctgacccagagataagaagcaagcacatggttggtaaaatgacatcagtgagcttgctttatgcagggttgccccaaaccttcaatttgtaaaactcaaaatatctggaaagcttggtgaggcgaggcgggactgtaactcagcactcaccgcagggtgagacccttagggcagcgggtgctacactgaacaaagcggtgaacagccccctcgtgagagggggttcttggcagatgacgccagcagctgacaaacaggcaaggcaggccgggcacggtggctcacgcttgtaatcccagcactttgggagtccaaggtaagcggatcacaaggtcaagagatcgagaccatcctggtctacatggtgaaaccccatctctactaaaaaatacaaaaattagctgggcgtggtgatgcacacttgtagtcccagctactcagggggctgaggcaggagaatcacttgaaccgggaaggccgaggttgcagtgagccgagattgtgctgctgcactccagcctggcgacagagcgagactctatctc

SEQ ID NO: 21831 - protein, 43 aa, Homo sapiens; identical to SEQ ID NO: 21819

SEQ ID NO: 21832 - DNA, 763 bp, Homo sapiens
cgggctcaggccagaggcggcctccagggtccttgctgaggctggggagaggtgtggtgagtgtacagcccctttgtagcccagcagttgcacctggaagtgagggccaggctgctctccctgaggctccagggagacagtgtgtgaggcctcttgccatggcctccctgcccgcctctctgcagagtatgtgaacatgcaggatcccgagatggacatgaagtcagtgactgaccgggcagcccgcaccctgctgtggactgagctcttccgaggcctgggcatgaccctgagctacctgttccgggaaccggccaccatcaactacccgttcgagaagggcccgctgagccctcgcttccgtggggagcatgcgctgcgccggtacccatccggggaggagcgttgcattgcctgcaagctctgcgaggccatctgccccgcccaggccatcaccatcgaggctgagccaagagctgatggcagccgccggaccacccgctatgacatcgacatgaccaagtgcatctactgcggcttctgccaggaggcctgtcccgtggatgccatcgtcgagggccccaactttgagttctccacggagacccatgaggagctgctgtacaacaaggagaagttgctcaacaacggggacaagtgggaggccgagatcgccgccaacatccaggctgactacttgtatcggtgacgccccaccggcccgcagcccctgctgcccaataaaaccactccgaccccacgg

SEQ ID NO: 21833 - protein, 170 aa, Homo sapiens; identical to SEQ ID NO: 21825

SEQ ID NO: 21834 - DNA, 554 bp, Homo sapiens
ggtgagtgtacagcccctttgtagcccagcagttgcacctggaagtgagggccaggctgctctccctgaggctccagggagacagtgtgtgaggcctcttgccatggcctccctgcccgcctctctgcagagtatgtgaacatgcaggatcccgagatggacatgaagtcagtgactgaccgggcagcccgcaccctgctgtggactgagctcttccgaggcctgggcatgaccctgagctacctgttccgggaaccggccaccatcaactacccgttcgagaagggcccgctgagccctcgcttccgtggggagcatgcgctgcgccggtacccatccggggaggagcgttgcattgcctgcaagctctgcgaggccatctgccccgcccaggtgagcccctgccccaaccggccaccacgccagcccctgccactgggagagggaggccaggcagccctaggcccaaaccctagcccctgcttgatgtgcgtccccaggaagtccctttccccctctgagccacttccctcgtgaatgggaatgatgagggc

SEQ ID NO: 21835 - protein, 131 aa, Homo sapiens
MQDPEMDMKSVTDRAARTLLWTELFRGLGMTLSYLFREPATINYPFEKGPLSPRFRGEHALRRYPSGEERCIACKLCEAICPAQVSPCPNRPPRQPLPLGEGGQAALGPNPSPCLMCVPRKSLSPSEPLPS

SEQ ID NO: 21836 - DNA, 538 bp, Homo sapiens
aaaaaaaaaaaaaaccagcaaggcagggacgccagcagggcacgtgctgaggagacaggcgcgagcaccagaggtgcagggcggcctcttagccggagtccaggaggcctttgaggggagagggcttctggcagaccccaggggtggggatgagcagtgacaggggccctgggggctgggatgtgacagggcagcgtggcagtgtctggtggcccctcccgcaggccatcaccatcgaggctgagccaagagctgatggcagccgccggaccacccgctatgacatcgacatgaccaagtgcatctactgcggcttctgccaggaggcctgtcccgtggatgccatcgtcgagggccccaactttgagttctccacggagacccatgaggagctgctgtacaacaaggagaagttgctcaacaacggggacaagtgggaggccgagatcgccgccaacatccaggctgactacttgtatcggtgacgccccaccggcccgcagcccctgctgcccaataaaaccactccgaccccacg

SEQ ID NO: 21837 - protein, 111 aa, Homo sapiens [sequence omitted]

SEQ ID NO: 21838 - DNA, 2701 bp, Homo sapiens
cgcctgcccggaaaggagtgagcggcgcctagtcccgggctggcgggagtgcagttctgagtcccgcccggcgtgcgcggagcggggcagccagcagcggaggcgcggcgcgcagcacacccggggaccatgggctccatgttccggagcgaggaggtggccctggtccagctctttctgcccacagcggctgcctacacctgcgtgagtcggctgggcgagctgggcctcgtggagttcagagacctcaacgcctcggtgagcgccttccagagacgctttgtggttgatgttcggcgctgtgaggagctggagaagaccttcaccttcctgcaggaggaggtgcggcgggctgggctggtcctgcccccgccaaaggggaggctgccggcacccccaccccgggacctgctgcgcatccaggaggagacggagcgcctggcccaggagctgcgggatgtgcggggcaaccagcaggccctgcgggcccagctgcaccagctgcagctccacgccgccgtgctacgccagggccatgaacctcagctggcagccgcccacacagatggggcctcagagaggacgcccctgctccaggcccccggggggccgcaccaggacctgagggtcaactttgtggcaggtgccgtggagccccacaaggcccctgccctagagcgcctgctctggagggcctgccgcggcttcctcattgccagcttcagggagctggagcagccgctggagcaccccgtgacgggcgagccagccacgtggatgaccttcctcatctcctactggggtgagcagatcggacagaagatccgcaagatcacggactgcttccactgccacgtcttcccgtttctgcagcaggaggaggcccgcctcggggccctgcagcagctgcaacagcagagccaggagctgcaggaggtcctcggggagacagagcggttcctgagccaggtgctaggccgggtgctgcagctgctgccgccagggcaggtgcaggtccacaagatgaaggccgtgtacctggccctgaaccagtgcagcgtgagcaccacgcacaagtgcctcattgccgaggcctggtgctctgtgcgagacctgcccgccctgcaggaggccctgcgggacagctcgatggaggagggagtgagtgccgtggctcaccgcatcccctgccgggacatgccccccacactcatccgcaccaaccgcttcacggccagcttccagggcatcgtggatgcctacggcgtgggccgctaccaggaggtcaaccccgctccctacaccatcatcaccttccccttcctgtttgctgtgatgttcggggatgtgggccacgggctgctcatgttcctgttcgccctggccatggtccttgcggagaaccgaccggctgtgaaggccgcgcagaacgagatctggcagactttcttcaggggccgctacctgctcctgcttatgggcctgttctccatctacaccggcttcatctacaacgagtgcttcagtcgcgccaccagcatcttcccctcgggctggagtgtggccgccatggccaaccagtctggctggagtgatgcattcctggcccagcacacgatgcttaccctggatcccaacgtcaccggtgtcttcctgggaccctacccctttggcatcgatcctatttggagcctggctgccaaccacttgagcttcctcaactccttcaagatgaagatgtccgtcatcctgggcgtcgtgcacatggcctttggggtggtcctcggagtcttcaaccacgtgcactttggccagaggcaccggctgctgctggagacgctgccggagctcaccttcctgctgggactcttcggttacctcgtgttcctagtcatctacaagtggctgtgtgtctgggctgccagggccgcctcggcccccagcatcctcatccacttcatcaacatgttcctcttctcccacagccccagcaacaggctgctctacccccggcaggaggtggtccaggccacgctggtggtcctggccttggccatggtgcccatcctgctgcttggcacacccctgcacctgctgcaccgccaccgccgccgcctgcggaggaggcccgctgaccgacaggaggaaaacaaggccgggttgctggacctgcctgacgcatctgtgaatggctggagctccgatgaggaaaaggcagggggcctggatgatgaagaggaggccgagctcgtcccctccgaggtgctcatgcaccaggccatccacaccatcgagttctgcctgggctgcgtctccaacaccgcctcctacctgcgcctgtgggccctgagcctggcccacgcccagctgtccgaggttctgtgggccatggtgatgcgcataggcctgggcctgggccgggaggtgggcgtggcggctgtggtgctggtccccatctttgccgcctttgccgtgatgaccgtggctatcctgctggtgatggagggactctcagccttcctgcacgccctgcggctgcactgggtggaattccagaacaagttctactcaggcacgggctacaagctgagtcccttcaccttcgctgccacagatgactagggcccactgcaggtcctgccagacctccttcctgacctctgaggcaggagaggaataaagacggtccgccctggcagtg

SEQ ID NO: 21839 - protein, 830 aa, Homo sapiens; identical to SEQ ID NO: 2831

SEQ ID NO: 21840 - DNA, 1212 bp, Homo sapiens
tcccgggctggcgggagtgcagttctgagtcccgcccggcgtgcgcggagcggggcagccagcagcggaggcgcggcgcgcagcacacccggggttgttcccccaccccctgggaagtgctggaaggagcccggccctcgagccctcggcatagtggctgtgggagccctgatggccctgagccaggggtgacccctccccagatccccagagctgattccccacacctccttatttggccagcacagccccaaagggagccaggaccatgggctccatgttccggagcgaggaggtggccctggtccagctctttctgcccacagcggctgcctacacctgcgtgagtcggctgggcgagctgggcctcgtggagttcagagacctcaacgcctcggtgagcgccttccagagacgctttgtggttgatgttcggcgctgtgaggagctggagaagaccttcaccttcctgcaggaggaggtgcggcgggctgggctggtcctgcccccgccaaaggggaggctgccggcacccccaccccgggacctgctgcgcatccaggaggagacggagcgcctggcccaggagctgcgggatgtgcggggcaaccagcaggccctgcgggcccagctgcaccagctgcagctccacgccgccgtgctacgccagggccatgaacctcagctggcagccgcccacacagatggggcctcagagaggacgcccctgctccaggcccccggggggccgcaccaggacctgagggtcaagtgagtgagggatgacctcatgccctttctggccagcccagaacccctggccagtcgctgggctgggccaggctgagctccgactccttgtccagtgctctccccaggctggccccgcctcctccttcaggcccggaacttcccacagtcccaagccctagccctagggggttctcctcttctggtcctgcccgggaggcctcctgccttcccctgtgggcagggccagtgtgcccaattgcccgattgcccgtgctgggcagggtcctgcccggggggcctggtgggggaggcagggcaggaggttggagcagccctgcccagccccgtggccgccagctttgtggcaggtgccgtggagccccacaaggcccctgccctagagcgcctgctctggagggcctgccgcggcttcctcattgccagcttcagggagctgga

SEQ ID NO: 21841 - protein, 168 aa, Homo sapiens [sequence omitted]

SEQ ID NO: 21842 - DNA, 1029 bp, Homo sapiens
gggagtgcagttctgagtcccgcccggcgtgcgcggagcggggcagccagcagcggaggcgcggcgcgcagcacacccggggaccatgggctccatgttccggagcgaggaggtggccctggtccagctctttctgcccacagcggctgcctacacctgcgtgagtcggctgggcgagctgggcctcgtggagttcagagacctcaacgcctcggtgagcgccttccagagacgctttgtggttgatgttcggcgctgtgaggagctggagaagaccttcaccttcctgcaggaggaggtgcggcgggctgggctggtcctgcccccgccaaaggggaggctgccggcacccccaccccgggacctgctgcgcatccaggaggagacggagcgcctggcccaggagctgcgggatgtgcggggcaaccagcaggccctgcgggcccagctgcaccagctgcagctccacgccgccgtgctacgccagggccatgaacctcagctggcagccgcccacacagatggggcctcagagaggacgcccctgctccaggcccccggggggccgcaccaggacctgagggtcaagtgagtgagggatgacctcatgccctttctggccagcccagaacccctggccagtcgctgggctgggccaggctgagctccgactccttgtccagtgctctccccaggctggccccgcctcctccttcaggcccggaacttcccacagtcccaagccctagccctagggggttctcctcttctggtcctgcccgggaggcctcctgccttcccctgtgggcagggccagtgtgcccaattgcccgattgcccgtgctgggcagggtcctgcccggggggcctggtgggggaggcagggcaggaggttggagcagccctgcccagccccgtggccgccagctttgtggcaggtgccgtggagccccacaaggcccctgccctagagcgcctgctctggagggcctgccgcggcttcctcattgccagcttcagggagctgga

SEQ ID NO: 21843 - protein, 168 aa, Homo sapiens [sequence omitted]

SEQ ID NO: 21844 - DNA, 2496 bp, Homo sapiens
agctggcagccgcccacacagatggggcctcagagaggacgcccctgctccaggcccccggggggccgcaccaggacctgagggtcaagtgagtgagggatgacctcatgccctttctggccagcccagaacccctggccagtcgctgggctgggccaggctgagctccgactccttgtccagtgctctccccaggctggccccgcctcctccttcaggcccggaacttcccacagtcccaagccctagccctagggggttctcctcttctggtcctgcccgggaggcctcctgccttcccctgtgggcagggccagtgtgcccaattgcccgattgcccgtgctgggcagggtcctgcccggggggcctggtgggggaggcagggcaggaggttggagcagccctgcccagccccgtggccgccagctttgtggcaggtgccgtggagccccacaaggcccctgccctagagcgcctgctctggagggcctgccgcggcttcctcattgccagcttcagggagctggagcagccgctggagcaccccgtgacgggcgagccagccacgtggatgaccttcctcatctcctactggggtgagcagatcggacagaagatccgcaagatcacggactgcttccactgccacgtcttcccgtttctgcagcaggaggaggcccgcctcggggccctgcagcagctgcaacagcagagccaggagctgcaggaggtcctcggggagacagagcggttcctgagccaggtgctaggccgggtgctgcagctgctgccgccagggcaggtgcaggtccacaagatgaaggccgtgtacctggccctgaaccagtgcagcgtgagcaccacgcacaagtgcctcattgccgaggcctggtgctctgtgcgagacctgcccgccctgcaggaggccctgcgggacagctcgatggaggagggagtgagtgccgtggctcaccgcatcccctgccgggacatgccccccacactcatccgcaccaaccgcttcacggccagcttccagggcatcgtggatgcctacggcgtgggccgctaccaggaggtcaaccccgctccctacaccatcatcaccttccccttcctgtttgctgtgatgttcggggatgtgggccacgggctgctcatgttcctgttcgccctggccatggtccttgcggagaaccgaccggctgtgaaggccgcgcagaacgagatctggcagactttcttcaggggccgctacctgctcctgcttatgggcctgttctccatctacaccggcttcatctacaacgagtgcttcagtcgcgccaccagcatcttcccctcgggctggagtgtggccgccatggccaaccagtctggctggagtgatgcattcctggcccagcacacgatgcttaccctggatcccaacgtcaccggtgtcttcctgggaccctacccctttggcatcgatcctatttggagcctggctgccaaccacttgagcttcctcaactccttcaagatgaagatgtccgtcatcctgggcgtcgtgcacatggcctttggggtggtcctcggagtcttcaaccacgtgcactttggccagaggcaccggctgctgctggagacgctgccggagctcaccttcctgctgggactcttcggttacctcgtgttcctagtcatctacaagtggctgtgtgtctgggctgccagggccgcctcggcccccagcatcctcatccacttcatcaacatgttcctcttctcccacagccccagcaacaggctgctctacccccggcaggaggtggtccaggccacgctggtggtcctggccttggccatggtgcccatcctgctgcttggcacacccctgcacctgctgcaccgccaccgccgccgcctgcggaggaggcccgctgaccgacaggaggaaaacaaggccgggttgctggacctgcctgacgcatctgtgaatggctggagctccgatgaggaaaaggcagggggcctggatgatgaagaggaggccgagctcgtcccctccgaggtgctcatgcaccaggccatccacaccatcgagttctgcctgggctgcgtctccaacaccgcctcctacctgcgcctgtgggccctgagcctggcccacgcccagctgtccgaggttctgtgggccatggtgatgcgcataggcctgggcctgggccgggaggtgggcgtggcggctgtggtgctggtccccatctttgccgcctttgccgtgatgaccgtggctatcctgctggtgatggagggactctcagccttcctgcacgccctgcggctgcactgggtggaattccagaacaagttctactcaggcacgggctacaagctgagtcccttcaccttcgctgccacagatgactagggcccactgcaggtcctgccagacctccttcctgacctctgaggcaggagaggaataaagacggtccgccctggcagtg

SEQ ID NO: 21845 - protein, 614 aa, Homo sapiens; identical to SEQ ID NO: 2833

SEQ ID NO: 21846 - DNA, 984 bp, Homo sapiens
ctgggactcttcggttacctcgtgttcctagtcatctacaagtggctgtgtgtctgggctgccagggccgcctcggcccccagcatcctcatccacttcatcaacatgttcctcttctcccacagccccagcaacaggctgctctacccccggcaggtgggctgcggctggtgggggccgggctcacacggcctcatggggaccccgcggtcacagggccactgggagctgcaagatcctcgtccgagaaacggggatgcaggccccgggccgtgcagacagggccgtcagaggtgatggaggtggtccaggccacgctggtggtcctggccttggccatggtgcccatcctgctgcttggcacacccctgcacctgctgcaccgccaccgccgccgcctgcggaggaggcccgctgaccgacaggaggaaaacaaggccgggttgctggacctgcctgacgcatctgtgaatggctggagctccgatgaggaaaaggcagggggcctggatgatgaagaggaggccgagctcgtcccctccgaggtgctcatgcaccaggccatccacaccatcgagttctgcctgggctgcgtctccaacaccgcctcctacctgcgcctgtgggccctgagcctggcccacgcccagctgtccgaggttctgtgggccatggtgatgcgcataggcctgggcctgggccgggaggtgggcgtggcggctgtggtgctggtccccatctttgccgcctttgccgtgatgaccgtggctatcctgctggtgatggagggactctcagccttcctgcacgccctgcggctgcactgggtggaattccagaacaagttctactcaggcacgggctacaagctgagtcccttcaccttcgctgccacagatgactagggcccactgcaggtcctgccagacctccttcctgacctctgaggcaggagaggaataaagacggtccgccctggcagtg

SEQ ID NO: 21847 - protein, 202 aa, Homo sapiens [sequence omitted]

SEQ ID NO: 21848 - DNA, 1523 bp, Homo sapiens
ctgggactcttcggttacctcgtgttcctagtcatctacaagtggctgtgtgtctgggctgccagggccgcctcggcccccagcatcctcatccacttcatcaacatgttcctcttctcccacagccccagcaacaggctgctctacccccggcaggtgggctgcggctggtgggggccgggctcacacggcctcatggggaccccgcggtcacagggccactgggagctgcaagatcctcgtccgagaaacggggatgcaggccccgggccgtgcagacagggccgtcagaggtgatggaggtggtccaggccacgctggtggtcctggccttggccatggtgcccatcctgctgcttggcacacccctgcacctgctgcaccgccaccgccgccgcctgcggaggaggcccgctgaccgacaggaggaaaacaaggccgggttgctggacctgcctgacgcatctgtgaatggctggagctccgatgaggaaaaggcagggggcctggatgatgaagaggaggccgagctcgtcccctccgaggtgctcatgcaccaggccatccacaccatcgagttctgcctgggctgcgtctccaacaccgcctcctacctgcgcctgtgggccctgagcctggcccacgcccagctgtccgaggttctgtgggccatggtgatgcgcataggcctgggcctgggccgggaggtgggcgtggcggctgtggtgctggtccccatctttgccgcctttgccgtgatgaccgtggctatcctgctggtgatggagggactctcagccttcctgcacgccctgcggctgcactgggtggaattccagaacaagttctactcaggcacgggctacaagctgagtcccttcaccttcgctgccacagatgactagggcccactgcaggtcctgccagacctccttcctgacctctgaggcaggagaggaataaagacggtccgccctggcagtgatgtctcgtctctcttccctcctttttagctgaggcaggtggcagggtagaaggcatggtgtaggatctgggacctcaaaagtcaaggcctggacctgagcagatctgcaataatgtcagactcttggggtgaaaaggggcagaaaagggccaaggagagatgtttccagcacattctaacttggagtgagcaaatgtcttcccaggccgggtcaggggagtgagctccccatccttggaggtgtgcacctggctgtgagcgggtgtctgggttactctctgttgggagtggtgccaatatccatgccctggtgccgggcctcaggggtctggaagtacagagcagtgtggggcacctgagccccggccagtgctccatgcagggccatggtgtcacacgcccaaggccacacacctgccaggaagggtagaggctgtccccagcagcagacattacccaggaccccggggttcagaacaggggctgagcctgactccaggcccagcctcccctcacctgagactacagtcttcctgat

SEQ ID NO: 21849 - protein, 202 aa, Homo sapiens [sequence omitted]

SEQ ID NO: 21850 - DNA, 300 bp, Homo sapiens
cccagctcctggcttctcacataccgctgctggctgggcgggttgcttctctctgggcctcagtttcccctctgtaaagtgggactgtccaaggaggtccctcgctggccccccgtgcagggagggcttcaggctgcggcagggtggaattccagaacaagttctactcaggcacgggctacaagctgagtcccttcaccttcgctgccacagatgactagggcccactgcaggtcctgccagacctccttcctgacctctgaggcaggagaggaataaagacggtccgccctggcagtg

SEQ ID NO: 21851 - protein, 71 aa, Homo sapiens
PAPGFSHTAAGWAGCFSLGLSFPSVKWDCPRRSLAGPPCREGFRLRQGGIPEQVLLRHGLQAESLHLRCHR

SEQ ID NO: 21852 - DNA, 839 bp, Homo sapiens
cccagctcctggcttctcacataccgctgctggctgggcgggttgcttctctctgggcctcagtttcccctctgtaaagtgggactgtccaaggaggtccctcgctggccccccgtgcagggagggcttcaggctgcggcagggtggaattccagaacaagttctactcaggcacgggctacaagctgagtcccttcaccttcgctgccacagatgactagggcccactgcaggtcctgccagacctccttcctgacctctgaggcaggagaggaataaagacggtccgccctggcagtgatgtctcgtctctcttccctcctttttagctgaggcaggtggcagggtagaaggcatggtgtaggatctgggacctcaaaagtcaaggcctggacctgagcagatctgcaataatgtcagactcttggggtgaaaaggggcagaaaagggccaaggagagatgtttccagcacattctaacttggagtgagcaaatgtcttcccaggccgggtcaggggagtgagctccccatccttggaggtgtgcacctggctgtgagcgggtgtctgggttactctctgttgggagtggtgccaatatccatgccctggtgccgggcctcaggggtctggaagtacagagcagtgtggggcacctgagccccggccagtgctccatgcagggccatggtgtcacacgcccaaggccacacacctgccaggaagggtagaggctgtccccagcagcagacattacccaggaccccggggttcagaacaggggctgagcctgactccaggcccagcctcccctcacctgagactacagtcttcctgat

SEQ ID NO: 21853 - protein, 49 aa, Homo sapiens
MVSHAQGHTPARKGRGCPQQQTLPRTPGFRTGAEPDSRPSLPSPETTVF

SEQ ID NO: 21854 - DNA, 1106 bp, Homo sapiens
cctgcgtggaggactgggcactgaacagcacaggcccgagcccatccttgtccacgtgagcttatggcctgatgtagagaccaccaggggctccaggaaagttaagctgcatggagagaaacgatgggccagggccgggcccagggtggtttagggaatggcagtgtcctgggtagaataggaaggcctgagactgtgactgagctgacagtggggcaaagtgaaggagcccagtattggaagatcggctccacatgtatctctgcgaggagactgcaagcgagctcgtgtggaccaggcagaggcgagggctgagtgaggccagcagtggcctgggcacaggaagacggacatttcatatatatggatttcacagctacactcgatccacgccccacaccacatacaggctgctgtctcccacaagaatgatgatgtcaggggcatcaggaaaggaggggagagctctgctccacacgctggcggccttggctgctccagagcaatccgctgctccagcttcagccatgggaccaagagggtaaaggagcagcttctggaggccccaggcagaggccaccttgcagcagtgactggcgactttgcagtacatctctgctcacttgctgtcccttgggagtgagcaccgtctataacacatcgccatctacaaaagcctggtcacagtgttcaccagcacattcatgaaaatttaaatcaacattaaccaaagtacctgcaagtaacactgcttactcttgctgtttgcctcatctgactggaaaccttagcccccaaatatgaaatgccttctctagattaaaaggattcagagatgttgcactattgcactatatttctgcttcccgatctcgtttctgagtcctagtgaaatcgtaaacaagagatgaaataaacgtcgctccattttaataccgtctttagtatcatacacatgtgttcagtagtgagccacccaaagcctcctgccacaggagcagtagtcgaagcacagaggggaccccgctctgctgcctccccatgcagtccagtgatgaggtggatggagtcctccccacagtcacaccccaagcttcctcttctgg

SEQ ID NO: 21855 - protein, 96 aa, Homo sapiens
MYLCEETASELVWTRQRRGLSEASSGLGTGRRTFHIYGFHSYTRSTPHTTYRLLSPTRMMMSGASGKEGRALLHTLAALAAPEQSAAPASAMGPRG

SEQ ID NO: 21856 - DNA, 1449 bp, Homo sapiens
gtgactgagctgacagtggggcaaagtgaaggagcccagtattggaagatcggctccacatgtatctctgcgaggagactgcaagcgagctcgtgtggaccaggcagaggcgagggctgagtgaggccagcagtggcctgggcacaggaagacggtgagtgagaagccactggagctcctgtgcaggagcgcaacacctttactgcttcattcagtttggcttcacctgcttaaaactgtaactctctagaaggctgaacagcaaaagcctccctcctgcccagccgctcagcatccccaggcaccagcactgctcccagtctccaacgtcctccagggctcttcgcttctgggctagaagcagggaaaccagagtgtgctggggaagaagaggaggaggtggaggagggctgatgatggggccacatgctgctgggatgccagctgagagcagcggagcactgctaagctaaggggctgagtgggtgcagatggagccctccgtgggctccttcaggtaccaggagccctgcctgagattcaggacacatccaagggtgacagcttgaggttgggtttttatttttttatttgtatagtacaatctctgtggtagcagaaatatatgcacaaaaaacaattcaaataagagttcagagtaaaaaaaagtcagctaagactgtatcccgcaggacatttcatatatatggatttcacagctacactcgatccacgccccacaccacatacaggctgctgtctcccacaagaatgatgatgtcaggggcatcaggaaaggaggggagagctctgctccacacgctggcggccttggctgctccagagcaatccgctgctccagcttcagccatgggaccaagagggtaaaggagcagcttctggaggccccaggcagaggccaccttgcagcagtgactggcgactttgcagtacatctctgctcacttgctgtcccttgggagtgagcaccgtctataacacatcgccatctacaaaagcctggtcacagtgttcaccagcacattcatgaaaatttaaatcaacattaaccaaagtacctgcaagtaacactgcttactcttgctgtttgcctcatctgactggaaaccttagcccccaaatatgaaatgccttctctagattaaaaggattcagagatgttgcactattgcactatatttctgcttcccgatctcgtttctgagtcctagtgaaatcgtaaacaagagatgaaataaacgtcgctccattttaataccgtctttagtatcatacacatgtgttcagtagtgagccacccaaagcctcctgccacaggagcagtagtcgaagcacagaggggaccccgctctgctgcctccccatgcagtccagtgatgaggtggatggagtcctccccacagtcacaccccaagcttcctcttctgg

SEQ ID NO: 21857 - protein, 38 aa, Homo sapiens
MMMSGASGKEGRALLHTLAALAAPEQSAAPASAMGPRG

SEQ ID NO: 21858 - DNA, 1353 bp, Homo sapiens
ctcacttccaggccagctgaccttgcctcccctgcttcagagaagtgcctgcaatcctgatggggaatgtaggcatctgcaccctcgaagtccagctctgacctcagtcccttctgacacgggacagactacgcccaagcaaggtttgatgcctatttccaccagaagaggaagcttggggtgtgactgtggggaggactccatccacctcatcactggactgcatggggaggcagcagagcggggtcccctctgtgcttcgactactgctcctgtggcaggaggctttgggtggctcactactgaacacatgtgtatgatactaaagacggtattaaaatggagcgacgtttatttcatctcttgtttacgatttcactaggactcagaaacgagatcgggaagcagaaatatagtgcaatagtgcaacatctctgaatccttttaatctagagaaggcatttcatatttgggggctaaggtttccagtcagatgaggcaaacagcaagagtaagcagtgttacttgcaggtactttggttaatgttgatttaaattttcatgaatgtgctggtgaacactgtgaccaggcttttgtagatggcgatgtgttatagacggtgctcactcccaagggacagcaagtgagcagagatgtactgcaaagtcgccagtcactgctgcaaggtggcctctgcctggggcctccagaagctgctcctttaccctcttggtcccatggctgaagctggagcagcggattgctctggagcagccaaggccgccagcgtgtggagcagagctctcccctcctgctgggcgtgtgtgacactgatgagtttcactgtactgcatgtgacttctcccctgcccttcctcctgatggagtgtgcagacagccatgcgtggccacgggggcagtgtgaggacctccctgtctcccggctcccctcccaggggagccagctgcttgacctagctctttgggcctctcctgccctctgctctgcctggagtgtcggatcctgtgagtaggctgggcctcccctgggcagggttctccaagggcccggtttcccggcccttacctttcctgatgcccctgacatcatcattcttgtgggagacagcagcctgtatgtggtgtggggcgtggatcgagtgtagctgtgaaatccatatatatgaaatgtcctgcgggatacagtcttagctgacttttttttactctgaactcttatttgaattgttttttgtgcatatatttctgctaccacagagattgtactatacaaataaaaaaataaaaacccaacctcaagctgtcacccttggatgtgtcctgaatctcag

SEQ ID NO: 21859 - protein, 126 aa, Homo sapiens [sequence omitted]

SEQ ID NO: 21860 - DNA, 1549 bp, Homo sapiens
cctggtggcatcaggacagtgtggctcagcccaggaagccgggggagaagccgctgtcactgatgctgtggttgcctttggaggttgccctcacttccaggccagctgaccttgcctcccctgcttcagagaagtgcctgcaatcctgatggggaatgtaggcatctgcaccctcgaagtccagctctgacctcagtcccttctgacacgggacagtaagtgaagaagagtgggtggctcctgcctgtgctgtggaaggttttatttatcggttaccacttcattctccagcctgtagtgcccgactttgggttggaagctggactacgcccaagcaaggtttgatgcctatttccaccagaagaggaagcttggggtgtgactgtggggaggactccatccacctcatcactggactgcatggggaggcagcagagcggggtcccctctgtgcttcgactactgctcctgtggcaggaggctttgggtggctcactactgaacacatgtgtatgatactaaagacggtattaaaatggagcgacgtttatttcatctcttgtttacgatttcactaggactcagaaacgagatcgggaagcagaaatatagtgcaatagtgcaacatctctgaatccttttaatctagagaaggcatttcatatttgggggctaaggtttccagtcagatgaggcaaacagcaagagtaagcagtgttacttgcaggtactttggttaatgttgatttaaattttcatgaatgtgctggtgaacactgtgaccaggcttttgtagatggcgatgtgttatagacggtgctcactcccaagggacagcaagtgagcagagatgtactgcaaagtcgccagtcactgctgcaaggtggcctctgcctggggcctccagaagctgctcctttaccctcttggtcccatggctgaagctggagcagcggattgctctggagcagccaaggccgccagcgtgtggagcagagctctcccctcctgctgggcgtgtgtgacactgatgagtttcactgtactgcatgtgacttctcccctgcccttcctcctgatggagtgtgcagacagccatgcgtggccacgggggcagtgtgaggacctccctgtctcccggctcccctcccaggggagccagctgcttgacctagctctttgggcctctcctgccctctgctctgcctggagtgtcggatcctgtgagtaggctgggcctcccctgggcagggttctccaagggcccggtttcccggcccttacctttcctgatgcccctgacatcatcattcttgtgggagacagcagcctgtatgtggtgtggggcgtggatcgagtgtagctgtgaaatccatatatatgaaatgtcctgcgggatacagtcttagctgacttttttttactctgaactcttatttgaattgttttttgtgcatatatttctgctaccacagagattgtactatacaaataaaaaaataaaaacccaacctcaagctgtcacccttggatgtgtcctgaatctcag

SEQ ID NO: 21861 - protein, 126 aa, Homo sapiens [sequence omitted]

SEQ ID NO: 21862 - DNA, 1379 bp, Homo sapiens
caggccagctgtgtgtgttcacactcaccagtgcacctgtcactagcagatgagggaagggtgtgggagtggtattcccattgttcttagttagtcccgtggaatatagacccatgatttgccaacactaactaggtttgcatccacacaagttaaaatgtccatctggcatgaaatcatttcatcagtcctgtaactgatactgtatgtctcttatatgtttcttgcttttatcattccaggtttgcccttgcatctcatttcctctggggactgtggtccattgtacaagccaagatttcatctattgaatttgggtggctcactactgaacacatgtgtatgatactaaagacggtattaaaatggagcgacgtttatttcatctcttgtttacgatttcactaggactcagaaacgagatcgggaagcagaaatatagtgcaatagtgcaacatctctgaatccttttaatctagagaaggcatttcatatttgggggctaaggtttccagtcagatgaggcaaacagcaagagtaagcagtgttacttgcaggtactttggttaatgttgatttaaattttcatgaatgtgctggtgaacactgtgaccaggcttttgtagatggcgatgtgttatagacggtgctcactcccaagggacagcaagtgagcagagatgtactgcaaagtcgccagtcactgctgcaaggtggcctctgcctggggcctccagaagctgctcctttaccctcttggtcccatggctgaagctggagcagcggattgctctggagcagccaaggccgccagcgtgtggagcagagctctcccctcctgctgggcgtgtgtgacactgatgagtttcactgtactgcatgtgacttctcccctgcccttcctcctgatggagtgtgcagacagccatgcgtggccacgggggcagtgtgaggacctccctgtctcccggctcccctcccaggggagccagctgcttgacctagctctttgggcctctcctgccctctgctctgcctggagtgtcggatcctgtgagtaggctgggcctcccctgggcagggttctccaagggcccggtttcccggcccttacctttcctgatgcccctgacatcatcattcttgtgggagacagcagcctgtatgtggtgtggggcgtggatcgagtgtagctgtgaaatccatatatatgaaatgtcctgcgggatacagtcttagctgacttttttttactctgaactcttatttgaattgttttttgtgcatatatttctgctaccacagagattgtactatacaaataaaaaaataaaaacccaacctcaagctgtcacccttggatgtgtcctgaatctcag

SEQ ID NO: 21863 - protein, 42 aa, Homo sapiens [sequence omitted]

SEQ ID NO: 21864 - DNA, 2808 bp, Homo sapiens
gtggcgagcgcgagggcgggctgtgacgcggccggcgctcctcgtgcggcggcggcagaggagcgagtgcagcggccagcagcacatccccgctccacagtcgccgcagtcgccgcagccgccgccgccgccccgcgcgcccaaccgccgcggccccctgccccgccggcctgccagtgagagagcggcgagggggcgcccggccggactctgagcctagtcctctcgcgctgcggccgcccgcgcctcctcggccgcctgtcgggcatgaaaaccaaattctgcaccgggggcgaggcggagccctcgccgctcgggctgctgctgagctgcggtagcggcagcgcggccccggcgcccggcgtggggcagcagcgcgacgccgccagcgacctcgagtccaagcagctgggcggccaacagccgccgctcgcgctgccccctccgccgccgctgccgctgccgctgccgctgccccagcccccgccgccgcagccgcccgcagacgagcagccggagccccggacgcggcgcagggcctatctgtggtgcaaggagttcctgcccggcgcctggcggggcctccgcgaggacgagttccacatcagtgtcatcagaggcggccttagcaacatgctgttccagtgctccctacctgacaccacagccacccttggtgatgagcctcggaaagtgctcctgcggctgtatggagcgattttgcagatgaggtcctgtaataaagagggatccgaacaagctcagaaagaaaatgaatttcaaggggctgaggccatggttctggagagcgttatgtttgccattctcgcagagaggtcacttgggccaaaactctatggcatctttccccaaggccgactggagcagttcatcccgagccggcgattagatactgaagaattaagtttgccagatatttctgcagaaatcgccgagaaaatggctacatttcatggtatgaaaatgccattcaataaggaaccaaaatggctttttggcacaatggaaaagtatctaaaggaagtgctgagaattaaatttactgaggaatccagaattaaaaagctccacaaattgctcagttacaatctgcccttggaactggaaaacctgagatcattgcttgaatctactccatctccagttgtattttgtcataatgactgtcaagaaggtaatatcttgttgctggaaggccgagagaattctgaaaaacagaaactgatgctcattgatttcgaatacagcagttacaattacaggggattcgacattggaaatcacttctgtgagtggatgtatgattatagctatgaaaaatacccttttttcagagcaaacatccggaagtatcccaccaagaaacaacagctccattttatttccagttacttgcctgcattccaaaatgactttgaaaacctcagtactgaagaaaaatccattataaaagaagaaatgttgcttgaagttaataggtttgcccttgcatctcatttcctctggggactgtggtccattgtacaagccaagatttcatctattgaatttgggtacatggactacgcccaagcaaggtttgatgcctatttccaccagaagaggaagcttggggtgtgactgtggggaggactccatccacctcatcactggactgcatggggaggcagcagagcggggtcccctctgtgcttcgactactgctcctgtggcaggaggctttgggtggctcactactgaacacatgtgtatgatactaaagacggtattaaaatggagcgacgtttatttcatctcttgtttacgatttcactaggactcagaaacgagatcgggaagcagaaatatagtgcaatagtgcaacatctctgaatccttttaatctagagaaggcatttcatatttgggggctaaggtttccagtcagatgaggcaaacagcaagagtaagcagtgttacttgcaggtactttggttaatgttgatttaaattttcatgaatgtgctggtgaacactgtgaccaggcttttgtagatggcgatgtgttatagacggtgctcactcccaagggacagcaagtgagcagagatgtactgcaaagtcgccagtcactgctgcaaggtggcctctgcctggggcctccagaagctgctcctttaccctcttggtcccatggctgaagctggagcagcggattgctctggagcagccaaggccgccagcgtgtggagcagagctctcccctcctgctgggcgtgtgtgacactgatgagtttcactgtactgcatgtgacttctcccctgcccttcctcctgatggagtgtgcagacagccatgcgtggccacgggggcagtgtgaggacctccctgtctcccggctcccctcccaggggagccagctgcttgacctagctctttgggcctctcctgccctctgctctgcctggagtgtcggatcctgtgagtaggctgggcctcccctgggcagggttctccaagggcccggtttcccggcccttacctttcctgatgcccctgacatcatcattcttgtgggagacagcagcctgtatgtggtgtggggcgtggatcgagtgtagctgtgaaatccatatatatgaaatgtcctgcgggatacagtcttagctgacttttttttactctgaactcttatttgaattgttttttgtgcatatatttctgctaccacagagattgtactatacaaataaaaaaataaaaacccaacctcaagctgtcacccttggatgtgtcctgaatctcag

SEQ ID NO: 21865 - protein, 457 aa, Homo sapiens; identical to SEQ ID NO: 2835

SEQ ID NO: 21866 - DNA, 1327 bp, Homo sapiens
ctcacttccaggccagctgaccttgcctcccctgcttcagagaagtgcctgcaatcctgatggggaatgtaggcatctgcaccctcgaagtccagctctgacctcagtcccttctgacacgggacagactacgcccaagcaaggtttgatgcctatttccaccagaagaggaagcttggggtgtgactgtggggaggactccatccacctcatcactggactgcatggggaggcagcagagcggggtcccctctgtgcttcgactactgctcctgtggcaggaggctttgggtggctcactactgaacacatgtgtatgatactaaagacggtattaaaatggagcgacgtttatttcatctcttgtttacgatttcactaggactcagaaacgagatcgggaagcagaaatatagtgcaatagtgcaacatctctgaatccttttaatctagagaaggcatttcatatttgggggctaaggtttccagtcagatgaggcaaacagcaagagtaagcagtgttacttgcaggtactttggttaatgttgatttaaattttcatgaatgtgctggtgaacactgtgaccaggcttttgtagatggcgatgtgttatagacggtgctcactcccaagggacagcaagtgagcagagatgtactgcaaagtcgccagtcactgctgcaaggtggcctctgcctggggcctccagaagctgctcctttaccctcttggtcccatggctgaagctggagcagcggattgctctggagcagccaaggccgccagcgtgtggagcagagctctcccctcctgctgggcgtgtgtgacactgatgagtttcactgtactgcatgtgacttctcccctgcccttcctcctgatggagtgtgcagacagccatgcgtggccacgggggcagtgtgaggacctccctgtctcccggctcccctcccaggggagccagctgcttgacctagctctttgggcctctcctgccctctgctctgcctggagtgtcggatcctgtgagtaggctgggcctcccctgggcagggttctccaagggcccggtttcccggcccttacctttcctgatgcccctgacatcatcattcttgtgggagacagcagcctgtatgtggtgtggggcgtggatcgagtgtagctgtgaaatccatatatatgaaatgtcctgcgggatacagtcttagctgacttttttttactctgaactcttatttgaattgttttttgtgcatatatttctgctaccacagagattgtactatacaaataaaaaaataaaaacccaacctcaagctgtc

SEQ ID NO: 21867 - protein, 126 aa, Homo sapiens [sequence omitted]

SEQ ID NO: 21868 - DNA, 1523 bp, Homo sapiens
cctggtggcatcaggacagtgtggctcagcccaggaagccgggggagaagccgctgtcactgatgctgtggttgcctttggaggttgccctcacttccaggccagctgaccttgcctcccctgcttcagagaagtgcctgcaatcctgatggggaatgtaggcatctgcaccctcgaagtccagctctgacctcagtcccttctgacacgggacagtaagtgaagaagagtgggtggctcctgcctgtgctgtggaaggttttatttatcggttaccacttcattctccagcctgtagtgcccgactttgggttggaagctggactacgcccaagcaaggtttgatgcctatttccaccagaagaggaagcttggggtgtgactgtggggaggactccatccacctcatcactggactgcatggggaggcagcagagcggggtcccctctgtgcttcgactactgctcctgtggcaggaggctttgggtggctcactactgaacacatgtgtatgatactaaagacggtattaaaatggagcgacgtttatttcatctcttgtttacgatttcactaggactcagaaacgagatcgggaagcagaaatatagtgcaatagtgcaacatctctgaatccttttaatctagagaaggcatttcatatttgggggctaaggtttccagtcagatgaggcaaacagcaagagtaagcagtgttacttgcaggtactttggttaatgttgatttaaattttcatgaatgtgctggtgaacactgtgaccaggcttttgtagatggcgatgtgttatagacggtgctcactcccaagggacagcaagtgagcagagatgtactgcaaagtcgccagtcactgctgcaaggtggcctctgcctggggcctccagaagctgctcctttaccctcttggtcccatggctgaagctggagcagcggattgctctggagcagccaaggccgccagcgtgtggagcagagctctcccctcctgctgggcgtgtgtgacactgatgagtttcactgtactgcatgtgacttctcccctgcccttcctcctgatggagtgtgcagacagccatgcgtggccacgggggcagtgtgaggacctccctgtctcccggctcccctcccaggggagccagctgcttgacctagctctttgggcctctcctgccctctgctctgcctggagtgtcggatcctgtgagtaggctgggcctcccctgggcagggttctccaagggcccggtttcccggcccttacctttcctgatgcccctgacatcatcattcttgtgggagacagcagcctgtatgtggtgtggggcgtggatcgagtgtagctgtgaaatccatatatatgaaatgtcctgcgggatacagtcttagctgacttttttttactctgaactcttatttgaattgttttttgtgcatatatttctgctaccacagagattgtactatacaaataaaaaaataaaaacccaacctcaagctgtc

SEQ ID NO: 21869 - protein, 126 aa, Homo sapiens [sequence omitted]

SEQ ID NO: 21870 - DNA, 1353 bp, Homo sapiens
caggccagctgtgtgtgttcacactcaccagtgcacctgtcactagcagatgagggaagggtgtgggagtggtattcccattgttcttagttagtcccgtggaatatagacccatgatttgccaacactaactaggtttgcatccacacaagttaaaatgtccatctggcatgaaatcatttcatcagtcctgtaactgatactgtatgtctcttatatgtttcttgcttttatcattccaggtttgcccttgcatctcatttcctctggggactgtggtccattgtacaagccaagatttcatctattgaatttgggtggctcactactgaacacatgtgtatgatactaaagacggtattaaaatggagcgacgtttatttcatctcttgtttacgatttcactaggactcagaaacgagatcgggaagcagaaatatagtgcaatagtgcaacatctctgaatccttttaatctagagaaggcatttcatatttgggggctaaggtttccagtcagatgaggcaaacagcaagagtaagcagtgttacttgcaggtactttggttaatgttgatttaaattttcatgaatgtgctggtgaacactgtgaccaggcttttgtagatggcgatgtgttatagacggtgctcactcccaagggacagcaagtgagcagagatgtactgcaaagtcgccagtcactgctgcaaggtggcctctgcctggggcctccagaagctgctcctttaccctcttggtcccatggctgaagctggagcagcggattgctctggagcagccaaggccgccagcgtgtggagcagagctctcccctcctgctgggcgtgtgtgacactgatgagtttcactgtactgcatgtgacttctcccctgcccttcctcctgatggagtgtgcagacagccatgcgtggccacgggggcagtgtgaggacctccctgtctcccggctcccctcccaggggagccagctgcttgacctagctctttgggcctctcctgccctctgctctgcctggagtgtcggatcctgtgagtaggctgggcctcccctgggcagggttctccaagggcccggtttcccggcccttacctttcctgatgcccctgacatcatcattcttgtgggagacagcagcctgtatgtggtgtggggcgtggatcgagtgtagctgtgaaatccatatatatgaaatgtcctgcgggatacagtcttagctgacttttttttactctgaactcttatttgaattgttttttgtgcatatatttctgctaccacagagattgtactatacaaataaaaaaataaaaacccaacctcaagctgtc

SEQ ID NO: 21871 - protein, 42 aa, Homo sapiens [sequence omitted]

SEQ ID NO: 21872 - DNA, 2782 bp, Homo sapiens
gtggcgagcgcgagggcgggctgtgacgcggccggcgctcctcgtgcggcggcggcagaggagcgagtgcagcggccagcagcacatccccgctccacagtcgccgcagtcgccgcagccgccgccgccgccccgcgcgcccaaccgccgcggccccctgccccgccggcctgccagtgagagagcggcgagggggcgcccggccggactctgagcctagtcctctcgcgctgcggccgcccgcgcctcctcggccgcctgtcgggcatgaaaaccaaattctgcaccgggggcgaggcggagccctcgccgctcgggctgctgctgagctgcggtagcggcagcgcggccccggcgcccggcgtggggcagcagcgcgacgccgccagcgacctcgagtccaagcagctgggcggccaacagccgccgctcgcgctgccccctccgccgccgctgccgctgccgctgccgctgccccagcccccgccgccgcagccgcccgcagacgagcagccggagccccggacgcggcgcagggcctatctgtggtgcaaggagttcctgcccggcgcctggcggggcctccgcgaggacgagttccacatcagtgtcatcagaggcggccttagcaacatgctgttccagtgctccctacctgacaccacagccacccttggtgatgagcctcggaaagtgctcctgcggctgtatggagcgattttgcagatgaggtcctgtaataaagagggatccgaacaagctcagaaagaaaatgaatttcaaggggctgaggccatggttctggagagcgttatgtttgccattctcgcagagaggtcacttgggccaaaactctatggcatctttccccaaggccgactggagcagttcatcccgagccggcgattagatactgaagaattaagtttgccagatatttctgcagaaatcgccgagaaaatggctacatttcatggtatgaaaatgccattcaataaggaaccaaaatggctttttggcacaatggaaaagtatctaaaggaagtgctgagaattaaatttactgaggaatccagaattaaaaagctccacaaattgctcagttacaatctgcccttggaactggaaaacctgagatcattgcttgaatctactccatctccagttgtattttgtcataatgactgtcaagaaggtaatatcttgttgctggaaggccgagagaattctgaaaaacagaaactgatgctcattgatttcgaatacagcagttacaattacaggggattcgacattggaaatcacttctgtgagtggatgtatgattatagctatgaaaaatacccttttttcagagcaaacatccggaagtatcccaccaagaaacaacagctccattttatttccagttacttgcctgcattccaaaatgactttgaaaacctcagtactgaagaaaaatccattataaaagaagaaatgttgcttgaagttaataggtttgcccttgcatctcatttcctctggggactgtggtccattgtacaagccaagatttcatctattgaatttgggtacatggactacgcccaagcaaggtttgatgcctatttccaccagaagaggaagcttggggtgtgactgtggggaggactccatccacctcatcactggactgcatggggaggcagcagagcggggtcccctctgtgcttcgactactgctcctgtggcaggaggctttgggtggctcactactgaacacatgtgtatgatactaaagacggtattaaaatggagcgacgtttatttcatctcttgtttacgatttcactaggactcagaaacgagatcgggaagcagaaatatagtgcaatagtgcaacatctctgaatccttttaatctagagaaggcatttcatatttgggggctaaggtttccagtcagatgaggcaaacagcaagagtaagcagtgttacttgcaggtactttggttaatgttgatttaaattttcatgaatgtgctggtgaacactgtgaccaggcttttgtagatggcgatgtgttatagacggtgctcactcccaagggacagcaagtgagcagagatgtactgcaaagtcgccagtcactgctgcaaggtggcctctgcctggggcctccagaagctgctcctttaccctcttggtcccatggctgaagctggagcagcggattgctctggagcagccaaggccgccagcgtgtggagcagagctctcccctcctgctgggcgtgtgtgacactgatgagtttcactgtactgcatgtgacttctcccctgcccttcctcctgatggagtgtgcagacagccatgcgtggccacgggggcagtgtgaggacctccctgtctcccggctcccctcccaggggagccagctgcttgacctagctctttgggcctctcctgccctctgctctgcctggagtgtcggatcctgtgagtaggctgggcctcccctgggcagggttctccaagggcccggtttcccggcccttacctttcctgatgcccctgacatcatcattcttgtgggagacagcagcctgtatgtggtgtggggcgtggatcgagtgtagctgtgaaatccatatatatgaaatgtcctgcgggatacagtcttagctgacttttttttactctgaactcttatttgaattgttttttgtgcatatatttctgctaccacagagattgtactatacaaataaaaaaataaaaacccaacctcaagctgtc

SEQ ID NO: 21873 - protein, 457 aa, Homo sapiens; identical to SEQ ID NO: 2835

SEQ ID NO: 21874 - DNA, 1759 bp, Homo sapiens
gtggcgagcgcgagggcgggctgtgacgcggccggcgctcctcgtgcggcggcggcagaggagcgagtgcagcggccagcagcacatccccgctccacagtcgccgcagtcgccgcagccgccgccgccgccccgcgcgcccaaccgccgcggccccctgccccgccggcctgccagtgagagagcggcgagggggcgcccggccggactctgagcctagtcctctcgcgctgcggccgcccgcgcctcctcggccgcctgtcgggcatgaaaaccaaattctgcaccgggggcgaggcggagccctcgccgctcgggctgctgctgagctgcggtagcggcagcgcggccccggcgcccggcgtggggcagcagcgcgacgccgccagcgacctcgagtccaagcagctgggcggccaacagccgccgctcgcgctgccccctccgccgccgctgccgctgccgctgccgctgccccagcccccgccgccgcagccgcccgcagacgagcagccggagccccggacgcggcgcagggcctatctgtggtgcaaggagttcctgcccggcgcctggcggggcctccgcgaggacgagttccacatcagtgtcatcagaggcggccttagcaacatgctgttccagtgctccctacctgacaccacagccacccttggtgatgagcctcggaaagtgctcctgcggctgtatggagcgattttgcagatgggggctgaggccatggttctggagagcgttatgtttgccattctcgcagagaggtcacttgggccaaaactctatggcatctttccccaaggccgactggagcagttcatcccgagccggcgattagatactgaagaattaagtttgccagatatttctgcagaaatcgccgagaaaatggctacatttcatggtatgaaaatgccattcaataaggaaccaaaatggctttttggcacaatggaaaagtatctaaaggaagtgctgagaattaaatttactgaggaatccagaattaaaaagctccacaaattgctcagttacaatctgcccttggaactggaaaacctgagatcattgcttgaatctactccatctccagttgtattttgtcataatgactgtcaagaaggtaatatcttgttgctggaaggccgagagaattctgaaaaacagaaactgatgctcattgatttcgaatacagcagttacaattacaggggattcgacattggaaatcacttctgtgagtggatgtatgattatagctatgaaaaatacccttttttcagagcaaacatccggaagtatcccaccaagaaacaacagctccattttatttccagttacttgcctgcattccaaaatgactttgaaaacctcagtactgaagaaaaatccattataaaagaagaaatgttgcttgaagttaataggtttgcccttgcatctcatttcctctggggactgtggtccattgtacaagccaagatttcatctattgaatttgggtacatggactacgcccaagcaaggtttgatgcctatttccaccagaagaggaagcttggggtgtgactgtggggaggactccatccacctcatcactggactgcatggggaggcagcagagcggggtcccctctgtgcttcgactactgctcctgtggcaggaggctttgggtggctcactactgaacacatgtgtatgatactaaagacggtattaaaatggagcgacgtttatttc

SEQ ID NO: 21875 - protein, 439 aa, Homo sapiens; identical to SEQ ID NO: 2837

SEQ ID NO: 21876 - DNA, 443 bp, Homo sapiens
acctggtggcatcaggacagtgtggctcagcccaggaagccgggggagaagccgctgtcactgatgctgtggttgcctttggaggttgccctcacttccaggccagctgaccttgcctcccctgcttcagagaagtgcctgcaatcctgatggggaatgtaggcatctgcaccctcgaagtccagctctgacctcagtcccttctgacacgggacagactacgcccaagcaaggtttgatgcctatttccaccagaagaggaagcttggggtgtgactgtggggaggactccatccacctcatcactggactgcatggggaggcagcagagcggggtcccctctgtgcttcgactactgctcctgtggcaggaggctttgggtggctcactactgaacacatgtgtatgatactaaagacggtattaaaatggagcgacgttt

SEQ ID NO: 21877 - protein, 67 aa, Homo sapiens
MPISTRRGSLGCDCGEDSIHLITGLHGEAAERGPLCASTTAPVAGGFGWLTTEHMCMILKTVLKWSD

SEQ ID NO: 21878 - DNA, 458 bp, Homo sapiens
actcagcctgaccgcttgtctttagaaggcctgattggaagagtgcactctattgactttcctctaacaatgaaattgtgaaaggtacatggggcggctgtgagacgtgcagctatcgggtctcaccggcacatcccttttctcgtaaagcaatgaagcactttctaaggtgttggtactagtgctggaggctgctggtgcattagatgctgcccgtcacatcggtgggctgagaaaccttccttaaagacctgtgatgttttgtaaaccctgactgttctggtggttgcaaagttagtgtctgtttagtgttccccatctcaccagaagtgtttcctttttctcattcatagaggtcctgtaataaagagggatccgaacaagctcagaaagaaaatgaatttcaaggggctgaggccatggttctggagagcgttatgtttgccattctcgcagag

SEQ ID NO: 21879 - protein, 32 aa, Homo sapiens
GVGTSAGGCWCIRCCPSHRWAEKPSLKTCDVL

SEQ ID NO: 21880 - DNA, 575 bp, Homo sapiens
catatatacgtatatatacacatatatatacgtatatgtgtatatacatgtgtatatatatacacatatacgtatatatatgtatatatatacacatatatatacgtatatatatgtgtgtatatatatataggaatccgtgggattttacttcagtgacataaattcatttgaagtagatattaaaatacattgtataaatatttagtatgacatccaacttttctctaacaagttaataaaaattatcctctataagttataaaacaaaactaagctttttacatttattagaaatttgaacactggttatttaatattaagtaattattaaatttttttaatgtgaacattactgtggtcatttttaaaaaatcatcttatatagatacagactgaaatatttacagaataatataacatctggaatttgcttcaaaataaccctggtggagtaaatgagggaaaagatggaagaagactggctgtgaggggaagatgaggaatggacactggggttcattatactcttctactttagggtatatctgaaattccccataataaaaactttt

SEQ ID NO: 21881 - protein, 42 aa, Homo sapiens
MCIYMCIYIHIYVYICIYIHIYIRIYMCVYIYRNPWDFTSVT

SEQ ID NO: 21882 - DNA, 485 bp, Homo sapiens
tctgcacgcctcccgcagcctcagtttccctgtccgtggtactgaggatgctcgggcctagaagttcagggctggaggcccagggaccgtcgagggaggggcatcatccccgccatggggccgccgcaactgcccagagcacaggccaaaggaagctgcaggatgaagacaacagcatcacaaggaggaagccaggatccctgtgttaccacaaggaggagagatgcctaaccaagaccgtctgcaaggattttgtgtgagccagaagcagagctgtatggtgttcagccactgagatttgagggctgtttgttacagcagttgacctatcctgactgacacatcacatcattcctttccccaccatgtgtctaacatgctaccaaattgaattttaagtaaattagtacttataaattaagtacaaatgcttttcaaattcacatgaatctttggtaaataaaactggttgtaaaattattgat

SEQ ID NO: 21883 - protein, 70 aa, Homo sapiens
MLGPRSSGLEAQGPSREGHHPRHGAAATAQSTGQRKLQDEDNSITRRKPGSLCYHKEERCLTKTVCKDFV

SEQ ID NO: 21884 - DNA, 2738 bp, Homo sapiens
ccaaaaagaagtcacgacaaggaaaacttgtgaaacagtttgcaaaaatagaggaatctactccagtgcacgattctcctggaaaagacgacgcggtaccagatttgatgggtccccattctgaccagggtgagcacagtggcactgtgggcgtgcctgtgagctacacagactgtgctccttcacccgtcggttgttcagttgtgacatcagatagcttcaaaacaaaagacagctttagaactgcaaaaagtaaaaagaagaggcgaatcacaaggtatgatgcacagttaatcctagaaaataactctgggattcccaaattgactcttcgtaggcgtcatgatagcagcagcaaaacaaatgaccaagagaatgatggaatgaactcttccaaaataagcatcaagttaagcaaagaccatgacaacgataacaatctctatgtagcaaagcttaataatggatttaactcaggatcaggcagtagtttcttaaaaaaaaaaaaaaaatgacatacgtgacagctcacttttcagttcattatatgtacgagggtagcagtgtgtgggatgaggttcgatacagcgtatttattgcttgtcatgtaaattaaaaaccttgtatttaactcttttcaatccttttagataaaattgttctttgcaagaatgattggtgcttattttttcaaaaatttgctgtgaacaacgtgatgacaacaagcaacatttatctaatgaactacagctatcttaatttggttcttcaagttttctgttgcacttgtaaaatgctacaaggaatattaaaaaaatctattcactttaacttataatagtttatgaaataaaaacatgagtcacagcttttgttctgtggtaacctataaaaaaagtttgtctttgagattcaatgtaaagaactgaaaacaatgtatatgttgtaaatatttgtgtgttgtgagaaatttttgtcataagaaattaaaagaacttaccaggaaggtttttaagtttagaaatattcatgccaataaaataggaaattataaatatatagttttaagcactgcatcagtgggagttcttggcttatgttagtttatgttagtttattatgaaaacatcaaagatttttttgactatattatcagttaaacaaaaaggagtcagatttaatttgttttttgaagcactttgagaaattaattttaattaacttaatgagcaaatttttattactactttatgttcaataccaggttcttttcatttctctggattattttgcaaatcattggacagagaatttgggaatataaatctgtaacaggtgtttgacaccagtaggtctctttatttctgggaaatgtgtacctgtactttctgatatacagtgttcctaagtaaaaatcaattcaggggatttgtatagtgtctataggaaagtagcccatgtcttgaaatatgaaaaggaatctgaaggtcatgaaaagtccagtggagaaaatctcaatgcttactgttactactaattgattcctactagtttccaggtttggggggatattgtttcaatgacgctccttaagactgttgattgcccataggttccaaatagaaattaagactcatgaacatttttagaaagtagattgttttctcctggttctctaaggaactacttctgcagtcttacatagtctcatccttgtttgttgtggtgcagtcgaactcctcaggcgtttggaaagcatgtggtagaccttcttccacacccacccatacccccgttcactgcgtctggaggtcttcaacagtgaagtagggcagcccacacagcctctcaggagcacctgtccgaggcacccggagcactttgcagagcacgtccagccctcatggggtccctgcatagaaatgtgaacccctgccactgaggaagatgaaggtagaccctgtgtctggaggtgctggagggcagcgggtcacctcttgtattcccaccttagtttggggtgttttgaagaggttcagagactaaatcttaaaccttatttgaataccaacgatagctattttgggaatttcgatcttaaaaagtgacaaaacacatttcccattttcatttttcagctgaattttagtaacttatttttgatgttttaattttatcatggcctcctctttggaggccaaccttcccatgggtctcaaagcagtgacatttggtagtaaatcactgcctctcaggagtcggtatgcacaagcactcagcagccactgttgatgccttctagggaaacctaatttccgttggtaaaggtaggggcctcggaactgttccggatctgctgtagaacttcaccgtgtggaatggtgacagccacacaccgttgaccagtttagaagaggttgcattcaataaaactcttagcttgagcttatgcaatgattggttaagattttggcattgtaagaattaggagatgatcatagaaatatatgtaaagtattcaattttcaatcattttcaaattactgttataaattgtttttgctgagttgtaatacttttgagatacaatgtattccttgtactgaaagaatgaaaaaggactttttcagcatttgaggtaagttctttaacgtttcattaaaaacattttttacaaatattttgtacatgcacttgcagtattgaggttaatcattttaataaattcggaaattaaa

SEQ ID NO: 21885 - protein, 135 aa, Homo sapiens
MGPHSDQGEHSGTVGVPVSYTDCAPSPVGCSVVTSDSFKTKDSFRTAKSKKKRRITRYDAQLILENNSGIPKLTLRRRHDSSSKTNDQENDGMNSSKISIKLSKDHDNDNNLYVAKLNNGFNSGSGSSFLKKKKK

SEQ ID NO: 21886 - DNA, 5830 bp, Homo sapiens
cgcggggggcgcgacggcggcggcggcggccggttgggggcggggggctcggacgctgcggggactcatttttcccgtcagcggagggagcgagcggtgctgcggcccgcgccgccatcttggattttactctccatttttctctggaattatttttggtgattaattttctgggggggactgggacgcggggcccggcggcgcggccccgcatcgcagcggccgggcagcggggcctgggacgcgccccgaggaggagcggggcggcgcaggcggagagaacattgaaagtattctctaagctatttgaagagagtgactaaatgcacctgggtcaggctgtctgtgggtatgaagtggttgggagaatccaagatcatggtggtgaatggcaggagaaatggaggcaagttgtctaatgaccatcagcagaatcaatcaaaattacagcacacggggaaggacaccctgaaggctggcaaaaatgcagtcgagaggaggtcgaacagatgtaatggtaactcgggatttgaaggacagagtcgctatgtaccatcctctggaatgtccgccaaggaactctgtgaaaatgatgacctagcaaccagtttggttcttgatccctatttaggttttcaaacacacaaaatgaatactagcgcctttccttcgaggagctcaaggcatttttcaaaatctgacagtttttctcacaacaaccctgtgagatttaggcctattaaaggaaggcaggaagaactaaaggaagtaattgaacgttttaagaaagatgaacacttggagaaagccttcaaatgtttgacttcaggcgaatgggcacggcactattttctcaacaagaataaaatgcaggagaaattattcaaagaacatgtatttatttatttgcgaatgtttgcaactgacagtggatttgaaatattgccatgtaatagatactcatcagaacaaaatggagccaaaatagttgcaacaaaagagtggaaacgaaatgacaaaatagaattactggtgggttgtattgccgaactttcagaaattgaggagaacatgctacttagacatggagaaaacgacttcagtgtcatgtactccacaaggaaaaactgtgctcaactctggctgggtcctgctgcgtttataaaccatgattgcagacctaattgtaagtttgtgtcaactggtcgagatacagcatgtgtgaaggctctaagagacattgaacctggagaagaaatttcttgttattatggagatgggttctttggagaaaataatgagttctgcgagtgttacacttgcgaaagacggggcactggtgcttttaaatccagagtgggactgcctgcgcctgctcctgttatcaatagcaaatatggactcagagaaacagataaacgtttaaataggcttaaaaagttaggtgacagcagcaaaaattcagacagtcaatctgtcagctctaacactgatgcagataccactcaggaaaaaaacaatgcaacttctaaccgaaaatcttcagttggcgtaaaaaagaatagcaagagcagaacgttaacgaggcaatctatgtcaagaattccagcttcttccaactctacctcatctaagctaactcatataaataattccagggtaccaaagaaactgaagaagcctgcaaagcctttactttcaaagataaaattgagaaatcattgcaagcggctggagcaaaagaatgcttcaagaaaactcgaaatgggaaacttagtactgaaagagcctaaagtagttctgtataaaaatttgcccattaaaaaagataaggagccagagggaccagcccaagccgcagttgccagcgggtgcttgactagacacgcggcgagagaacacagacagaatcctgtgagaggtgctcattcgcagggggagagctcgccctgcacctacataactcggcggtcagtgaggacaagaacaaatctgaaggaggcctctgacatcaagcttgaaccaaatacgttgaatggctataaaagcagtgtgacggaaccttgccccgacagtggtgaacagctgcagccagctcctgtgctgcaggaggaagaactggctcatgagactgcacaaaaaggggaggcaaagtgtcataagagtgacacaggcatgtccaaaaagaagtcacgacaaggaaaacttgtgaaacagtttgcaaaaatagaggaatctactccagtgcacgattctcctggaaaagacgacgcggtaccagatttgatgggtccccattctgaccagggtgagcacagtggcactgtgggcgtgcctgtgagctacacagactgtgctccttcacccgtcggttgttcagttgtgacatcagatagcttcaaaacaaaagacagctttagaactgcaaaaagtaaaaagaagaggcgaatcacaaggtatgatgcacagttaatcctagaaaataactctgggattcccaaattgactcttcgtaggcgtcatgatagcagcagcaaaacaaatgaccaagagaatgatggaatgaactcttccaaaataagcatcaagttaagcaaagaccatgacaacgataacaatctctatgtagcaaagcttaataatggatttaactcaggatcaggcagtagttctacaaaattaaaaatccagctaaaacgagatgaggaaaatagggggtcttatacagaggggcttcatgaaaatggggtgtgctgcagtgatcctctttctctcttggagtctcgaatggaggtggatgactatagtcagtatgaggaagaaagtacagatgattcctcctcttctgagggcgatgaagaggaggatgactatgatgatgactttgaagacgattttattcctcttcctccagctaagcgcttgaggttaatagttggaaaagactctatagatattgacatttcttcaaggagaagagaagatcagtctttaaggcttaatgcctaagctcttggtcttaacttgacctgggataactactttaaagaaataaaaaattccagtcaattattcctcaactgaaagtttagtggcagcacttctattgtcccttcacttatcagcatactattgtagaaagtgtacagcatactgactcaattcttaagtctgatttgtgcaaatttttatcgtactttttaaatagccttcttacgtgcaattctgagttagaggtaaagccctgttgtaaaataaaggctcaagcaaaattgtacagtgatagcaactttccacacaggacgttgaaaacagtaatgtggctacacagtttttttaactgtaagagcatcagctggctctttaatatatgactaaacaataatttaaaacaaatcatagtagcagcatattaagggtttctagtatgctaatatcaccagcaatgatctttggctttttgatttatttgctagatgtttcccccttggagttttgtcagtttcacactgtttgctggcccaggtgtactgtttgtggcctttgttaatatcgcaaaccattggttgggagtcagattggtttcttaaaaaaaaaaaaaaaatgacatacgtgacagctcacttttcagttcattatatgtacgagggtagcagtgtgtgggatgaggttcgatacagcgtatttattgcttgtcatgtaaattaaaaaccttgtatttaactcttttcaatccttttagataaaattgttctttgcaagaatgattggtgcttattttttcaaaaatttgctgtgaacaacgtgatgacaacaagcaacatttatctaatgaactacagctatcttaatttggttcttcaagttttctgttgcacttgtaaaatgctacaaggaatattaaaaaaatctattcactttaacttataatagtttatgaaataaaaacatgagtcacagcttttgttctgtggtaacctataaaaaaagtttgtctttgagattcaatgtaaagaactgaaaacaatgtatatgttgtaaatatttgtgtgttgtgagaaatttttgtcataagaaattaaaagaacttaccaggaaggtttttaagtttagaaatattcatgccaataaaataggaaattataaatatatagttttaagcactgcatcagtgggagttcttggcttatgttagtttatgttagtttattatgaaaacatcaaagatttttttgactatattatcagttaaacaaaaaggagtcagatttaatttgttttttgaagcactttgagaaattaattttaattaacttaatgagcaaatttttattactactttatgttcaataccaggttcttttcatttctctggattattttgcaaatcattggacagagaatttgggaatataaatctgtaacaggtgtttgacaccagtaggtctctttatttctgggaaatgtgtacctgtactttctgatatacagtgttcctaagtaaaaatcaattcaggggatttgtatagtgtctataggaaagtagcccatgtcttgaaatatgaaaaggaatctgaaggtcatgaaaagtccagtggagaaaatctcaatgcttactgttactactaattgattcctactagtttccaggtttggggggatattgtttcaatgacgctccttaagactgttgattgcccataggttccaaatagaaattaagactcatgaacatttttagaaagtagattgttttctcctggttctctaaggaactacttctgcagtcttacatagtctcatccttgtttgttgtggtgcagtcgaactcctcaggcgtttggaaagcatgtggtagaccttcttccacacccacccatacccccgttcactgcgtctggaggtcttcaacagtgaagtagggcagcccacacagcctctcaggagcacctgtccgaggcacccggagcactttgcagagcacgtccagccctcatggggtccctgcatagaaatgtgaacccctgccactgaggaagatgaaggtagaccctgtgtctggaggtgctggagggcagcgggtcacctcttgtattcccaccttagtttggggtgttttgaagaggttcagagactaaatcttaaaccttatttgaataccaacgatagctattttgggaatttcgatcttaaaaagtgacaaaacacatttcccattttcatttttcagctgaattttagtaacttatttttgatgttttaattttatcatggcctcctctttggaggccaaccttcccatgggtctcaaagcagtgacatttggtagtaaatcactgcctctcaggagtcggtatgcacaagcactcagcagccactgttgatgccttctagggaaacctaatttccgttggtaaaggtaggggcctcggaactgttccggatctgctgtagaacttcaccgtgtggaatggtgacagccacacaccgttgaccagtttagaagaggttgcattcaataaaactcttagcttgagcttatgcaatgattggttaagattttggcattgtaagaattaggagatgatcatagaaatatatgtaaagtattcaattttcaatcattttcaaattactgttataaattgtttttgctgagttgtaatacttttgagatacaatgtattccttgtactgaaagaatgaaaaaggactttttcagcatttgaggtaagttctttaacgtttcattaaaaacattttttacaaatattttgtacatgcacttgcagtattgaggttaatcattttaataaattcggaaattaaa

SEQ ID NO: 21887 - protein, 885 aa, Homo sapiens
MKWLGESKIMVVNGRRNGGKLSNDHQQNQSKLQHTGKDTLKAGKNAVERRSNRCNGNSGFEGQSRYVPSSGMSAKELCENDDLATSLVLDPYLGFQTHKMNTSAFPSRSSRHFSKSDSFSHNNPVRFRPIKGRQEELKEVIERFKKDEHLEKAFKCLTSGEWARHYFLNKNKMQEKLFKEHVFIYLRMFATDSGFEILPCNRYSSEQNGAKIVATKEWKRNDKIELLVGCIAELSEIEENMLLRHGENDFSVMYSTRKNCAQLWLGPAAFINHDCRPNCKFVSTGRDTACVKALRDIEPGEEISCYYGDGFFGENNEFCECYTCERRGTGAFKSRVGLPAPAPVINSKYGLRETDKRLNRLKKLGDSSKNSDSQSVSSNTDADTTQEKNNATSNRKSSVGVKKNSKSRTLTRQSMSRIPASSNSTSSKLTHINNSRVPKKLKKPAKPLLSKIKLRNHCKRLEQKNASRKLEMGNLVLKEPKVVLYKNLPIKKDKEPEGPAQAAVASGCLTRHAAREHRQNPVRGAHSQGESSPCTYITRRSVRTRTNLKEASDIKLEPNTLNGYKSSVTEPCPDSGEQLQPAPVLQEEELAHETAQKGEAKCHKSDTGMSKKKSRQGKLVKQFAKIEESTPVHDSPGKDDAVPDLMGPHSDQGEHSGTVGVPVSYTDCAPSPVGCSVVTSDSFKTKDSFRTAKSKKKRRITRYDAQLILENNSGIPKLTLRRRHDSSSKTNDQENDGMNSSKISIKLSKDHDNDNNLYVAKLNNGFNSGSGSSSTKLKIQLKRDEENRGSYTEGLHENGVCCSDPLSLLESRMEVDDYSQYEEESTDDSSSSEGDEEEDDYDDDFEDDFIPLPPAKRLRLIVGKDSIDIDISSRRREDQSLRLNA

SEQ ID NO: 21888 - DNA, 3982 bp, Homo sapiens
cgcggggggcgcgacggcggcggcggcggccggttgggggcggggggctcggacgctgcggggactcatttttcccgtcagcggagggagcgagcggtgctgcggcccgcgccgccatcttggattttactctccatttttctctggaattatttttggtgattaattttctgggggggactgggacgcggggcccggcggcgcggccccgcatcgcagcggccgggcagcggggcctgggacgcgccccgaggaggagcggggcggcgcaggcggagagaacattgaaagtattctctaagctatttgaagagagtgactaaatgcacctgggtcaggctgtctgtgggtatgaagtggttgggagaatccaagatcatggtggtgaatggcaggagaaatggaggcaagttgtctaatgaccatcagcagaatcaatcaaaattacagcacacggggaaggacaccctgaaggctggcaaaaatgcagtcgagaggaggtcgaacagatgtaatggtaactcgggatttgaaggacagagtcgctatgtaccatcctctggaatgtccgccaaggaactctgtgaaaatgatgacctagcaaccagtttggttcttgatccctatttaggttttcaaacacacaaaatgaatactagcgcctttccttcgaggagctcaaggcatttttcaaaatctgacagtttttctcacaacaaccctgtgagatttaggcctattaaaggaaggcaggaagaactaaaggaagtaattgaacgttttaagaaagatgaacacttggagaaagccttcaaatgtttgacttcaggcgaatgggcacggcactattttctcaacaagaataaaatgcaggagaaattattcaaagaacatgtatttatttatttgcgaatgtttgcaactgacagtggatttgaaatattgccatgtaatagatactcatcagaacaaaatggagccaaaatagttgcaacaaaagagtggaaacgaaatgacaaaatagaattactggtgggttgtattgccgaactttcagaaattgaggagaacatgctacttagacatggagaaaacgacttcagtgtcatgtactccacaaggaaaaactgtgctcaactctggctgggtcctgctgcgtttataaaccatgattgcagacctaattgtaagtttgtgtcaactggtcgagatacagcatgtgtgaaggctctaagagacattgaacctggagaagaaatttcttgttattatggagatgggttctttggagaaaataatgagttctgcgagtgttacacttgcgaaagacggggcactggtgcttttaaatccagagtgggactgcctgcgcctgctcctgttatcaatagcaaatatggactcagagaaacagataaacgtttaaataggcttaaaaagttaggtgacagcagcaaaaattcagacagtcaatctgtcagctctaacactgatgcagataccactcaggaaaaaaacaatgcaacttctaaccgaaaatcttcagttggcgtaaaaaagaatagcaagagcagaacgttaacgaggcaatctatgtcaagaattccagcttcttccaactctacctcatctaagctaactcatataaataattccagggtaccaaagaaactgaagaagcctgcaaagcctttactttcaaagataaaattgagaaatcattgcaagcggctggagcaaaagaatgcttcaagaaaactcgaaatgggaaacttagtactgaaagagcctaaagtagttctgtataaaaatttgcccattaaaaaagataaggagccagagggaccagcccaagccgcagttgccagcgggtgcttgactagacacgcggcgagagaacacagacagaatcctgtgagaggtgctcattcgcagggggagagctcgccctgcacctacataactcggcggtcagtgaggacaagaacaaatctgaaggaggcctctgacatcaagcttgaaccaaatacgttgaatggctataaaagcagtgtgacggaaccttgccccgacagtggtgaacagctgcagccagctcctgtgctgcaggaggaagaactggctcatgagactgcacaaaaaggggaggcaaagtgtcataagagtgacacaggcatgtccaaaaagaagtcacgacaaggaaaacttgtgaaacagtttgcaaaaatagaggaatctactccagtgcacgattctcctggaaaagacgacgcggtaccagatttgatgggtccccattctgaccagggtgagcacagtggcactgtgggcgtgcctgtgagctacacagactgtgctccttcacccgtcggttgttcagttgtgacatcagatagcttcaaaacaaaagacagctttagaactgcaaaaagtaaaaagaagaggcgaatcacaaggtatgatgcacagttaatcctagaaaataactctgggattcccaaattgactcttcgtaggcgtcatgatagcagcagcaaaacaaatgaccaagagaatgatggaatgaactcttccaaaataagcatcaagttaagcaaagaccatgacaacgataacaatctctatgtagcaaagcttaataatggatttaactcaggatcaggcagtagttctacaaaattaaaaatccagctaaaacgagatgaggaaaatagggggtcttatacagaggggcttcatgaaaatggggtgtgctgcagtgatcctctttctctcttggagtctcgaatggaggtggatgactatagtcagtatgaggaagaaagtacagatgattcctcctcttctgagggcgatgaagaggaggatgactatgatgatgactttgaagacgattttattcctcttcctccagctaagcgcttgaggttaatagttggaaaagactctatagatattgacatttcttcaaggagaagagaagatcagtctttaaggcttaatgcctaagctcttggtcttaacttgacctgggataactactttaaagaaataaaaaattccagtcaattattcctcaactgaaagtttagtggcagcacttctattgtcccttcacttatcagcatactattgtagaaagtgtacagcatactgactcaattcttaagtctgatttgtgcaaatttttatcgtactttttaaatagccttcttacgtgcaattctgagttagaggtaaagccctgttgtaaaataaaggctcaagcaaaattgtacagtgatagcaactttccacacaggacgttgaaaacagtaatgtggctacacagtttttttaactgtaagagcatcagctggctctttaatatatgactaaacaataatttaaaacaaatcatagtagcagcatattaagggtttctagtatgctaatatcaccagcaatgatctttggctttttgatttatttgctagatgtttcccccttggagttttgtcagtttcacactgtttgctggcccaggtgtactgtttgtggcctttgttaatatcgcaaaccattggttgggagtcagattggtttcttaaaaaaaaaaaaaaaatgacatacgtgacagctcacttttcagttcattatatgtacgagggtagcagtgtgtgggatgaggttcgatacagcgtatttattgcttgtcatgtaaattaaaaaccttgtatttaactcttttcaatccttttagataaaattgttctttgcaagaatgattggtgcttattttttcaaaaatttgctgtgaacaacgtgatgacaacaagcaacatttatctaatgaactacagctatcttaatttggttcttcaagttttctgttgcacttgtaaaatgctacaaggaatattaaaaaaatctattcactttaacttataatagtttatgaaataaaaacatgagtcacagcttttgttctgtggtaacctat

SEQ ID NO: 21889 - protein, 885 aa, Homo sapiens; identical to SEQ ID NO: 21887

SEQ ID NO: 21890 - DNA, 2792 bp, Homo sapiens
cgcggggggcgcgacggcggcggcggcggccggttgggggcggggggctcggacgctgcggggactcatttttcccgtcagcggagggagcgagcggtgctgcggcccgcgccgccatcttggattttactctccatttttctctggaattatttttggtgattaattttctgggggggactgggacgcggggcccggcggcgcggccccgcatcgcagcggccgggcagcggggcctgggacgcgccccgaggaggagcggggcggcgcaggcggagagaacattgaaagtattctctaagctatttgaagagagtgactaaatgcacctgggtcaggctgtctgtgggtatgaagtggttgggagaatccaagatcatggtggtgaatggcaggagaaatggaggcaagttgtctaatgaccatcagcagaatcaatcaaaattacagcacacggggaaggacaccctgaaggctggcaaaaatgcagtcgagaggaggtcgaacagatgtaatggtaactcgggatttgaaggacagagtcgctatgtaccatcctctggaatgtccgccaaggaactctgtgaaaatgatgacctagcaaccagtttggttcttgatccctatttaggttttcaaacacacaaaatgaatactagcgcctttccttcgaggagctcaaggcatttttcaaaatctgacagtttttctcacaacaaccctgtgagatttaggcctattaaaggaaggcaggaagaactaaaggaagtaattgaacgttttaagaaagatgaacacttggagaaagccttcaaatgtttgacttcaggcgaatgggcacggcactattttctcaacaagaataaaatgcaggagaaattattcaaagaacatgtatttatttatttgcgaatgtttgcaactgacagtggatttgaaatattgccatgtaatagatactcatcagaacaaaatggagccaaaatagttgcaacaaaagagtggaaacgaaatgacaaaatagaattactggtgggttgtattgccgaactttcagaaattgaggagaacatgctacttagacatggagaaaacgacttcagtgtcatgtactccacaaggaaaaactgtgctcaactctggctgggtcctgctgcgtttataaaccatgattgcagacctaattgtaagtttgtgtcaactggtcgagatacagcatgtgtgaaggctctaagagacattgaacctggagaagaaatttcttgttattatggagatgggttctttggagaaaataatgagttctgcgagtgttacacttgcgaaagacggggcactggtgcttttaaatccagagtgggactgcctgcgcctgctcctgttatcaatagcaaatatggactcagagaaacagataaacgtttaaataggcttaaaaagttaggtgacagcagcaaaaattcagacagtcaatctgtcagctctaacactgatgcagataccactcaggaaaaaaacaatgcaagtaagtaagggagatttgataagcatatcttttaaaagtattttcacacaatttgctttataaagtgtgcttcagtagttttaaacttttaaatactcagagagactgggacttgtgagctttggctgcacttcaaggctctagacgtgatttgagtagaggcacagtctgtatcccatctctaacttcagtaccgtcctctagactatttttcttgaataccttggtaactggatatgagttcttcatcatatgttccaaggtcatcatatgttttaaacattttcaaggtgttagagactgtgatgatgtcgctaagtcctgcaagaagacaaaaggactgagtagaattaaattagactctatacattccagtgcctagccagtttgttagaaaagatgatggacttggggaattcatagcttctggccttaaggcttccaccttttcattgcttgctgacctttttcaaaacgaactgactcagttcagcagaccaccagtaccagactcagaattgtgatagaggagcattttgaacagtgccgtattgtgacatgctgtattggctactccagaaagtaggagtaaagatggaaaggagaaagaagcaacctctgagattccagtggtgtgtgggggcaagatctgatggaaactgaaaaagagaacgaagactaaacaaagagaaaggaaagagaagaaaccctaaatgggcaaaggaaagcacatcctgtttgcggagctttgaaatattggaaccatttctaattgctcctgtttttctgggtaacaccagttttctgtagttgccactaaagcagtagactcttgagtctcacttgtctctgagagagacagaagttagaaagttttgacttggcgattccgaaagtatgcctttgttggcacttaaatgtccagtgagacttcttggcaccttagagccctctgagatactgattattttaggttcttctccctactttcagatgttttcagcccaacactgggtgctctcttccactacagagaatcctgaagaaaagggaaggtgtttcccatgatggtgaatgtcactgccatgaattcctgaatctacctgctgctgggagtcagagtccaagcataacccgtgtagcataaaagcagcgctgtagccctattccagtctttttcgttaatgtccagagtgaacaacaagagttagtcaatcattaactgttgactgttgattctcataataaatgcagcataacgaccatt

SEQ ID NO: 21891 - protein, 393 aa, Homo sapiens
MKWLGESKIMVVNGRRNGGKLSNDHQQNQSKLQHTGKDTLKAGKNAVERRSNRCNGNSGFEGQSRYVPSSGMSAKELCENDDLATSLVLDPYLGFQTHKMNTSAFPSRSSRHFSKSDSFSHNNPVRFRPIKGRQEELKEVIERFKKDEHLEKAFKCLTSGEWARHYFLNKNKMQEKLFKEHVFIYLRMFATDSGFEILPCNRYSSEQNGAKIVATKEWKRNDKIELLVGCIAELSEIEENMLLRHGENDFSVMYSTRKNCAQLWLGPAAFINHDCRPNCKFVSTGRDTACVKALRDIEPGEEISCYYGDGFFGENNEFCECYTCERRGTGAFKSRVGLPAPAPVINSKYGLRETDKRLNRLKKLGDSSKNSDSQSVSSNTDADTTQEKNNASK

SEQ ID NO: 21892 - DNA, 824 bp, Homo sapiens
gaaaatttaaagcaaaggccacgcacgtgtgactcacgcctataatcccagcactttgggaggctgaggcaggtggatcacctgaggtcaggagttcgagaccagcctggccaacatggcaaaaccccgtctctactaaaaatacaaaaattagccagatgtggtggtgcgcgcctataattccagctactcaggaggctgaagcaggagaatcgcttgcacccaggaggcaggggttgcagtgagccaagatcgcaccactgcactccagcttgggtgacacagcaagactgtgtctcaaaaaaaaaaaaaaaattctaataacaaaaagctcctataagcttatagggaaaagacatagtcaaataggaaaaaaggtaaaggaaaaagagatgcagagatgcttcacaggaaaaaaatggccataaatgagattaaaacaagattaggtattcattttcactcatcactttggcaaaaagtaaaatttttttagacggagtcttgctctgtgtaagtttcgatctcaactcactgcaaccttcaccttccaggctcacgcctgtaaatccagcactttgggagacccagctgggaagatcccttgagcccagcagttggagaccagcctgggcaacatagtgagaccccatctctacaaaaaaaaatttaaaaattagctggtggtggtgctacacgcttatggtcccagatactcaggatgctgaggtgggacgacttcttgagcctaagaggttgaggctgcagtgagccatgatcgtgccactgcattccagcctgggcggtagagtgagaccctgtct

SEQ ID NO: 21893 - protein, 31 aa, Homo sapiens
MLHRKKMAINEIKTRLGIHFHSSLWQKVKFF

SEQ ID NO: 21894 - DNA, 473 bp, Homo sapiens
cagctagtgtgaacgtgaagaattgagaaatatagtgatcacatcagtgtgtattcattctggtcagcaaactaggcatatcttaagttttttaggaaatcactgttggcctccttttgtgtatcatagtgcaaaacagttttaattagttgaattattatagatacacaagaatttagaaaatgcgtctgggcgtggtagctcacacctgtagtcccggcactttgggagtccaaggctgaggtgggtggatcatgaggtcaggagatcgagaccatcctggctaatacggtcaaaccccgcctctactaaaaatacaaaaaatcagctgggcgtggtggcaggtgcctgtagtcccaactactcgtgaggctgaggcgggagaatggtgtgaacccgggaggcagagcttgcagtgagccgagattgcgtcactgcactccagcctgggcgacagagcgagactccatctc

SEQ ID NO: 21895 - protein, 51 aa, Homo sapiens [sequence omitted]

SEQ ID NO: 21896 - DNA, 1267 bp, Homo sapiens
cctaacaaaatgtggaagggattagtcaagaggaatgcatctgtggaaacagttgataataaaacgtctgaggatgtaaccatggcagcagcttctcctgtcacattgaccaaagggacttcggcagcccacctcaactctatggaagtcacaacagaggacacaagcaggacagatgtgagtgaaccagcaacttcaggaggtgcagctgatggtgtgacctccattgctcccacggctgtggcctccagtacgactgcggcctccattacgactgcggcctccagtatgactgtggcctccagtgctcccacgactgcagcctccagtacaactgtggcctccattgctcccacgactgcagcctccagtatgactgcggcctccagcactcccatgacacttgcactccccgcgcccacgtccacttccacagggcggaccccgtccactaccgccactgggcatccatctctcagcacagccctcgcacaagtgccaaagagcagcgcgttgccaagaacagcaaccctggccacattggccacacgtgctcagactgtagcgaccacagcaaacacaagcagccccatgagcactcgtccaagtccttccaagcacatgcccagtgacaccgcggcaagccctgtaccccctatgcgtccccaagcacaaggtcccattagccaggtgtcagtggaccagcctgtggttaacacaacaaataaatccacacccatgccctcaaacacaaccccagagcccgcccccactgagcccctcacccaggccgtggtagacaaaactctccttctggtggtgctgttactcggggtgacccttttcatcacagtcttggttttgtttgccctgcaggcctatgagagctacaagaagaaggactacacccaggtggactacttaatcaacgggatgtatgcggactcagaaatgtgaggggggcgggggcctggcgggaggcctggccccttcctcgtcctttccttttgcctttgagaccaaaccaagtgcttccaaattcttttggtgcaattgaggagatatgccagatgcttaaacacatttaattgctgtcagattaattccatgatcactaaagagttgctgcttttttcatatttatttttgtaaatgattctgtgcccaggagcagctgggggttccacctcagggtggggcgggcaggaccccgtctccccaggtgtcggagcctgacctgaattaaagtactgactgctcgccacaa

SEQ ID NO: 21897 - protein, 315 aa, Homo sapiens
MWKGLVKRNASVETVDNKTSEDVTMAAASPVTLTKGTSAAHLNSMEVTTEDTSRTDVSEPATSGGAADGVTSIAPTAVASSTTAASITTAASSMTVASSAPTTAASSTTVASIAPTTAASSMTAASSTPMTLALPAPTSTSTGRTPSTTATGHPSLSTALAQVPKSSALPRTATLATLATRAQTVATTANTSSPMSTRPSPSKHMPSDTAASPVPPMRPQAQGPISQVSVDQPVVNTTNKSTPMPSNTTPEPAPTEPLTQAVVDKTLLLVVLLLGVTLFITVLVLFALQAYESYKKKDYTQVDYLINGMYADSEM

SEQ ID NO: 21898 - DNA, 588 bp, Homo sapiens
catttccaagaattcctgcagtgaatcctttcacaaagccaagcgttcttttatgatgtgaatacctgtgcagtttatctgctttgtaaacctgggtgtgcgttcagtgggcttttaatgacaaaactctccttctggtggtgctgttactcggggtgacccttttcatcacagtcttggttttgtttgccctgcaggcctatgagagctacaagaagaaggactacacccaggtggactacttaatcaacgggatgtatgcggactcagaaatgtgaggggggcgggggcctggcgggaggcctggccccttcctcgtcctttccttttgcctttgagaccaaaccaagtgcttccaaattcttttggtgcaattgaggagatatgccagatgcttaaacacatttaattgctgtcagattaattccatgatcactaaagagttgctgcttttttcatatttatttttgtaaatgattctgtgcccaggagcagctgggggttccacctcagggtggggcgggcaggaccccgtctccccaggtgtcggagcctgacctgaattaaagtactgactgctcgccacaa

SEQ ID NO: 21899 - protein, 39 aa, Homo sapiens
MRTQKCEGGGGLAGGLAPSSSFPFAFETKPSASKFFWCN

SEQ ID NO: 21900 - DNA, 2057 bp, Homo sapiens
tgggcggggcccgggcagggcgcgctgcccggagctgcctgggttgcgctgccggccacgtccccgcgccgggcctcaggctccttcctactgtccgagggccaccaggccgccgggggcctgctgcgcccggatgcgtctgttactagagtggagagtctaccttcgtctcacatgtgccacaaaggatggcatggcccgggagtgccccaccacgtggctttcaccccctgcaaagccagacttcgcccagcgacacagtgtcaagcccacagctctccaaggaggaagatggtccaggctgggagcatccccttagcagcagcctctgccatgcggcatccaacgatccacgtaagtgagaaagctgtgtgactgctggatgggcccacggtggccacaaagcatgctgagcccttgaaagcagcatctgcaaacccaggccaacgcgtcaggaaccgcagccctcccaggcaactttgtccctaacaaaatgtggaagggattagtcaagaggaatgcatctgtggaaacagttgataataaaacgtctgaggatgtaaccatggcagcagcttctcctgtcacattgaccaaagggacttcggcagcccacctcaactctatggaagtcacaacagaggacacaagcaggacagatgtgagtgaaccagcaacttcaggaggtgcagctgatggtgtgacctccattgctcccacggctgtggcctccagtacgactgcggcctccattacgactgcggcctccagtatgactgtggcctccagtgctcccacgactgcagcctccagtacaactgtggcctccattgctcccacgactgcagcctccagtatgactgcggcctccagcactcccatgacacttgcactccccgcgcccacgtccacttccacagggcggaccccgtccactaccgccactgggcatccatctctcagcacagccctcgcacaagtgccaaagagcagcgcgttgccaagaacagcaaccctggccacattggccacacgtgctcagactgtagcgaccacagcaaacacaagcagccccatgagcactcgtccaagtccttccaagcacatgcccagtgacaccgcggcaagccctgtaccccctatgcgtccccaagcacaaggtcccattagccaggtgtcagtggaccagcctgtggttaacacaacaaataaatccacacccatgccctcaaacacaaccccagagcccgcccccacccccacagtggtgaccaccaccaaggcacaagccagggagccaactgccagcccagtgccagtacctcacaccagcccaatccctgagatggaggccatgtcccccacgacacagccaagccccatgccatatacccagagggccgctgggccaggcacatcccaggcaccggagcaggtagagactgaagccacaccaggtactgattccactgggccaacacccaggagctcagggggcactaagatgccagccacggactcgtgccagcccagcacccaaggccagtacatggtggtcaccactgagcccctcacccaggccgtggtagacaaaactctccttctggtggtgctgttactcggggtgacccttttcatcacagtcttggttttgtttgccctgcaggcctatgagagctacaagaagaaggactacacccaggtggactacttaatcaacgggatgtatgcggactcagaaatgtgaggggggcgggggcctggcgggaggcctggccccttcctcgtcctttccttttgcctttgagaccaaaccaagtgcttccaaattcttttggtgcaattgaggagatatgccagatgcttaaacacatttaattgctgtcagattaattccatgatcactaaagagttgctgcttttttcatatttatttttgtaaatgattctgtgcccaggagcagctgggggttccacctcagggtggggcgggcaggaccccgtctccccaggtgtcggagcctgacctgaattaaagtactgactgctcgccacaa

SEQ ID NO: 21901 - protein, 66 aa, Homo sapiens
MCHKGWHGPGVPHHVAFTPCKARLRPATQCQAHSSPRRKMVQAGSIPLAAASAMRHPTIHVSEKAV

SEQ ID NO: 21902 - DNA, 2098 bp, Homo sapiens
ccggcgtttgggcggggcccgggcagggcgcgctgcccggagctgcctgggttgcgctgccggccacgtccccgcgccgggcctcaggctccttcctactgtccgagggccaccaggccgccgggggcctgctgcgcccggatgcgtctgttactagagtggagagtctaccttcgtctcacatgtgccacaaaggatggcatggcccgggagtgccccaccacgtggctttcaccccctgcaaagccagacttcgcccagcgacacagtgtcaagcccacagctctccaaggaggaagatggtccaggctgggagcatccccttagcagcagcctctgatcccttggccaagcaggagggaaccattagcagcctgaggagctggctggctgggagcctcggggaccgcccagccttgctcccagctcacccacaagatgtggacagctcttgtgctcatttggattttctccttgtccttatctgaaagccatgcggcatccaacgatccacgcaactttgtccctaacaaaatgtggaagggattagtcaagaggaatgcatctgtggaaacagttgataataaaacgtctgaggatgtaaccatggcagcagcttctcctgtcacattgaccaaagggacttcggcagcccacctcaactctatggaagtcacaacagaggacacaagcaggacagatgtgagtgaaccagcaacttcaggaggtgcagctgatggtgtgacctccattgctcccacggctgtggcctccagtacgactgcggcctccattacgactgcggcctccagtatgactgtggcctccagtgctcccacgactgcagcctccagtacaactgtggcctccattgctcccacgactgcagcctccagtatgactgcggcctccagcactcccatgacacttgcactccccgcgcccacgtccacttccacagggcggaccccgtccactaccgccactgggcatccatctctcagcacagccctcgcacaagtgccaaagagcagcgcgttgccaagaacagcaaccctggccacattggccacacgtgctcagactgtagcgaccacagcaaacacaagcagccccatgagcactcgtccaagtccttccaagcacatgcccagtgacaccgcggcaagccctgtaccccctatgcgtccccaagcacaaggtcccattagccaggtgtcagtggaccagcctgtggttaacacaacaaataaatccacacccatgccctcaaacacaaccccagagcccgcccccacccccacagtggtgaccaccaccaaggcacaagccagggagccaactgccagcccagtgccagtacctcacaccagcccaatccctgagatggaggccatgtcccccacgacacagccaagccccatgccatatacccagagggccgctgggccaggcacatcccaggcaccggagcaggtagagactgaagccacaccaggtactgattccactgggccaacacccaggagctcagggggcactaagatgccagccacggactcgtgccagcccagcacccaaggccagtacatggtggtcaccactgagcccctcacccaggccgtggtagacaaaactctccttctggtggtgctgttactcggggtgacccttttcatcacagtcttggttttgtttgccctgcaggcctatgagagctacaagaagaaggactacacccaggtggactacttaatcaacgggatgtatgcggactcagaaatgtgaggggggcgggggcctggcgggaggcctggccccttcctcgtcctttccttttgcctttgagaccaaaccaagtgcttccaaattcttttggtgcaattgaggagatatgccagatgcttaaacacatttaattgctgtcagattaattccatgatcactaaagagttgctgcttttttcatatttatttttgtaaatgattctgtgcccaggagcagctgggggttccacctcagggtggggcgggcaggaccccgtctccccaggtgtcggagcctgacctgaattaaagtactgactgctcgccacaa

SEQ ID NO: 21903 - protein, 449 aa, Homo sapiens; identical to SEQ ID NO: 2843

SEQ ID NO: 21904 - DNA, 1458 bp, Homo sapiens
gcaactttgtccctaacaaaatgtggaagggattagtcaagaggaatgcatctgtggaaacagttgataataaaacgtctgaggatgtaaccatggcagcagcttctcctgtcacattgaccaaagggacttcggcagcccacctcaactctatggaagtcacaacagaggacacaagcaggacagatgtgagtgaaccagcaacttcaggaggtgcagctgatggtgtgacctccattgctcccacggctgtggcctccagtacgactgcggcctccattacgactgcggcctccagtatgactgtggcctccagtgctcccacgactgcagcctccagtacaactgtggcctccattgctcccacgactgcagcctccagtatgactgcggcctccagcactcccatgacacttgcactccccgcgcccacgtccacttccacagggcggaccccgtccactaccgccactgggcatccatctctcagcacagccctcgcacaagtgccaaagagcagcgcgttgccaagaacagcaaccctggccacattggccacacgtgctcagactgtagcgaccacagcaaacacaagcagccccatgagcactcgtccaagtccttccaagcacatgcccagtgacaccgcggcaagccctgtaccccctatgcgtccccaagcacaaggtcccattagccaggtgtcagtggaccagcctgtggttaacacaacaaataaatccacacccatgccctcaaacacaaccccagagcccgcccccacccccacagtggtgaccaccaccaaggcacaagccagggagccaactgccagcccagtgccagtacctcacaccagcccaatccctgagatggaggccatgtcccccacgacacagccaagccccatgccatatacccagagggccgctgggccaggcacatcccaggcaccggagcaggtagagactgaagccacaccaggtactgattccactgggccaacacccaggagctcagggggcactaagatgccagccacggactcgtgccagcccagcacccaaggcctatgagagctacaagaagaaggactacacccaggtggactacttaatcaacgggatgtatgcggactcagaaatgtgaggggggcgggggcctggcgggaggcctggccccttcctcgtcctttccttttgcctttgagaccaaaccaagtgcttccaaattcttttggtgcaattgaggagatatgccagatgcttaaacacatttaattgctgtcagattaattccatgatcactaaagagttgctgcttttttcatatttatttttgtaaatgattctgtgcccaggagcagctgggggttccacctcagggtggggcgggcaggaccccgtctccccaggtgtcggagcctgacctgaattaaagtactgactgctcgccaca

SEQ ID NO: 21905 - protein, 351 aa, Homo sapiens
MWKGLVKRNASVETVDNKTSEDVTMAAASPVTLTKGTSAAHLNSMEVTTEDTSRTDVSEPATSGGAADGVTSIAPTAVASSTTAASITTAASSMTVASSAPTTAASSTTVASIAPTTAASSMTAASSTPMTLALPAPTSTSTGRTPSTTATGHPSLSTALAQVPKSSALPRTATLATLATRAQTVATTANTSSPMSTRPSPSKHMPSDTAASPVPPMRPQAQGPISQVSVDQPVVNTTNKSTPMPSNTTPEPAPTPTVVTTTKAQAREPTASPVPVPHTSPIPEMEAMSPTTQPSPMPYTQRAAGPGTSQAPEQVETEATPGTDSTGPTPRSSGGTKMPATDSCQPSTQGL

SEQ ID NO: 21906 - DNA, 1044 bp, Homo sapiens
caaatagtgaaggtctgaagccttcaatgggcagggggttcatagagggcaaaggagttttaaaatcaaattgacaagggctttttcaatgagctgcatgccaacagtgggaagagagatggggaggaagcatgttcgcacatcacctcccccgactctggctgggctgaggagggggccccacaggcctgggtggaagccgatccctgagcaatccccctgtgcaggattgaacatgattgtctctctttttctcctttttctgactttaaggcaactttgtccctaacaaaatgtggaagggattagtcaagaggaatgcatctgtggaaacagttgataataaaacgtctgaggatgtaaccatggcagcagcttctcctgtcacattgaccaaagggacttcggcagcccacctcaactctatggaagtcacaacagaggacacaagcaggacagatgtgagtgaaccagcaacttcaggaggtgcagctgatggtgtgacctccattgctcccacggctgtggcctccagtacgactgcggcctccattacgactgcggcctccagtatgactgtggcctccagtgctcccacgactgcagcctccagtacaactgtggcctccattgctcccacgactgcagcctccagcctatgagagctacaagaagaaggactacacccaggtggactacttaatcaacgggatgtatgcggactcagaaatgtgaggggggcgggggcctggcgggaggcctggccccttcctcgtcctttccttttgcctttgagaccaaaccaagtgcttccaaattcttttggtgcaattgaggagatatgccagatgcttaaacacatttaattgctgtcagattaattccatgatcactaaagagttgctgcttttttcatatttatttttgtaaatgattctgtgcccaggagcagctgggggttccacctcagggtggggcgggcaggaccccgtctccccaggtgtcggagcctgacctgaattaaagtactgactgctcgccaca

SEQ ID NO: 21907 - protein, 122 aa, Homo sapiens
MWKGLVKRNASVETVDNKTSEDVTMAAASPVTLTKGTSAAHLNSMEVTTEDTSRTDVSEPATSGGAADGVTSIAPTAVASSTTAASITTAASSMTVASSAPTTAASSTTVASIAPTTAASSL

SEQ ID NO: 21908 - DNA, 997 bp, Homo sapiens
gcggcggatggggcacgcacagagtgcaagacgctgagcaatgcagatgcgtctgttactagagtggagagtctaccttcgtctcacatgtgccacaaaggatggcatggcccgggagtgccccaccacgtggctttcaccccctgcaaagccagacttcgcccagcgacacagtgtcaagcccacagctctccaaggaggaagatggtccaggctgggagcatccccttagcagcagcctctgatcccttggccaagcaggagggaaccattagcagcctgaggagctggctggctgggagcctcggggaccgcccagccttgctcccagctcacccacaagatgtggacagctcttgtgctcatttggattttctccttgtccttatctgaaagccatgcggcatccaacgatccacgcaactttgtccctaacaaaatgtggaagggattagtcaagaggaatgcatctgtggaaacagttgataataaaacgtctgaggatgtaaccatggcagcagcttctcctgtcacattgaccaaagggacttcggcagcccacctcaactctatggaagtcacaacagaggacacaagcaggacagatgcctatgagagctacaagaagaaggactacacccaggtggactacttaatcaacgggatgtatgcggactcagaaatgtgaggggggcgggggcctggcgggaggcctggccccttcctcgtcctttccttttgcctttgagaccaaaccaagtgcttccaaattcttttggtgcaattgaggagatatgccagatgcttaaacacatttaattgctgtcagattaattccatgatcactaaagagttgctgcttttttcatatttatttttgtaaatgattctgtgcccaggagcagctgggggttccacctcagggtggggcgggcaggaccccgtctccccaggtgtcggagcctgacctgaattaaagtactgactgctcgccaca

SEQ ID NO: 21909 - protein, 114 aa, Homo sapiens
MWTALVLIWIFSLSLSESHAASNDPRNFVPNKMWKGLVKRNASVETVDNKTSEDVTMAAASPVTLTKGTSAAHLNSMEVTTEDTSRTDAYESYKKKDYTQVDYLINGMYADSEM

SEQ ID NO: 21910 - DNA, 1092 bp, Homo sapiens
ccggcgtttgggcggggcccgggcagggcgcgctgcccggagctgcctgggttgcgctgccggccacgtccccgcgccgggcctcaggctccttcctactgtccgagggccaccaggccgccgggggcctgctgcgcccggatgcgtctgttactagagtggagagtctaccttcgtctcacatgtgccacaaaggatggcatggcccgggagtgccccaccacgtggctttcaccccctgcaaagccagacttcgcccagcgacacagtgtcaagcccacagctctccaaggaggaagatggtccaggctgggagcatccccttagcagcagcctctgatcccttggccaagcaggagggaaccattagcagcctgaggagctggctggctgggagcctcggggaccgcccagccttgctcccagctcacccacaagatgtggacagctcttgtgctcatttggattttctccttgtccttatctgaaagccatgcggcatccaacgatccacgcaactttgtccctaacaaaatgtggaagggattagtcaagaggaatgcatctgtggaaacagttgataataaaacgtctgaggatgtaaccatggcagcagcttctcctgtcacattgaccaaagggacttcggcagcccacctcaactctatggaagtcacaacagaggacacaagcaggacagatgcctatgagagctacaagaagaaggactacacccaggtggactacttaatcaacgggatgtatgcggactcagaaatgtgaggggggcgggggcctggcgggaggcctggccccttcctcgtcctttccttttgcctttgagaccaaaccaagtgcttccaaattcttttggtgcaattgaggagatatgccagatgcttaaacacatttaattgctgtcagattaattccatgatcactaaagagttgctgcttttttcatatttatttttgtaaatgattctgtgcccaggagcagctgggggttccacctcagggtggggcgggcaggaccccgtctccccaggtgtcggagcctgacctgaattaaagtactgactgctcgccaca

SEQ ID NO: 21911 - protein, 114 aa, Homo sapiens; identical to SEQ ID NO: 21909

SEQ ID NO: 21912 - DNA, 1138 bp, Homo sapiens
cctaacaaaatgtggaagggattagtcaagaggaatgcatctgtggaaacagttgataataaaacgtctgaggatgtaaccatggcagcagcttctcctgtcacattgaccaaagggacttcggcagcccacctcaactctatggaagtcacaacagaggacacaagcaggacagatgtgagtgaaccagcaacttcaggaggtgcagctgatggtgtgacctccattgctcccacggctgtggcctccagtacgactgcggcctccattacgactgcggcctccagtatgactgtggcctccagtgctcccacgactgcagcctccagtacaactgtggcctccattgctcccacgactgcagcctccagtatgactgcggcctccagcactcccatgacacttgcactccccgcgcccacgtccacttccacagggcggaccccgtccactaccgccactgggcatccatctctcagcacagccctcgcacaagtgccaaagagcagcgcgttgccaagaacagcaaccctggccacattggccacacgtgctcagactgtagcgaccacagcaaacacaagcagccccatgagcactcgtccaagtccttccaagcacatgcccagtgacaccgcggcaagccctgtaccccctatgcgtccccaagcacaaggtcccattagccaggtgtcagtggaccagcctgtggttaacacaacaaataaatccacacccatgccctcaaacacaaccccagagcccgcccccactgagcccctcacccaggccgtggtagacaaaactctccttctggtggtgctgttactcggggtgacccttttcatcacagtcttggttttgtttgccctgcaggcctatgagagctacaagaagaaggactacacccaggtggactacttaatcaacgggatgtatgcggactcagaaatgtgaggggggcgggggcctggcgggaggcctggccccttcctcgtcctttccttttgcctttgagaccaaaccaagtgcttccaaattcttttggtgcaattgaggagatatgccagatgcttaaacacatttaattgctgtcagattaattccatgatcactaaagagttgctgcttttttcat

SEQ ID NO: 21913 - protein, 315 aa, Homo sapiens; identical to SEQ ID NO: 21897

SEQ ID NO: 21914 - DNA, 1330 bp, Homo sapiens
gcaactttgtccctaacaaaatgtggaagggattagtcaagaggaatgcatctgtggaaacagttgataataaaacgtctgaggatgtaaccatggcagcagcttctcctgtcacattgaccaaagggacttcggcagcccacctcaactctatggaagtcacaacagaggacacaagcaggacagatgtgagtgaaccagcaacttcaggaggtgcagctgatggtgtgacctccattgctcccacggctgtggcctccagtacgactgcggcctccattacgactgcggcctccagtatgactgtggcctccagtgctcccacgactgcagcctccagtacaactgtggcctccattgctcccacgactgcagcctccagtatgactgcggcctccagcactcccatgacacttgcactccccgcgcccacgtccacttccacagggcggaccccgtccactaccgccactgggcatccatctctcagcacagccctcgcacaagtgccaaagagcagcgcgttgccaagaacagcaaccctggccacattggccacacgtgctcagactgtagcgaccacagcaaacacaagcagccccatgagcactcgtccaagtccttccaagcacatgcccagtgacaccgcggcaagccctgtaccccctatgcgtccccaagcacaaggtcccattagccaggtgtcagtggaccagcctgtggttaacacaacaaataaatccacacccatgccctcaaacacaaccccagagcccgcccccacccccacagtggtgaccaccaccaaggcacaagccagggagccaactgccagcccagtgccagtacctcacaccagcccaatccctgagatggaggccatgtcccccacgacacagccaagccccatgccatatacccagagggccgctgggccaggcacatcccaggcaccggagcaggtagagactgaagccacaccaggtactgattccactgggccaacacccaggagctcagggggcactaagatgccagccacggactcgtgccagcccagcacccaaggcctatgagagctacaagaagaaggactacacccaggtggactacttaatcaacgggatgtatgcggactcagaaatgtgaggggggcgggggcctggcgggaggcctggccccttcctcgtcctttccttttgcctttgagaccaaaccaagtgcttccaaattcttttggtgcaattgaggagatatgccagatgcttaaacacatttaattgctgtcagattaattccatgatcactaaagagttgctgcttttttcat

SEQ ID NO: 21915 - protein, 351 aa, Homo sapiens; identical to SEQ ID NO: 21905

SEQ ID NO: 21916 - DNA, 916 bp, Homo sapiens
caaatagtgaaggtctgaagccttcaatgggcagggggttcatagagggcaaaggagttttaaaatcaaattgacaagggctttttcaatgagctgcatgccaacagtgggaagagagatggggaggaagcatgttcgcacatcacctcccccgactctggctgggctgaggagggggccccacaggcctgggtggaagccgatccctgagcaatccccctgtgcaggattgaacatgattgtctctctttttctcctttttctgactttaaggcaactttgtccctaacaaaatgtggaagggattagtcaagaggaatgcatctgtggaaacagttgataataaaacgtctgaggatgtaaccatggcagcagcttctcctgtcacattgaccaaagggacttcggcagcccacctcaactctatggaagtcacaacagaggacacaagcaggacagatgtgagtgaaccagcaacttcaggaggtgcagctgatggtgtgacctccattgctcccacggctgtggcctccagtacgactgcggcctccattacgactgcggcctccagtatgactgtggcctccagtgctcccacgactgcagcctccagtacaactgtggcctccattgctcccacgactgcagcctccagcctatgagagctacaagaagaaggactacacccaggtggactacttaatcaacgggatgtatgcggactcagaaatgtgaggggggcgggggcctggcgggaggcctggccccttcctcgtcctttccttttgcctttgagaccaaaccaagtgcttccaaattcttttggtgcaattgaggagatatgccagatgcttaaacacatttaattgctgtcagattaattccatgatcactaaagagttgctgcttttttcat

SEQ ID NO: 21917 - protein, 122 aa, Homo sapiens; identical to SEQ ID NO: 21907

SEQ ID NO: 21918 - DNA, 869 bp, Homo sapiens
gcggcggatggggcacgcacagagtgcaagacgctgagcaatgcagatgcgtctgttactagagtggagagtctaccttcgtctcacatgtgccacaaaggatggcatggcccgggagtgccccaccacgtggctttcaccccctgcaaagccagacttcgcccagcgacacagtgtcaagcccacagctctccaaggaggaagatggtccaggctgggagcatccccttagcagcagcctctgatcccttggccaagcaggagggaaccattagcagcctgaggagctggctggctgggagcctcggggaccgcccagccttgctcccagctcacccacaagatgtggacagctcttgtgctcatttggattttctccttgtccttatctgaaagccatgcggcatccaacgatccacgcaactttgtccctaacaaaatgtggaagggattagtcaagaggaatgcatctgtggaaacagttgataataaaacgtctgaggatgtaaccatggcagcagcttctcctgtcacattgaccaaagggacttcggcagcccacctcaactctatggaagtcacaacagaggacacaagcaggacagatgcctatgagagctacaagaagaaggactacacccaggtggactacttaatcaacgggatgtatgcggactcagaaatgtgaggggggcgggggcctggcgggaggcctggccccttcctcgtcctttccttttgcctttgagaccaaaccaagtgcttccaaattcttttggtgcaattgaggagatatgccagatgcttaaacacatttaattgctgtcagattaattccatgatcactaaagagttgctgcttttttcat

SEQ ID NO: 21919 - protein, 114 aa, Homo sapiens; identical to SEQ ID NO: 21909

SEQ ID NO: 21920 - DNA, 1928 bp, Homo sapiens
tgggcggggcccgggcagggcgcgctgcccggagctgcctgggttgcgctgccggccacgtccccgcgccgggcctcaggctccttcctactgtccgagggccaccaggccgccgggggcctgctgcgcccggatgcgtctgttactagagtggagagtctaccttcgtctcacatgtgccacaaaggatggcatggcccgggagtgccccaccacgtggctttcaccccctgcaaagccagacttcgcccagcgacacagtgtcaagcccacagctctccaaggaggaagatggtccaggctgggagcatccccttagcagcagcctctgccatgcggcatccaacgatccacgtaagtgagaaagctgtgtgactgctggatgggcccacggtggccacaaagcatgctgagcccttgaaagcagcatctgcaaacccaggccaacgcgtcaggaaccgcagccctcccaggcaactttgtccctaacaaaatgtggaagggattagtcaagaggaatgcatctgtggaaacagttgataataaaacgtctgaggatgtaaccatggcagcagcttctcctgtcacattgaccaaagggacttcggcagcccacctcaactctatggaagtcacaacagaggacacaagcaggacagatgtgagtgaaccagcaacttcaggaggtgcagctgatggtgtgacctccattgctcccacggctgtggcctccagtacgactgcggcctccattacgactgcggcctccagtatgactgtggcctccagtgctcccacgactgcagcctccagtacaactgtggcctccattgctcccacgactgcagcctccagtatgactgcggcctccagcactcccatgacacttgcactccccgcgcccacgtccacttccacagggcggaccccgtccactaccgccactgggcatccatctctcagcacagccctcgcacaagtgccaaagagcagcgcgttgccaagaacagcaaccctggccacattggccacacgtgctcagactgtagcgaccacagcaaacacaagcagccccatgagcactcgtccaagtccttccaagcacatgcccagtgacaccgcggcaagccctgtaccccctatgcgtccccaagcacaaggtcccattagccaggtgtcagtggaccagcctgtggttaacacaacaaataaatccacacccatgccctcaaacacaaccccagagcccgcccccacccccacagtggtgaccaccaccaaggcacaagccagggagccaactgccagcccagtgccagtacctcacaccagcccaatccctgagatggaggccatgtcccccacgacacagccaagccccatgccatatacccagagggccgctgggccaggcacatcccaggcaccggagcaggtagagactgaagccacaccaggtactgattccactgggccaacacccaggagctcagggggcactaagatgccagccacggactcgtgccagcccagcacccaaggccagtacatggtggtcaccactgagcccctcacccaggccgtggtagacaaaactctccttctggtggtgctgttactcggggtgacccttttcatcacagtcttggttttgtttgccctgcaggcctatgagagctacaagaagaaggactacacccaggtggactacttaatcaacgggatgtatgcggactcagaaatgtgaggggggcgggggcctggcgggaggcctggccccttcctcgtcctttccttttgcctttgagaccaaaccaagtgcttccaaattcttttggtgcaattgaggagatatgccagatgcttaaacacatttaattgctgtcagattaattccatgatcactaaagagttgctgcttttttcat

SEQ ID NO: 21921 - protein, 66 aa, Homo sapiens; identical to SEQ ID NO: 21901

SEQ ID NO: 21922 - DNA, 1969 bp, Homo sapiens
ccggcgtttgggcggggcccgggcagggcgcgctgcccggagctgcctgggttgcgctgccggccacgtccccgcgccgggcctcaggctccttcctactgtccgagggccaccaggccgccgggggcctgctgcgcccggatgcgtctgttactagagtggagagtctaccttcgtctcacatgtgccacaaaggatggcatggcccgggagtgccccaccacgtggctttcaccccctgcaaagccagacttcgcccagcgacacagtgtcaagcccacagctctccaaggaggaagatggtccaggctgggagcatccccttagcagcagcctctgatcccttggccaagcaggagggaaccattagcagcctgaggagctggctggctgggagcctcggggaccgcccagccttgctcccagctcacccacaagatgtggacagctcttgtgctcatttggattttctccttgtccttatctgaaagccatgcggcatccaacgatccacgcaactttgtccctaacaaaatgtggaagggattagtcaagaggaatgcatctgtggaaacagttgataataaaacgtctgaggatgtaaccatggcagcagcttctcctgtcacattgaccaaagggacttcggcagcccacctcaactctatggaagtcacaacagaggacacaagcaggacagatgtgagtgaaccagcaacttcaggaggtgcagctgatggtgtgacctccattgctcccacggctgtggcctccagtacgactgcggcctccattacgactgcggcctccagtatgactgtggcctccagtgctcccacgactgcagcctccagtacaactgtggcctccattgctcccacgactgcagcctccagtatgactgcggcctccagcactcccatgacacttgcactccccgcgcccacgtccacttccacagggcggaccccgtccactaccgccactgggcatccatctctcagcacagccctcgcacaagtgccaaagagcagcgcgttgccaagaacagcaaccctggccacattggccacacgtgctcagactgtagcgaccacagcaaacacaagcagccccatgagcactcgtccaagtccttccaagcacatgcccagtgacaccgcggcaagccctgtaccccctatgcgtccccaagcacaaggtcccattagccaggtgtcagtggaccagcctgtggttaacacaacaaataaatccacacccatgccctcaaacacaaccccagagcccgcccccacccccacagtggtgaccaccaccaaggcacaagccagggagccaactgccagcccagtgccagtacctcacaccagcccaatccctgagatggaggccatgtcccccacgacacagccaagccccatgccatatacccagagggccgctgggccaggcacatcccaggcaccggagcaggtagagactgaagccacaccaggtactgattccactgggccaacacccaggagctcagggggcactaagatgccagccacggactcgtgccagcccagcacccaaggccagtacatggtggtcaccactgagcccctcacccaggccgtggtagacaaaactctccttctggtggtgctgttactcggggtgacccttttcatcacagtcttggttttgtttgccctgcaggcctatgagagctacaagaagaaggactacacccaggtggactacttaatcaacgggatgtatgcggactcagaaatgtgaggggggcgggggcctggcgggaggcctggccccttcctcgtcctttccttttgcctttgagaccaaaccaagtgcttccaaattcttttggtgcaattgaggagatatgccagatgcttaaacacatttaattgctgtcagattaattccatgatcactaaagagttgctgcttttttcat

SEQ ID NO: 21923 - protein, 449 aa, Homo sapiens; identical to SEQ ID NO: 2843

SEQ ID NO: 21924 - DNA, 964 bp, Homo sapiens
ccggcgtttgggcggggcccgggcagggcgcgctgcccggagctgcctgggttgcgctgccggccacgtccccgcgccgggcctcaggctccttcctactgtccgagggccaccaggccgccgggggcctgctgcgcccggatgcgtctgttactagagtggagagtctaccttcgtctcacatgtgccacaaaggatggcatggcccgggagtgccccaccacgtggctttcaccccctgcaaagccagacttcgcccagcgacacagtgtcaagcccacagctctccaaggaggaagatggtccaggctgggagcatccccttagcagcagcctctgatcccttggccaagcaggagggaaccattagcagcctgaggagctggctggctgggagcctcggggaccgcccagccttgctcccagctcacccacaagatgtggacagctcttgtgctcatttggattttctccttgtccttatctgaaagccatgcggcatccaacgatccacgcaactttgtccctaacaaaatgtggaagggattagtcaagaggaatgcatctgtggaaacagttgataataaaacgtctgaggatgtaaccatggcagcagcttctcctgtcacattgaccaaagggacttcggcagcccacctcaactctatggaagtcacaacagaggacacaagcaggacagatgcctatgagagctacaagaagaaggactacacccaggtggactacttaatcaacgggatgtatgcggactcagaaatgtgaggggggcgggggcctggcgggaggcctggccccttcctcgtcctttccttttgcctttgagaccaaaccaagtgcttccaaattcttttggtgcaattgaggagatatgccagatgcttaaacacatttaattgctgtcagattaattccatgatcactaaagagttgctgcttttttcat

SEQ ID NO: 21925 - protein, 114 aa, Homo sapiens; identical to SEQ ID NO: 21909

SEQ ID NO: 21926 - DNA, 610 bp, Homo sapiens
ggcgcgctgcccggagctgcctgggttgcgctgccggccacgtccccgcgccgggcctcaggctccttcctactgtccgagggccaccaggccgccgggggcctgctgcgcccggatgcgtctgttactagagtggagagtctaccttcgtctcacatgtgccacaaaggatggcatggcccgggagtgccccaccacgtggctttcaccccctgcaaagccagacttcgcccagcgacacagtgtcaagcccacagctctccaaggaggaagatggtccaggctgggagcatccccttagcagcagcctctgggaggctgtgtcttactcatgcagggtggtggaggggcgcctcttagcagaagatgatgaaaggctgtcccctctcaggaaggagaaggtccttgtctgttccaaggcaaagaactggacaagaaggaggaggttcattcagtacattgagtctgatcctccctgctgtagctggagcacggtccctgaagctggctgaagtgctaaagcaggggctagcaaactgtggccgaatcccacctgctgcctgtttgtataaataaagttttattgggacacaaccatgcccaccattca

SEQ ID NO: 21927 - protein, 113 aa, Homo sapiens
MAWPGSAPPRGFHPLQSQTSPSDTVSSPQLSKEEDGPGWEHPLSSSLWEAVSYSCRVVEGRLLAEDDERLSPLRKEKVLVCSKAKNWTRRRRFIQYIESDPPCCSWSTVPEAG

SEQ ID NO: 21928 - DNA, 744 bp, Homo sapiens
cctcaggctccttcctactgtccgagggccaccaggccgccgggggcctgctgcgcccgggtaaggggctcgcactgccgtccgggtagctgctgtcagggctccctgactggcttgggactgagagacagaggttggggggcaggaggagggttggatgggggcacgaggggcagtgggagagtgagtggggctgagagaggcaggaggaacgggacaggaggagcggcggatggggcacgcacagagtgcaagacgctgagcaatgcagatgcgtctgttactagagtggagagtctaccttcgtctcacatgtgccacaaaggatggcatggcccgggagtgccccaccacgtggctttcaccccctgcaaagccagacttcgcccagcgacacagtgtcaagcccacagctctccaaggaggaagatggtccaggctgggagcatccccttagcagcagcctctgggaggctgtgtcttactcatgcagggtggtggaggggcgcctcttagcagaagatgatgaaaggctgtcccctctcaggaaggagaaggtccttgtctgttccaaggcaaagaactggacaagaaggaggaggttcattcagtacattgagtctgatcctccctgctgtagctggagcacggtccctgaagctggctgaagtgctaaagcaggggctagcaaactgtggccgaatcccacctgctgcctgtttgtataaataaagttttattggg

SEQ ID NO: 21929 - protein, 113 aa, Homo sapiens; identical to SEQ ID NO: 21927

SEQ ID NO: 21930 - DNA, 840 bp, Homo sapiens
gcgcgctgcccggagctgcctgggttgcgctgccggccacgtccccgcgccgggcctcaggctccttcctactgtccgagggccaccaggccgccgggggcctgctgcgcccggatgcgtctgttactagagtggagagtctaccttcgtctcacatgtgccacaaaggatggcatggcccgggagtgccccaccacgtggctttcaccccctgcaaagccagacttcgcccagcgacacagtgtcaagcccacagctctccaaggaggaagatggtccaggctgggagcatccccttagcagcagcctctgagatggggttccgccatgttgcccaggctggtctctaactcatgagctcagtccatccgcctacctcagcctctcaaagtgcggggattacatgcatgagtcattgcatctgatcaggaggccttatcttctgagtggactggggtggtggcccatgaacaggatggggatcacgcaatcccctgcaaccctcttcggcttcgtgacacaaatgcaagttacctcaagaggttctccctgaccttggtgatgccgtgggcactcacagaagcctcctctgtgctgcagggaggctgtgtcttactcatgcagggtggtggaggggcgcctcttagcagaagatgatgaaaggctgtcccctctcaggaaggagaaggtccttgtctgttccaaggcaaagaactggacaagaaggaggaggttcattcagtacattgagtctgatcctccctgctgtagctggagcacggtccctgaagctggctgaagtgctaaagcaggggctagcaaactgtggccgaatcccac

SEQ ID NO: 21931 - protein, 64 aa, Homo sapiens
MCHKGWHGPGVPHHVAFTPCKARLRPATQCQAHSSPRRKMVQAGSIPLAAASEMGFRHVAQAGL

SEQ ID NO: 21932 - DNA, 3786 bp, Homo sapiens
gcgctgccctgcctcgctgggcggcgcgcgcacacgcagacgcgcacacacacacacatacacacacgcacacaccccgcgcggttccacgcccctggccgcggcccgggcgctgcgctgctcgacgcggcgggcggcgggcggggaccgggggcgggggcggcggcggcggccgggagagcggaggaggcggagcagggagccgggagcgggctggcccgcgctcctcctgctggctggggattttccagcctgggcgctgacgccgcggacctccctgcgaccgtcgcggaccatgggcgacaaagggacccgagtgttcaagaaggccagtccaaatggaaagctcaccgtctacctgggaaagcgggactttgtggaccacatcgacctcgtggaccctgtggatggtgtggtcctggtggatcctgagtatctcaaagagcggagagtctatgtgacgctgacctgcgccttccgctatggccgggaggacctggatgtcctgggcctgacctttcgcaaggacctgtttgtggccaacgtacagtcgttcccaccggcccccgaggacaagaagcccctgacgcggctgcaggaacgcctcatcaagaagctgggcgagcacgcttaccctttcacctttgagatccctccaaaccttccatgttctgtgacactgcagccggggcccgaagacacggggaaggcttgcggtgtggactatgaagtcaaagccttctgcgcggagaatttggaggagaagatccacaagcggaattctgtgcgtctggtcatccggaaggttcagtatgccccagagaggcctggcccccagcccacagccgagaccaccaggcagttcctcatgtcggacaagcccttgcacctagaagcctctctggataaggagatctattaccatggagaacccatcagcgtcaacgtccacgtcaccaacaacaccaacaagacggtgaagaagatcaagatctcagtgcgccagtatgcagacatctgccttttcaacacagctcagtacaagtgccctgttgccatggaagaggctgatgacactgtggcacccagctcgacgttctgcaaggtctacacactgacccccttcctagccaataaccgagagaagcggggcctcgccttggacgggaagctcaagcacgaagacacgaacttggcctctagcaccctgttgagggaaggtgccaaccgtgagatcctggggatcattgtttcctacaaagtgaaagtgaagctggtggtgtctcggggcggcctgttgggagatcttgcatccagcgacgtggccgtggaactgcccttcaccctaatgcaccccaagcccaaagaggaacccccgcatcgggaagttccagagaacgagacgccagtagataccaatctcatagaacttgacacaaatgatgacgacattgtatttgaggactttgctcgccagagactgaaaggcatgaaggatgacaaggaggaagaggaggatggtaccggctctccacagctcaacaacagatagacgggccggccctgcctccacgtggctccggctccactctcgtgcactcggatgcttactcgtcttcttcctgttctggtttcttttcccctttgttcttccagtttctaccagggggccccgtgggcttccagatcacggtgatgaacctctggcctcaggattggccccacatcaccacgccaacaggaccacagcgcactggctccaccccatctctgccatctccactcccctccttttcatgctgtctcccagaaaagctgccagggctctggccttggaattggacttgagatggggagcagacaggggaggatggggaatgtgggacacggtgtggtgggcatgagggcttggaggggtggggatgagggctcaagacacgagagaagatgtccacggtcccaggtggttaacaaagttctggcagctaaaagatgaccgcgttgaaggccacctccttctggctgggaggggcagaactgtggacagattctcaatgcctttttgaagttctgacccaccaaagaccttctgccttcaccctcctccccacctgatgtccctctgtgtctgatagtgatgttggtgaaagttcgtagaccccaggagtagagaaaagcaactggactgactttcttaccagcagttacctagactgaggcaagctgtgtggactcacccaagtatatttcagtactgtcaggctgtgacatcttagctaccttgtatttcaagtgcatggccctgtctagagatatgcacagagagaaaagcagagggagggagggagggggtcttcagcaagcaccagcccccagcagagtgagctgaagctcctgaggagggttcccgaaggggggcgctcagagatgggggcagggggcggggagaggagagtctgccttatgtcccttccttgtggacttcacatggtcatgcaggaagtgaggatgggtgtccagcgggggccgaggccactagtatcctcctgcttccccctgccattctccagggctggactgaccctatggactgggagagagtgcctgaggccaccatgccacagtcaaagggggtcctatctcagaaggtggcagcatccactgagatatcctcacccgaagggaaggaggctgctgggtagcaaataagccccttcttttcttggtgagttgatgacctccaatagctcccagtgtcatgggtacccagtacgcattagctggtgttgggttgattgagacctggggcagttcctggggcaagaagccagatgggagatgagatagaaagtgttaggagttatcctctttgcctggcctttgagaataacttactgtgtgactttgggcaagttccttccccactctgggcctcagtttctcacttgggaaagcaaggagtttgaccagatgatcacaatgggccttcctagctctggccaccaagaatttgtgaacattagagctcctggtctggtgggtagagccagagctgctgactggtctctctgcctccagaggggatttattggacctcagaggtggcagggccctatggagcaccaactgccctcaaccccaccctgtgcccaagactgggaagggattgatgtcaggctgtggccataggtagcatgagttgcccaaggagggacagagcatatctttgctgaggcttggctgaggggcttatgatagggcttgcagtacctcacagccccctgtgggcacagacaccctgaggtttacccaggcaaatatattgattagcaggacaagggctctctcctcagtttctgctcccttccatctctctcccatacttgtctgaaaagggagacaaaaaatcttatacaagtggcatctcaatcctttccagtccagcacctcctggggcaggcagtgtgacttatttcctgtggtgaaatcacctgtttcacaagcctggcagcgcgacttctgagtctcatgaccactcaacccaagggacccctccccagaccagaaccaagtcagctgggggctgtcgtactaccctgtccagtcttgagggcctagttgcaggtcccccaggcatccagcccctcctagagcttgctgggcaggctgcacctcatctgggcaggcgcagagctgatgaaatgctggagcaatgcatggcaaacatatgccctccagtgtcttctgaaacctttggggctgacacaagatcctttagtgtttggg

SEQ ID NO: 21933 - protein, 418 aa, Homo sapiens; identical to SEQ ID NO: 5080

SEQ ID NO: 21934 - DNA, 3762 bp, Homo sapiens
gcgctgccctgcctcgctgggcggcgcgcgcacacgcagacgcgcacacacacacacatacacacacgcacacaccccgcgcggttccacgcccctggccgcggcccgggcgctgcgctgctcgacgcggcgggcggcgggcggggaccgggggcgggggcggcggcggcggccgggagagcggaggaggcggagcagggagccgggagcgggctggcccgcgctcctcctgctggctggggattttccagcctgggcgctgacgccgcggacctccctgcgaccgtcgcggaccatgggcgacaaagggacccgagtgttcaagaaggccagtccaaatggaaagctcaccgtctacctgggaaagcgggactttgtggaccacatcgacctcgtggaccctgtggatggtgtggtcctggtggatcctgagtatctcaaagagcggagagtctatgtgacgctgacctgcgccttccgctatggccgggaggacctggatgtcctgggcctgacctttcgcaaggacctgtttgtggccaacgtacagtcgttcccaccggcccccgaggacaagaagcccctgacgcggctgcaggaacgcctcatcaagaagctgggcgagcacgcttaccctttcacctttgagatccctccaaaccttccatgttctgtgacactgcagccggggcccgaagacacggggaaggcttgcggtgtggactatgaagtcaaagccttctgcgcggagaatttggaggagaagatccacaagcggaattctgtgcgtctggtcatccggaaggttcagtatgccccagagaggcctggcccccagcccacagccgagaccaccaggcagttcctcatgtcggacaagcccttgcacctagaagcctctctggataaggagatctattaccatggagaacccatcagcgtcaacgtccacgtcaccaacaacaccaacaagacggtgaagaagatcaagatctcagtgcgccagtatgcagacatctgccttttcaacacagctcagtacaagtgccctgttgccatggaagaggctgatgacactgtggcacccagctcgacgttctgcaaggtctacacactgacccccttcctagccaataaccgagagaagcggggcctcgccttggacgggaagctcaagcacgaagacacgaacttggcctctagcaccctgttgagggaaggtgccaaccgtgagatcctggggatcattgtttcctacaaagtgaaagtgaagctggtggtgtctcggggcggcgacgtggccgtggaactgcccttcaccctaatgcaccccaagcccaaagaggaacccccgcatcgggaagttccagagaacgagacgccagtagataccaatctcatagaacttgacacaaatgatgacgacattgtatttgaggactttgctcgccagagactgaaaggcatgaaggatgacaaggaggaagaggaggatggtaccggctctccacagctcaacaacagatagacgggccggccctgcctccacgtggctccggctccactctcgtgcactcggatgcttactcgtcttcttcctgttctggtttcttttcccctttgttcttccagtttctaccagggggccccgtgggcttccagatcacggtgatgaacctctggcctcaggattggccccacatcaccacgccaacaggaccacagcgcactggctccaccccatctctgccatctccactcccctccttttcatgctgtctcccagaaaagctgccagggctctggccttggaattggacttgagatggggagcagacaggggaggatggggaatgtgggacacggtgtggtgggcatgagggcttggaggggtggggatgagggctcaagacacgagagaagatgtccacggtcccaggtggttaacaaagttctggcagctaaaagatgaccgcgttgaaggccacctccttctggctgggaggggcagaactgtggacagattctcaatgcctttttgaagttctgacccaccaaagaccttctgccttcaccctcctccccacctgatgtccctctgtgtctgatagtgatgttggtgaaagttcgtagaccccaggagtagagaaaagcaactggactgactttcttaccagcagttacctagactgaggcaagctgtgtggactcacccaagtatatttcagtactgtcaggctgtgacatcttagctaccttgtatttcaagtgcatggccctgtctagagatatgcacagagagaaaagcagagggagggagggagggggtcttcagcaagcaccagcccccagcagagtgagctgaagctcctgaggagggttcccgaaggggggcgctcagagatgggggcagggggcggggagaggagagtctgccttatgtcccttccttgtggacttcacatggtcatgcaggaagtgaggatgggtgtccagcgggggccgaggccactagtatcctcctgcttccccctgccattctccagggctggactgaccctatggactgggagagagtgcctgaggccaccatgccacagtcaaagggggtcctatctcagaaggtggcagcatccactgagatatcctcacccgaagggaaggaggctgctgggtagcaaataagccccttcttttcttggtgagttgatgacctccaatagctcccagtgtcatgggtacccagtacgcattagctggtgttgggttgattgagacctggggcagttcctggggcaagaagccagatgggagatgagatagaaagtgttaggagttatcctctttgcctggcctttgagaataacttactgtgtgactttgggcaagttccttccccactctgggcctcagtttctcacttgggaaagcaaggagtttgaccagatgatcacaatgggccttcctagctctggccaccaagaatttgtgaacattagagctcctggtctggtgggtagagccagagctgctgactggtctctctgcctccagaggggatttattggacctcagaggtggcagggccctatggagcaccaactgccctcaaccccaccctgtgcccaagactgggaagggattgatgtcaggctgtggccataggtagcatgagttgcccaaggagggacagagcatatctttgctgaggcttggctgaggggcttatgatagggcttgcagtacctcacagccccctgtgggcacagacaccctgaggtttacccaggcaaatatattgattagcaggacaagggctctctcctcagtttctgctcccttccatctctctcccatacttgtctgaaaagggagacaaaaaatcttatacaagtggcatctcaatcctttccagtccagcacctcctggggcaggcagtgtgacttatttcctgtggtgaaatcacctgtttcacaagcctggcagcgcgacttctgagtctcatgaccactcaacccaagggacccctccccagaccagaaccaagtcagctgggggctgtcgtactaccctgtccagtcttgagggcctagttgcaggtcccccaggcatccagcccctcctagagcttgctgggcaggctgcacctcatctgggcaggcgcagagctgatgaaatgctggagcaatgcatggcaaacatatgccctccagtgtcttctgaaacctttggggctgacacaagatcctttagtgtttggg

SEQ ID NO: 21935 - protein, 410 aa, Homo sapiens; identical to SEQ ID NO: 5082

SEQ ID NO: 21936 - DNA, 3427 bp, Homo sapiens
gcgctgccctgcctcgctgggcggcgcgcgcacacgcagacgcgcacacacacacacatacacacacgcacacaccccgcgcggttccacgcccctggccgcggcccgggcgctgcgctgctcgacgcggcgggcggcgggcggggaccgggggcgggggcggcggcggcggccgggagagcggaggaggcggagcagggagccgggagcgggctggcccgcgctcctcctgctggctggggattttccagcctgggcgctgacgccgcggacctccctgcgaccgtcgcggaccatgggcgacaaagggacccgagtgttcaagaaggccagtccaaatggaaagctcaccgtctacctgggaaagcgggactttgtggaccacatcgacctcgtggaccctgtggatggtgtggtcctggtggatcctgagtatctcaaagagcggagagtctatgtgacgctgacctgcgccttccgctatggccgggaggacctggatgtcctgggcctgacctttcgcaaggacctgtttgtggccaacgtacagtcgttcccaccggcccccgaggacaagaagcccctgacgcggctgcaggaacgcctcatcaagaagctgggcgagcacgcttaccctttcacctttgagatccctccaaaccttccatgttctgtgacactgcagccggggcccgaagacacggggaaggcttgcggtgtggactatgaagtcaaagccttctgcgcggagaatttggaggagaagatccacaagcggaattctgtgcgtctggtcatccggaaggttcagtatgccccagagaggcctggcccccagcccacagccgagaccaccaggcagttcctcatgtcggacaagcccttgcacctagaagcctctctggataaggagatctattaccatggagaacccatcagcgtcaacgtccacgtcaccaacaacaccaacaagacggtgaagaagatcaagatctcagtgcgccagtatgcagacatctgccttttcaacacagctcagtacaagtgccctgttgccatggaagaggctgatgacactgtggcacccagctcgacgttctgcaaggtctacacactgacccccttcctagccaataaccgagagaagcggggcctcgccttggacgggaagctcaagcacgaagacacgaacttggcctctagcaccctgttgagggaaggtgccaaccgtgagatcctggggatcattgtttcctacaaagtgaaagtgaagctggtggtgtctcggggcggcctgttgggagatcttgcatccagcgacgtggccgtggaactgcccttcaccctaatgcaccccaagcccaaagaggaacccccgcatcgggaagttccagagaacgagacgccagtagataccaatctcatagaacttgacacaaatgatgacgacattgtatttgaggactttgctcgccagagactgaaaggcatgaaggatgacaaggaggaagaggaggatggtaccggctctccacagctcaacaacagatagacgggccggccctgcctccacgtggctccggctccactctcgtgcactcggatgcttactcgtcttcttcctgttctggtttcttttcccctttgttcttccagtttctaccagggggccccgtgggcttccagatcacggtgatgaacctctggcctcaggattggccccacatcaccacgccaacaggaccacagcgcactggctccaccccatctctgccatctccactcccctccttttcatgctgtctcccagaaaagctgccagggctctggccttggaattggacttgagatggggagcagacaggggaggatggggaatgtgggacacggtgtggtgggcatgagggcttggaggggtggggatgagggctcaagacacgagagaagatgtccacggtcccaggtggttaacaaagttctggcagctaaaagatgaccgcgttgaaggccacctccttctggctgggaggggcagaactgtggacagattctcaatgcctttttgaagttctgacccaccaaagaccttctgccttcaccctcctccccacctgatgtccctctgtgtctgatagtgatgttggtgaaagttcgtagaccccaggagtagagaaaagcaactggactgactttcttaccagcagttacctagactgaggcaagctgtgtggactcacccaagtatatttcagtactgtcaggctgtgacatcttagctaccttgtatttcaagtgcatggccctgtctagagatatgcacagagagaaaagcagagggagggagggagggggtcttcagcaagcaccagcccccagcagagtgagctgaagctcctgaggagggttcccgaaggggggcgctcagagatgggggcagggggcggggagaggagagtctgccttatgtcccttccttgtggacttcacatggtcatgcaggaagtgaggatgggtgtccagcgggggccgaggccactagtatcctcctgcttccccctgccattctccagggctggactgaccctatggactgggagagagtgcctgaggccaccatgccacagtcaaagggggtcctatctcagaaggtggcagcatccactgagatatcctcacccgaagggaaggaggctgctgggtagcaaataagccccttcttttcttggtgagttgatgacctccaatagctcccagtgtcatgggtacccagtacgcattagctggtgttgggttgattgagacctggggcagttcctggggcaagaagccagatgggagatgagatagaaagtgttaggagttatcctctttgcctggcctttgagaataacttactgtgtgactttgggcaagttccttccccactctgggcctcagtttctcacttgggaaagcaaggagtttgaccagatgatcacaatgggccttcctagctctggccaccaagaatttgtgaacattagagctcctggtctggtgggtagagccagagctgctgactggtctctctgcctccagaggggatttattggacctcagaggtggcagggccctatggagcaccaactgccctcaaccccaccctgtgcccaagactgggaagggattgatgtcaggctgtggccataggtagcatgagttgcccaaggagggacagagcatatctttgctgaggcttggctgaggggcttatgatagggcttgcagtacctcacagccccctgtgggcacagacaccctgaggtttacccaggcaaatatattgattagcaggacaagggctctctcctcagtttctgctcccttccatctctctcccatacttgtctgaaaagggagacaaaaaatcttatacaagtggcatctc

SEQ ID NO: 21937 - protein, 418 aa, Homo sapiens; identical to SEQ ID NO: 5080

SEQ ID NO: 21938 - DNA, 3403 bp, Homo sapiens
gcgctgccctgcctcgctgggcggcgcgcgcacacgcagacgcgcacacacacacacatacacacacgcacacaccccgcgcggttccacgcccctggccgcggcccgggcgctgcgctgctcgacgcggcgggcggcgggcggggaccgggggcgggggcggcggcggcggccgggagagcggaggaggcggagcagggagccgggagcgggctggcccgcgctcctcctgctggctggggattttccagcctgggcgctgacgccgcggacctccctgcgaccgtcgcggaccatgggcgacaaagggacccgagtgttcaagaaggccagtccaaatggaaagctcaccgtctacctgggaaagcgggactttgtggaccacatcgacctcgtggaccctgtggatggtgtggtcctggtggatcctgagtatctcaaagagcggagagtctatgtgacgctgacctgcgccttccgctatggccgggaggacctggatgtcctgggcctgacctttcgcaaggacctgtttgtggccaacgtacagtcgttcccaccggcccccgaggacaagaagcccctgacgcggctgcaggaacgcctcatcaagaagctgggcgagcacgcttaccctttcacctttgagatccctccaaaccttccatgttctgtgacactgcagccggggcccgaagacacggggaaggcttgcggtgtggactatgaagtcaaagccttctgcgcggagaatttggaggagaagatccacaagcggaattctgtgcgtctggtcatccggaaggttcagtatgccccagagaggcctggcccccagcccacagccgagaccaccaggcagttcctcatgtcggacaagcccttgcacctagaagcctctctggataaggagatctattaccatggagaacccatcagcgtcaacgtccacgtcaccaacaacaccaacaagacggtgaagaagatcaagatctcagtgcgccagtatgcagacatctgccttttcaacacagctcagtacaagtgccctgttgccatggaagaggctgatgacactgtggcacccagctcgacgttctgcaaggtctacacactgacccccttcctagccaataaccgagagaagcggggcctcgccttggacgggaagctcaagcacgaagacacgaacttggcctctagcaccctgttgagggaaggtgccaaccgtgagatcctggggatcattgtttcctacaaagtgaaagtgaagctggtggtgtctcggggcggcgacgtggccgtggaactgcccttcaccctaatgcaccccaagcccaaagaggaacccccgcatcgggaagttccagagaacgagacgccagtagataccaatctcatagaacttgacacaaatgatgacgacattgtatttgaggactttgctcgccagagactgaaaggcatgaaggatgacaaggaggaagaggaggatggtaccggctctccacagctcaacaacagatagacgggccggccctgcctccacgtggctccggctccactctcgtgcactcggatgcttactcgtcttcttcctgttctggtttcttttcccctttgttcttccagtttctaccagggggccccgtgggcttccagatcacggtgatgaacctctggcctcaggattggccccacatcaccacgccaacaggaccacagcgcactggctccaccccatctctgccatctccactcccctccttttcatgctgtctcccagaaaagctgccagggctctggccttggaattggacttgagatggggagcagacaggggaggatggggaatgtgggacacggtgtggtgggcatgagggcttggaggggtggggatgagggctcaagacacgagagaagatgtccacggtcccaggtggttaacaaagttctggcagctaaaagatgaccgcgttgaaggccacctccttctggctgggaggggcagaactgtggacagattctcaatgcctttttgaagttctgacccaccaaagaccttctgccttcaccctcctccccacctgatgtccctctgtgtctgatagtgatgttggtgaaagttcgtagaccccaggagtagagaaaagcaactggactgactttcttaccagcagttacctagactgaggcaagctgtgtggactcacccaagtatatttcagtactgtcaggctgtgacatcttagctaccttgtatttcaagtgcatggccctgtctagagatatgcacagagagaaaagcagagggagggagggagggggtcttcagcaagcaccagcccccagcagagtgagctgaagctcctgaggagggttcccgaaggggggcgctcagagatgggggcagggggcggggagaggagagtctgccttatgtcccttccttgtggacttcacatggtcatgcaggaagtgaggatgggtgtccagcgggggccgaggccactagtatcctcctgcttccccctgccattctccagggctggactgaccctatggactgggagagagtgcctgaggccaccatgccacagtcaaagggggtcctatctcagaaggtggcagcatccactgagatatcctcacccgaagggaaggaggctgctgggtagcaaataagccccttcttttcttggtgagttgatgacctccaatagctcccagtgtcatgggtacccagtacgcattagctggtgttgggttgattgagacctggggcagttcctggggcaagaagccagatgggagatgagatagaaagtgttaggagttatcctctttgcctggcctttgagaataacttactgtgtgactttgggcaagttccttccccactctgggcctcagtttctcacttgggaaagcaaggagtttgaccagatgatcacaatgggccttcctagctctggccaccaagaatttgtgaacattagagctcctggtctggtgggtagagccagagctgctgactggtctctctgcctccagaggggatttattggacctcagaggtggcagggccctatggagcaccaactgccctcaaccccaccctgtgcccaagactgggaagggattgatgtcaggctgtggccataggtagcatgagttgcccaaggagggacagagcatatctttgctgaggcttggctgaggggcttatgatagggcttgcagtacctcacagccccctgtgggcacagacaccctgaggtttacccaggcaaatatattgattagcaggacaagggctctctcctcagtttctgctcccttccatctctctcccatacttgtctgaaaagggagacaaaaaatcttatacaagtggcatctc

SEQ ID NO: 21939 - protein, 410 aa, Homo sapiens; identical to SEQ ID NO: 5082

SEQ ID NO: 21940 - DNA, 3334 bp, Homo sapiens
gcgctgccctgcctcgctgggcggcgcgcgcacacgcagacgcgcacacacacacacatacacacacgcacacaccccgcgcggttccacgcccctggccgcggcccgggcgctgcgctgctcgacgcggcgggcggcgggcggggaccgggggcgggggcggcggcggcggccgggagagcggaggaggcggagcagggagccgggagcgggctggcccgcgctcctcctgctggctggggattttccagcctgggcgctgacgccgcggacctccctgcgaccgtcgcggaccatgggcgacaaagggacccgagtgttcaagaaggccagtccaaatggaaagctcaccgtctacctgggaaagcgggactttgtggaccacatcgacctcgtggaccctgtggatggtgtggtcctggtggatcctgagtatctcaaagagcggagagtctatgtgacgctgacctgcgccttccgctatggccgggaggacctggatgtcctgggcctgacctttcgcaaggacctgtttgtggccaacgtacagtcgttcccaccggcccccgaggacaagaagcccctgacgcggctgcaggaacgcctcatcaagaagctgggcgagcacgcttaccctttcacctttgagatccctccaaaccttccatgttctgtgacactgcagccggggcccgaagacacggggaaggcttgcggtgtggactatgaagtcaaagccttctgcgcggagaatttggaggagaagatccacaagcggaattctgtgcgtctggtcatccggaaggttcagtatgccccagagaggcctggcccccagcccacagccgagaccaccaggcagttcctcatgtcggacaagcccttgcacctagaagcctctctggataaggagatctattaccatggagaacccatcagcgtcaacgtccacgtcaccaacaacaccaacaagacggtgaagaagatcaagatctcagtgcgccagtatgcagacatctgccttttcaacacagctcagtacaagtgccctgttgccatggaagaggctgatgacactgtggcacccagctcgacgttctgcaaggtctacacactgacccccttcctagccaataaccgagagaagcggggcctcgccttggacgggaagctcaagcacgaagacacgaacttggcctctagcaccctgttgagggaaggtgccaaccgtgagatcctggggatcattgtttcctacaaagtgaaagtgaagctggtggtgtctcggggcggcctgttgggagatcttgcatccagcgacgtggccgtggaactgcccttcaccctaatgcaccccaagcccaaagaggaacccccgcatcgggaagttccagagaacgagacgccagtagataccaatctcatagaacttgacacaaatgatgacgacattgtatttgaggactttgctcgccagagactgaaaggcatgaaggatgacaaggaggaagaggaggatggtaccggctctccacagctcaacaacagatagacgggccggccctgcctccacgtggctccggctccactctcgtgcactcggatgcttactcgtcttcttcctgttctggtttcttttcccctttgttcttccagtttctaccagggggccccgtgggcttccagatcacggtgatgaacctctggcctcaggattggccccacatcaccacgccaacaggaccacagcgcactggctccaccccatctctgccatctccactcccctccttttcatgctgtctcccagaaaagctgccagggctctggccttggaattggacttgagatggggagcagacaggggaggatggggaatgtgggacacggtgtggtgggcatgagggcttggaggggtggggatgagggctcaagacacgagagaagatgtccacggtcccaggtggttaacaaagttctggcagctaaaagatgaccgcgttgaaggccacctccttctggctgggaggggcagaactgtggacagattctcaatgcctttttgaagttctgacccaccaaagaccttctgccttcaccctcctccccacctgatgtccctctgtgtctgatagtgatgttggtgaaagttcgtagaccccaggagtagagaaaagcaactggactgactttcttaccagcagttacctagactgaggcaagctgtgtggactcacccaagtatatttcagtactgtcaggctgtgacatcttagctaccttgtatttcaagtgcatggccctgtctagagatatgcacagagagaaaagcagagggagggagggagggggtcttcagcaagcaccagcccccagcagagtgagctgaagctcctgaggagggttcccgaaggggggcgctcagagatgggggcagggggcggggagaggagagtctgccttatgtcccttccttgtggacttcacatggtcatgcaggaagtgaggatgggtgtccagcgggggccgaggccactagtatcctcctgcttccccctgccattctccagggctggactgaccctatggactgggagagagtgcctgaggccaccatgccacagtcaaagggggtcctatctcagaaggtggcagcatccactgagatatcctcacccgaagggaaggaggctgctgggtagcaaataagccccttcttttcttggtgagttgatgacctccaatagctcccagtgtcatgggtacccagtacgcattagctggtgttgggttgattgagacctggggcagttcctggggcaagaagccagatgggagatgagatagaaagtgttaggagttatcctctttgcctggcctttgagaataacttactgtgtgactttgggcaagttccttccccactctgggcctcagtttctcacttgggaaagcaaggagtttgaccagatgatcacaatgggccttcctagctctggccaccaagaatttgtgaacattagagctcctggtctggtgggtagagccagagctgctgactggtctctctgcctccagaggggatttattggacctcagaggtggcagggccctatggagcaccaactgccctcaaccccaccctgtgcccaagactgggaagggattgatgtcaggctgtggccataggtagcatgagttgcccaaggagggacagagcatatctttgctgaggcttggctgaggggcttatgatagggcttgcagtacctcacagccccctgtgggcacagacaccctgaggtttacccaggcaaatatattgattagcagg

SEQ ID NO: 21941 - protein, 418 aa, Homo sapiens; identical to SEQ ID NO: 5080

SEQ ID NO: 21942 - DNA, 3310 bp, Homo sapiens
gcgctgccctgcctcgctgggcggcgcgcgcacacgcagacgcgcacacacacacacatacacacacgcacacaccccgcgcggttccacgcccctggccgcggcccgggcgctgcgctgctcgacgcggcgggcggcgggcggggaccgggggcgggggcggcggcggcggccgggagagcggaggaggcggagcagggagccgggagcgggctggcccgcgctcctcctgctggctggggattttccagcctgggcgctgacgccgcggacctccctgcgaccgtcgcggaccatgggcgacaaagggacccgagtgttcaagaaggccagtccaaatggaaagctcaccgtctacctgggaaagcgggactttgtggaccacatcgacctcgtggaccctgtggatggtgtggtcctggtggatcctgagtatctcaaagagcggagagtctatgtgacgctgacctgcgccttccgctatggccgggaggacctggatgtcctgggcctgacctttcgcaaggacctgtttgtggccaacgtacagtcgttcccaccggcccccgaggacaagaagcccctgacgcggctgcaggaacgcctcatcaagaagctgggcgagcacgcttaccctttcacctttgagatccctccaaaccttccatgttctgtgacactgcagccggggcccgaagacacggggaaggcttgcggtgtggactatgaagtcaaagccttctgcgcggagaatttggaggagaagatccacaagcggaattctgtgcgtctggtcatccggaaggttcagtatgccccagagaggcctggcccccagcccacagccgagaccaccaggcagttcctcatgtcggacaagcccttgcacctagaagcctctctggataaggagatctattaccatggagaacccatcagcgtcaacgtccacgtcaccaacaacaccaacaagacggtgaagaagatcaagatctcagtgcgccagtatgcagacatctgccttttcaacacagctcagtacaagtgccctgttgccatggaagaggctgatgacactgtggcacccagctcgacgttctgcaaggtctacacactgacccccttcctagccaataaccgagagaagcggggcctcgccttggacgggaagctcaagcacgaagacacgaacttggcctctagcaccctgttgagggaaggtgccaaccgtgagatcctggggatcattgtttcctacaaagtgaaagtgaagctggtggtgtctcggggcggcgacgtggccgtggaactgcccttcaccctaatgcaccccaagcccaaagaggaacccccgcatcgggaagttccagagaacgagacgccagtagataccaatctcatagaacttgacacaaatgatgacgacattgtatttgaggactttgctcgccagagactgaaaggcatgaaggatgacaaggaggaagaggaggatggtaccggctctccacagctcaacaacagatagacgggccggccctgcctccacgtggctccggctccactctcgtgcactcggatgcttactcgtcttcttcctgttctggtttcttttcccctttgttcttccagtttctaccagggggccccgtgggcttccagatcacggtgatgaacctctggcctcaggattggccccacatcaccacgccaacaggaccacagcgcactggctccaccccatctctgccatctccactcccctccttttcatgctgtctcccagaaaagctgccagggctctggccttggaattggacttgagatggggagcagacaggggaggatggggaatgtgggacacggtgtggtgggcatgagggcttggaggggtggggatgagggctcaagacacgagagaagatgtccacggtcccaggtggttaacaaagttctggcagctaaaagatgaccgcgttgaaggccacctccttctggctgggaggggcagaactgtggacagattctcaatgcctttttgaagttctgacccaccaaagaccttctgccttcaccctcctccccacctgatgtccctctgtgtctgatagtgatgttggtgaaagttcgtagaccccaggagtagagaaaagcaactggactgactttcttaccagcagttacctagactgaggcaagctgtgtggactcacccaagtatatttcagtactgtcaggctgtgacatcttagctaccttgtatttcaagtgcatggccctgtctagagatatgcacagagagaaaagcagagggagggagggagggggtcttcagcaagcaccagcccccagcagagtgagctgaagctcctgaggagggttcccgaaggggggcgctcagagatgggggcagggggcggggagaggagagtctgccttatgtcccttccttgtggacttcacatggtcatgcaggaagtgaggatgggtgtccagcgggggccgaggccactagtatcctcctgcttccccctgccattctccagggctggactgaccctatggactgggagagagtgcctgaggccaccatgccacagtcaaagggggtcctatctcagaaggtggcagcatccactgagatatcctcacccgaagggaaggaggctgctgggtagcaaataagccccttcttttcttggtgagttgatgacctccaatagctcccagtgtcatgggtacccagtacgcattagctggtgttgggttgattgagacctggggcagttcctggggcaagaagccagatgggagatgagatagaaagtgttaggagttatcctctttgcctggcctttgagaataacttactgtgtgactttgggcaagttccttccccactctgggcctcagtttctcacttgggaaagcaaggagtttgaccagatgatcacaatgggccttcctagctctggccaccaagaatttgtgaacattagagctcctggtctggtgggtagagccagagctgctgactggtctctctgcctccagaggggatttattggacctcagaggtggcagggccctatggagcaccaactgccctcaaccccaccctgtgcccaagactgggaagggattgatgtcaggctgtggccataggtagcatgagttgcccaaggagggacagagcatatctttgctgaggcttggctgaggggcttatgatagggcttgcagtacctcacagccccctgtgggcacagacaccctgaggtttacccaggcaaatatattgattagcagg

SEQ ID NO: 21943 - protein, 410 aa, Homo sapiens; identical to SEQ ID NO: 5082

SEQ ID NO: 21944 - DNA, 2274 bp, Homo sapiens
gcgctgccctgcctcgctgggcggcgcgcgcacacgcagacgcgcacacacacacacatacacacacgcacacaccccgcgcggttccacgcccctggccgcggcccgggcgctgcgctgctcgacgcggcgggcggcgggcggggaccgggggcgggggcggcggcggcggccgggagagcggaggaggcggagcagggagccgggagcgggctggcccgcgctcctcctgctggctggggattttccagcctgggcgctgacgccgcggacctccctgcgaccgtcgcggaccatgggcgacaaagggacccgagtgttcaagaaggccagtccaaatggaaagctcaccgtctacctgggaaagcgggactttgtggaccacatcgacctcgtggaccctgtggatggtgtggtcctggtggatcctgagtatctcaaagagcggagagtctatgtgacgctgacctgcgccttccgctatggccgggaggacctggatgtcctgggcctgacctttcgcaaggacctgtttgtggccaacgtacagtcgttcccaccggcccccgaggacaagaagcccctgacgcggctgcaggaacgcctcatcaagaagctgggcgagcacgcttaccctttcacctttgagatccctccaaaccttccatgttctgtgacactgcagccggggcccgaagacacggggaaggcttgcggtgtggactatgaagtcaaagccttctgcgcggagaatttggaggagaagatccacaagcggaattctgtgcgtctggtcatccggaaggttcagtatgccccagagaggcctggcccccagcccacagccgagaccaccaggcagttcctcatgtcggacaagcccttgcacctagaagcctctctggataaggagatctattaccatggagaacccatcagcgtcaacgtccacgtcaccaacaacaccaacaagacggtgaagaagatcaagatctcagtgcgccagtatgcagacatctgccttttcaacacagctcagtacaagtgccctgttgccatggaagaggctgatgacactgtggcacccagctcgacgttctgcaaggtctacacactgacccccttcctagccaataaccgagagaagcggggcctcgccttggacgggaagctcaagcacgaagacacgaacttggcctctagcaccctgttgagggaaggtgccaaccgtgagatcctggggatcattgtttcctacaaagtgaaagtgaagctggtggtgtctcggggcggcctgttgggagatcttgcatccagcgacgtggccgtggaactgcccttcaccctaatgcaccccaagcccaaagaggaacccccgcatcgggaagttccagagaacgagacgccagtagataccaatctcatagaacttgacacaaatgatgacgacattgtatttgaggactttgctcgccagagactgaaaggcatgaaggatgacaaggaggaagaggaggatggtaccggctctccacagctcaacaacagatagacgggccggccctgcctccacgtggctccggctccactctcgtgcactcggatgcttactcgtcttcttcctgttctggtttcttttcccctttgttcttccagtttctaccagggggccccgtgggcttccagatcacggtgatgaacctctggcctcaggattggccccacatcaccacgccaacaggaccacagcgcactggctccaccccatctctgccatctccactcccctccttttcatgctgtctcccagaaaagctgccagggctctggccttggaattggacttgagatggggagcagacaggggaggatggggaatgtgggacacggtgtggtgggcatgagggcttggaggggtggggatgagggctcaagacacgagagaagatgtccacggtcccaggtggttaacaaagttctggcagctaaaagatgaccgcgttgaaggccacctccttctggctgggaggggcagaactgtggacagattctcaatgcctttttgaagttctgacccaccaaagaccttctgccttcaccctcctccccacctgatgtccctctgtgtctgatagtgatgttggtgaaagttcgtagaccccaggagtagagaaaagcaactggactgactttcttaccagcagttacctagactgaggcaagctgtgtggactcacccaagtatatttcagtactgtcaggctgtgacatctt

SEQ ID NO: 21945 - protein, 418 aa, Homo sapiens; identical to SEQ ID NO: 5080

SEQ ID NO: 21946 - DNA, 2250 bp, Homo sapiens
gcgctgccctgcctcgctgggcggcgcgcgcacacgcagacgcgcacacacacacacatacacacacgcacacaccccgcgcggttccacgcccctggccgcggcccgggcgctgcgctgctcgacgcggcgggcggcgggcggggaccgggggcgggggcggcggcggcggccgggagagcggaggaggcggagcagggagccgggagcgggctggcccgcgctcctcctgctggctggggattttccagcctgggcgctgacgccgcggacctccctgcgaccgtcgcggaccatgggcgacaaagggacccgagtgttcaagaaggccagtccaaatggaaagctcaccgtctacctgggaaagcgggactttgtggaccacatcgacctcgtggaccctgtggatggtgtggtcctggtggatcctgagtatctcaaagagcggagagtctatgtgacgctgacctgcgccttccgctatggccgggaggacctggatgtcctgggcctgacctttcgcaaggacctgtttgtggccaacgtacagtcgttcccaccggcccccgaggacaagaagcccctgacgcggctgcaggaacgcctcatcaagaagctgggcgagcacgcttaccctttcacctttgagatccctccaaaccttccatgttctgtgacactgcagccggggcccgaagacacggggaaggcttgcggtgtggactatgaagtcaaagccttctgcgcggagaatttggaggagaagatccacaagcggaattctgtgcgtctggtcatccggaaggttcagtatgccccagagaggcctggcccccagcccacagccgagaccaccaggcagttcctcatgtcggacaagcccttgcacctagaagcctctctggataaggagatctattaccatggagaacccatcagcgtcaacgtccacgtcaccaacaacaccaacaagacggtgaagaagatcaagatctcagtgcgccagtatgcagacatctgccttttcaacacagctcagtacaagtgccctgttgccatggaagaggctgatgacactgtggcacccagctcgacgttctgcaaggtctacacactgacccccttcctagccaataaccgagagaagcggggcctcgccttggacgggaagctcaagcacgaagacacgaacttggcctctagcaccctgttgagggaaggtgccaaccgtgagatcctggggatcattgtttcctacaaagtgaaagtgaagctggtggtgtctcggggcggcgacgtggccgtggaactgcccttcaccctaatgcaccccaagcccaaagaggaacccccgcatcgggaagttccagagaacgagacgccagtagataccaatctcatagaacttgacacaaatgatgacgacattgtatttgaggactttgctcgccagagactgaaaggcatgaaggatgacaaggaggaagaggaggatggtaccggctctccacagctcaacaacagatagacgggccggccctgcctccacgtggctccggctccactctcgtgcactcggatgcttactcgtcttcttcctgttctggtttcttttcccctttgttcttccagtttctaccagggggccccgtgggcttccagatcacggtgatgaacctctggcctcaggattggccccacatcaccacgccaacaggaccacagcgcactggctccaccccatctctgccatctccactcccctccttttcatgctgtctcccagaaaagctgccagggctctggccttggaattggacttgagatggggagcagacaggggaggatggggaatgtgggacacggtgtggtgggcatgagggcttggaggggtggggatgagggctcaagacacgagagaagatgtccacggtcccaggtggttaacaaagttctggcagctaaaagatgaccgcgttgaaggccacctccttctggctgggaggggcagaactgtggacagattctcaatgcctttttgaagttctgacccaccaaagaccttctgccttcaccctcctccccacctgatgtccctctgtgtctgatagtgatgttggtgaaagttcgtagaccccaggagtagagaaaagcaactggactgactttcttaccagcagttacctagactgaggcaagctgtgtggactcacccaagtatatttcagtactgtcaggctgtgacatctt

SEQ ID NO: 21947 - protein, 410 aa, Homo sapiens; identical to SEQ ID NO: 5082

SEQ ID NO: 21948 - DNA, 2178 bp, Homo sapiens
gcgctgccctgcctcgctgggcggcgcgcgcacacgcagacgcgcacacacacacacatacacacacgcacacaccccgcgcggttccacgcccctggccgcggcccgggcgctgcgctgctcgacgcggcgggcggcgggcggggaccgggggcgggggcggcggcggcggccgggagagcggaggaggcggagcagggagccgggagcgggctggcccgcgctcctcctgctggctggggattttccagcctgggcgctgacgccgcggacctccctgcgaccgtcgcggaccatgggcgacaaagggacccgagtgttcaagaaggccagtccaaatggaaagctcaccgtctacctgggaaagcgggactttgtggaccacatcgacctcgtggaccctgtggatggtgtggtcctggtggatcctgagtatctcaaagagcggagagtctatgtgacgctgacctgcgccttccgctatggccgggaggacctggatgtcctgggcctgacctttcgcaaggacctgtttgtggccaacgtacagtcgttcccaccggcccccgaggacaagaagcccctgacgcggctgcaggaacgcctcatcaagaagctgggcgagcacgcttaccctttcacctttgagatccctccaaaccttccatgttctgtgacactgcagccggggcccgaagacacggggaaggcttgcggtgtggactatgaagtcaaagccttctgcgcggagaatttggaggagaagatccacaagcggaattctgtgcgtctggtcatccggaaggttcagtatgccccagagaggcctggcccccagcccacagccgagaccaccaggcagttcctcatgtcggacaagcccttgcacctagaagcctctctggataaggagatctattaccatggagaacccatcagcgtcaacgtccacgtcaccaacaacaccaacaagacggtgaagaagatcaagatctcagtgcgccagtatgcagacatctgccttttcaacacagctcagtacaagtgccctgttgccatggaagaggctgatgacactgtggcacccagctcgacgttctgcaaggtctacacactgacccccttcctagccaataaccgagagaagcggggcctcgccttggacgggaagctcaagcacgaagacacgaacttggcctctagcaccctgttgagggaaggtgccaaccgtgagatcctggggatcattgtttcctacaaagtgaaagtgaagctggtggtgtctcggggcggcctgttgggagatcttgcatccagcgacgtggccgtggaactgcccttcaccctaatgcaccccaagcccaaagaggaacccccgcatcgggaagttccagagaacgagacgccagtagataccaatctcatagaacttgacacaaatgatgacgacattgtatttgaggactttgctcgccagagactgaaaggcatgaaggatgacaaggaggaagaggaggatggtaccggctctccacagctcaacaacagatagacgggccggccctgcctccacgtggctccggctccactctcgtgcactcggatgcttactcgtcttcttcctgttctggtttcttttcccctttgttcttccagtttctaccagggggccccgtgggcttccagatcacggtgatgaacctctggcctcaggattggccccacatcaccacgccaacaggaccacagcgcactggctccaccccatctctgccatctccactcccctccttttcatgctgtctcccagaaaagctgccagggctctggccttggaattggacttgagatggggagcagacaggggaggatggggaatgtgggacacggtgtggtgggcatgagggcttggaggggtggggatgagggctcaagacacgagagaagatgtccacggtcccaggtggttaacaaagttctggcagctaaaagatgaccgcgttgaaggccacctccttctggctgggaggggcagaactgtggacagattctcaatgcctttttgaagttctgacccaccaaagaccttctgccttcaccctcctccccacctgatgtccctctgtgtctgatagtgatgttggtgaaagttcgtagaccccaggagtagagaaaagc

SEQ ID NO: 21949 - protein, 418 aa, Homo sapiens; identical to SEQ ID NO: 5080

SEQ ID NO: 21950 - DNA, 2154 bp, Homo sapiens
gcgctgccctgcctcgctgggcggcgcgcgcacacgcagacgcgcacacacacacacatacacacacgcacacaccccgcgcggttccacgcccctggccgcggcccgggcgctgcgctgctcgacgcggcgggcggcgggcggggaccgggggcgggggcggcggcggcggccgggagagcggaggaggcggagcagggagccgggagcgggctggcccgcgctcctcctgctggctggggattttccagcctgggcgctgacgccgcggacctccctgcgaccgtcgcggaccatgggcgacaaagggacccgagtgttcaagaaggccagtccaaatggaaagctcaccgtctacctgggaaagcgggactttgtggaccacatcgacctcgtggaccctgtggatggtgtggtcctggtggatcctgagtatctcaaagagcggagagtctatgtgacgctgacctgcgccttccgctatggccgggaggacctggatgtcctgggcctgacctttcgcaaggacctgtttgtggccaacgtacagtcgttcccaccggcccccgaggacaagaagcccctgacgcggctgcaggaacgcctcatcaagaagctgggcgagcacgcttaccctttcacctttgagatccctccaaaccttccatgttctgtgacactgcagccggggcccgaagacacggggaaggcttgcggtgtggactatgaagtcaaagccttctgcgcggagaatttggaggagaagatccacaagcggaattctgtgcgtctggtcatccggaaggttcagtatgccccagagaggcctggcccccagcccacagccgagaccaccaggcagttcctcatgtcggacaagcccttgcacctagaagcctctctggataaggagatctattaccatggagaacccatcagcgtcaacgtccacgtcaccaacaacaccaacaagacggtgaagaagatcaagatctcagtgcgccagtatgcagacatctgccttttcaacacagctcagtacaagtgccctgttgccatggaagaggctgatgacactgtggcacccagctcgacgttctgcaaggtctacacactgacccccttcctagccaataaccgagagaagcggggcctcgccttggacgggaagctcaagcacgaagacacgaacttggcctctagcaccctgttgagggaaggtgccaaccgtgagatcctggggatcattgtttcctacaaagtgaaagtgaagctggtggtgtctcggggcggcgacgtggccgtggaactgcccttcaccctaatgcaccccaagcccaaagaggaacccccgcatcgggaagttccagagaacgagacgccagtagataccaatctcatagaacttgacacaaatgatgacgacattgtatttgaggactttgctcgccagagactgaaaggcatgaaggatgacaaggaggaagaggaggatggtaccggctctccacagctcaacaacagatagacgggccggccctgcctccacgtggctccggctccactctcgtgcactcggatgcttactcgtcttcttcctgttctggtttcttttcccctttgttcttccagtttctaccagggggccccgtgggcttccagatcacggtgatgaacctctggcctcaggattggccccacatcaccacgccaacaggaccacagcgcactggctccaccccatctctgccatctccactcccctccttttcatgctgtctcccagaaaagctgccagggctctggccttggaattggacttgagatggggagcagacaggggaggatggggaatgtgggacacggtgtggtgggcatgagggcttggaggggtggggatgagggctcaagacacgagagaagatgtccacggtcccaggtggttaacaaagttctggcagctaaaagatgaccgcgttgaaggccacctccttctggctgggaggggcagaactgtggacagattctcaatgcctttttgaagttctgacccaccaaagaccttctgccttcaccctcctccccacctgatgtccctctgtgtctgatagtgatgttggtgaaagttcgtagaccccaggagtagagaaaagc

SEQ ID NO: 21951 - protein, 410 aa, Homo sapiens; identical to SEQ ID NO: 5082

SEQ ID NO: 21952 - DNA, 1086 bp, Homo sapiens
atactcacttccgcccgcgagccacttcctttcctttcagcggagcgcggcggcaagatggcagtgcaaatatccaagaagaggaagtttgtcgctgatggcatcttcaaagctgaactgaatgagtttcttactcgggagctggctgaagatggctactctggagttgaggtgcgagttacaccaaccaggacagaaatcattatcttagccaccagaacacagaatgttcttggtgagaagggccggcggattcgggaactgactgctgtagttcagaagaggtttggctttccagagggcagtgtagagctttatgctgaaaaggtggccactagaggtctgtgtgccattgcccaggcagagtctctgcgttacaaactcctaggagggcttgctgtgcggagggcctgctatggtgtgctgcggttcatcatggagagtggggccaaaggctgcgaggttgtggtgtctgggaaactccgaggacagagggctaaatccatgaagtttgtggatggcctgatgatccacagcggagaccctgttaactactacgttgacactcccctgcctgaccacgtgagcattgtggaacccaaagatgagatactgcccaccacccccatctcagaacagaagggtgggaagccagagccgcctgccatgccccagccagtccccacagcataacagggtctccttggcagctgtattctggagtctggatgttgctctctaaagacctttaataaaattttgtacaaagacacaaggtctgactagactgttcagtattcagactgaggggcatgttggcctctggagcattacatatcttcttggttttaaccatacttgtggtatttgcaagggccagaacagtaagacccaagcagagccaaccagagaaataatatttgtgtgatagagaaggctgatagcaagcaaggcagcaccttgattcgttgtcctgtagttcaggattgtaggtttagaagagggatatgtttgagtttttcctatgcataaggcgatccacgttgcacatagaaagtgaatataaatggccattatattttgtgt

SEQ ID NO: 21953 - protein, 211 aa, Homo sapiens
MAVQISKKRKFVADGIFKAELNEFLTRELAEDGYSGVEVRVTPTRTEIIILATRTQNVLGEKGRRIRELTAVVQKRFGFPEGSVELYAEKVATRGLCAIAQAESLRYKLLGGLAVRRACYGVLRFIMESGAKGCEVVVSGKLRGQRAKSMKFVDGLMIHSGDPVNYYVDTPLPDHVSIVEPKDEILPTTPISEQKGGKPEPPAMPQPVPTA

SEQ ID NO: 21954 - DNA, 1994 bp, Homo sapiens
atactcacttccgcccgcgagccacttcctttcctttcagcggagcgcggcggcaagatggcagtgcaaatatccaagaagaggaagtttgtcgctgatggcatcttcaaagctgaactgaatgagtttcttactcgggagctggctgaagatggctactctggagttgaggtgcgagttacaccaaccaggacagaaatcattatcttagccaccagaacacagaatgttcttggtgagaagggccggcggattcgggaactgactgctgtagttcagaagaggtttggctttccagagggcagtgtagagctttatgctgaaaaggtggccactagaggtctgtgtgccattgcccaggcagagtctctgcgttacaaactcctaggagggcttgctgtgcggagggcctgctatggtgtgctgcggttcatcatggagagtggggccaaaggctgcgaggttgtggtgtctgggaaactccgaggacagagggctaaatccatgaagtttgtggatggcctgatgatccacagcggagaccctgttaactactacgttgacactcccctgcctgaccacgtgagcattgtggaacccaaagatgagatactgcccaccacccccatctcagaacagaagggtgggaagccagagccgcctgccatgccccagccagtccccacagcataacagggtctccttggcagctgtattctggagtctggatgttgctctctaaagacctttaataaaattttgtacaaagacacaaggtctgactagactgttcagtattcagactgaggggcatgttggcctctggagcattacatatcttcttggttttaaccatacttgtggtatttgcaagggccagaacagtaagacccaagcagagccaaccagagaaataatatttgtgtgatagagaaggctgatagcaagcaaggcagcaccttgattcgttgtcctgtagttcaggattgtaggtttagaagagggatatgtttgagtttttcctatgcataaggcgatccacgttgcacatagaaagtgaatataaatggccattatattttgtgtcatgctgtgctctaagtgttctttacatatgtactcgttaatcaacctctctaaagtgtaaaggaaatttgcttgcaccactgaaggcacataaggctcagaagtaaatttgcctaagcagtataaagctatcattagaatccacattcctaagttgtgttctcttaggggatcatggaaccagtcattggtactacaggctattatgttctggagaactgtgaagaacatttaaattgtctctgattttatctatcaatgttttgaagtattttctaccagtgtctgtacttcacaagaaattcggcactattttttcaggcaaaactagtgagggacaggttggcttgaaaatcatgagactgttgttaaatcagatgctggttgatcacagaggggacttccagggaaagctgttatcaggtggctgcttcctggtgatgcagcctggctgatgagataaccctggctccacagatggcttagcaggtgctgtgatgatttggttttcttctcaattagactgagctgcacatggtgtttatattgcttggcacatggtaagggcttaatatttgaggtaattatgtagggcgtacactgacaagtatctgacccccccttcctttttgactcataaattggtcatcttaaccatttaagtgtacacttctatagtgacagagttagccctctgtccaagggatttgcatctgtggattcaaccaactttgggtcaaaaataatcaaaaaggatggttgtgtgtgtattgaacatgtagacttatttttcttattttcaaaatactatattttcttgtcacttattttcttgtacactgcagttgtaacagctatgtagcatgtacattaggtattaaaagtaatccagtgaagattgaaagtct

SEQ ID NO: 21955 - protein, 211 aa, Homo sapiens; identical to SEQ ID NO: 21953

SEQ ID NO: 21956 - DNA, 1033 bp, Homo sapiens
tactcacttccgcccgcgagccacttcctttcctttcagcggagcgcggcggcaagatggcagtgcaaatatccaagaagaggaagtttgtcgctgatggcatcttcaaagctgaactgaatgagtttcttactcgggagctggctgaagatggctactctggagttgaggtgcgagttacaccaaccaggacagaaatcattatcttagccaccagaacacagaatgttcttggtgagaagggccggcggattcgggaactgactgctgtagttcagaagaggtttggctttccagagggcagtgtagagctttatgctgaaaaggtggccactagaggtctgtgtgccattgcccaggcagaggtgtgctgcggttcatcatggagagtggggccaaaggctgcgaggttgtggtgtctgggaaactccgaggacagagggctaaatccatgaagtttgtggatggcctgatgatccacagcggagaccctgttaactactacgttgacactcccctgcctgaccacgtgagcattgtggaacccaaagatgagatactgcccaccacccccatctcagaacagaagggtgggaagccagagccgcctgccatgccccagccagtccccacagcataacagggtctccttggcagctgtattctggagtctggatgttgctctctaaagacctttaataaaattttgtacaaagacacaaggtctgactagactgttcagtattcagactgaggggcatgttggcctctggagcattacatatcttcttggttttaaccatacttgtggtatttgcaagggccagaacagtaagacccaagcagagccaaccagagaaataatatttgtgtgatagagaaggctgatagcaagcaaggcagcaccttgattcgttgtcctgtagttcaggattgtaggtttagaagagggatatgtttgagtttttcctatgcataaggcgatccacgttgcacatagaaagtgaatataaatggccattatattttgtgt

SEQ ID NO: 21957 - protein, 132 aa, Homo sapiens
MAVQISKKRKFVADGIFKAELNEFLTRELAEDGYSGVEVRVTPTRTEIIILATRTQNVLGEKGRRIRELTAVVQKRFGFPEGSVELYAEKVATRGLCAIAQAEVCCGSSWRVGPKAARLWCLGNSEDRGLNP

SEQ ID NO: 21958 - DNA, 1941 bp, Homo sapiens
tactcacttccgcccgcgagccacttcctttcctttcagcggagcgcggcggcaagatggcagtgcaaatatccaagaagaggaagtttgtcgctgatggcatcttcaaagctgaactgaatgagtttcttactcgggagctggctgaagatggctactctggagttgaggtgcgagttacaccaaccaggacagaaatcattatcttagccaccagaacacagaatgttcttggtgagaagggccggcggattcgggaactgactgctgtagttcagaagaggtttggctttccagagggcagtgtagagctttatgctgaaaaggtggccactagaggtctgtgtgccattgcccaggcagaggtgtgctgcggttcatcatggagagtggggccaaaggctgcgaggttgtggtgtctgggaaactccgaggacagagggctaaatccatgaagtttgtggatggcctgatgatccacagcggagaccctgttaactactacgttgacactcccctgcctgaccacgtgagcattgtggaacccaaagatgagatactgcccaccacccccatctcagaacagaagggtgggaagccagagccgcctgccatgccccagccagtccccacagcataacagggtctccttggcagctgtattctggagtctggatgttgctctctaaagacctttaataaaattttgtacaaagacacaaggtctgactagactgttcagtattcagactgaggggcatgttggcctctggagcattacatatcttcttggttttaaccatacttgtggtatttgcaagggccagaacagtaagacccaagcagagccaaccagagaaataatatttgtgtgatagagaaggctgatagcaagcaaggcagcaccttgattcgttgtcctgtagttcaggattgtaggtttagaagagggatatgtttgagtttttcctatgcataaggcgatccacgttgcacatagaaagtgaatataaatggccattatattttgtgtcatgctgtgctctaagtgttctttacatatgtactcgttaatcaacctctctaaagtgtaaaggaaatttgcttgcaccactgaaggcacataaggctcagaagtaaatttgcctaagcagtataaagctatcattagaatccacattcctaagttgtgttctcttaggggatcatggaaccagtcattggtactacaggctattatgttctggagaactgtgaagaacatttaaattgtctctgattttatctatcaatgttttgaagtattttctaccagtgtctgtacttcacaagaaattcggcactattttttcaggcaaaactagtgagggacaggttggcttgaaaatcatgagactgttgttaaatcagatgctggttgatcacagaggggacttccagggaaagctgttatcaggtggctgcttcctggtgatgcagcctggctgatgagataaccctggctccacagatggcttagcaggtgctgtgatgatttggttttcttctcaattagactgagctgcacatggtgtttatattgcttggcacatggtaagggcttaatatttgaggtaattatgtagggcgtacactgacaagtatctgacccccccttcctttttgactcataaattggtcatcttaaccatttaagtgtacacttctatagtgacagagttagccctctgtccaagggatttgcatctgtggattcaaccaactttgggtcaaaaataatcaaaaaggatggttgtgtgtgtattgaacatgtagacttatttttcttattttcaaaatactatattttcttgtcacttattttcttgtacactgcagttgtaacagctatgtagcatgtacattaggtattaaaagtaatccagtgaagattgaaagtct

SEQ ID NO: 21959 - protein, 132 aa, Homo sapiens; identical to SEQ ID NO: 21957

SEQ ID NO: 21960 - DNA, 870 bp, Homo sapiens
ctcacttccgcccgcgagccacttcctttcctttcagcggagcgcggcggcaagatggcagtgcaaatatccaagaagaggaagtttgtcgctgatggcatcttcaaagctgaactgaatgagtttcttactcgggagctggctgaagatggctactctggagttgaggtgcgagttacaccaaccaggacagaaatcattatcttagccaccagaacacagaatgttcttggtgagaagggccggcggattcgggaactgactgctgtagttcagaagaggtttggctttccagagggcagtgtagagctttatgctgaaaaggtggccactagaggtctgtgtgccattgcccaggcagagtctctgcgttacaaactcctaggagggcttgctgtgcggagggcctgctatggtgtgctgcggttcatcatggagagtggggccaaaggctgcgaggttgtggtgtctgggaaactccgaggacagagggctaaatccatgaagtttgtggatggcctgatgatccacagcggagaccctgttaactactacgttgacactgctgtgcgccacgtgttgctcagacagggtgtgctgggcatcaaggtgaagatcatgctgccctgggacccaactggtaagattggccctaagaagcccctgcctgaccacgtgagcattgtggaacccaaagatgagatactgcccaccacccccatctcagaacagaagggtgggaagccagagccgcctgccatgccccagccagtccccacagcataacagggtctccttggcagctgtattctggagtctggatgttgctctctaaagacctttaataaaattttgtacaaagacacaagg

SEQ ID NO: 21961 - protein, 243 aa, Homo sapiens; identical to SEQ ID NO: 2845

SEQ ID NO: 21962 - DNA, 1180 bp, Homo sapiens
ctcacttccgcccgcgagccacttcctttcctttcagcggagcgcggcggcaagatggcagtgcaaatatccaagaagaggaagtttgtcgctgatggcatcttcaaagctgaactgaatgagtttcttactcgggagctggctgaagatggctactctggagttgaggtgcgagttacaccaaccaggacagaaatcattatcttagccaccagaacacagaatgttcttggtgagaagggccggcggattcgggaactgactgctgtagttcagaagaggtttggctttccagagggcagtgtagagctttatgctgaaaaggtggccactagaggtctgtgtgccattgcccaggcagagtctctgcgttacaaactcctaggagggcttgctgtgcggagggcctgctatggtgtgctgcggttcatcatggagagtggggccaaaggctgcgaggttgtggtgtctgggaaactccgaggacagagggctaaatccatgaagtttgtggatggcctgatgatccacagcggagaccctgttaactactacgttgacactgctgtgcgccacgtgttgctcagacagggtgtgctgggcatcaaggtgaagatcatgctgccctgggacccaactggtaagattggccctaagaagcccctgcctgaccacgtgagcattgtggaacccaaagatgagatactgcccaccacccccatctcagaacagaagggtgggaagccagagccgcctgccatgccccagccagtccccacagcataacagggtctccttggcagctgtattctggagtctggatgttgctctctaaagacctttaataaaattttgtacaaagacacaaggtctgactagactgttcagtattcagactgaggggcatgttggcctctggagcattacatatcttcttggttttaaccatacttgtggtatttgcaagggccagaacagtaagacccaagcagagccaaccagagaaataatatttgtgtgatagagaaggctgatagcaagcaaggcagcaccttgattcgttgtcctgtagttcaggattgtaggtttagaagagggatatgtttgagtttttcctatgcataaggcgatccacgttgcacatagaaagtgaatataaatggccattatattttgtgtc

SEQ ID NO: 21963 - protein, 243 aa, Homo sapiens; identical to SEQ ID NO: 2845

SEQ ID NO: 21964 - DNA, 2087 bp, Homo sapiens
ctcacttccgcccgcgagccacttcctttcctttcagcggagcgcggcggcaagatggcagtgcaaatatccaagaagaggaagtttgtcgctgatggcatcttcaaagctgaactgaatgagtttcttactcgggagctggctgaagatggctactctggagttgaggtgcgagttacaccaaccaggacagaaatcattatcttagccaccagaacacagaatgttcttggtgagaagggccggcggattcgggaactgactgctgtagttcagaagaggtttggctttccagagggcagtgtagagctttatgctgaaaaggtggccactagaggtctgtgtgccattgcccaggcagagtctctgcgttacaaactcctaggagggcttgctgtgcggagggcctgctatggtgtgctgcggttcatcatggagagtggggccaaaggctgcgaggttgtggtgtctgggaaactccgaggacagagggctaaatccatgaagtttgtggatggcctgatgatccacagcggagaccctgttaactactacgttgacactgctgtgcgccacgtgttgctcagacagggtgtgctgggcatcaaggtgaagatcatgctgccctgggacccaactggtaagattggccctaagaagcccctgcctgaccacgtgagcattgtggaacccaaagatgagatactgcccaccacccccatctcagaacagaagggtgggaagccagagccgcctgccatgccccagccagtccccacagcataacagggtctccttggcagctgtattctggagtctggatgttgctctctaaagacctttaataaaattttgtacaaagacacaaggtctgactagactgttcagtattcagactgaggggcatgttggcctctggagcattacatatcttcttggttttaaccatacttgtggtatttgcaagggccagaacagtaagacccaagcagagccaaccagagaaataatatttgtgtgatagagaaggctgatagcaagcaaggcagcaccttgattcgttgtcctgtagttcaggattgtaggtttagaagagggatatgtttgagtttttcctatgcataaggcgatccacgttgcacatagaaagtgaatataaatggccattatattttgtgtcatgctgtgctctaagtgttctttacatatgtactcgttaatcaacctctctaaagtgtaaaggaaatttgcttgcaccactgaaggcacataaggctcagaagtaaatttgcctaagcagtataaagctatcattagaatccacattcctaagttgtgttctcttaggggatcatggaaccagtcattggtactacaggctattatgttctggagaactgtgaagaacatttaaattgtctctgattttatctatcaatgttttgaagtattttctaccagtgtctgtacttcacaagaaattcggcactattttttcaggcaaaactagtgagggacaggttggcttgaaaatcatgagactgttgttaaatcagatgctggttgatcacagaggggacttccagggaaagctgttatcaggtggctgcttcctggtgatgcagcctggctgatgagataaccctggctccacagatggcttagcaggtgctgtgatgatttggttttcttctcaattagactgagctgcacatggtgtttatattgcttggcacatggtaagggcttaatatttgaggtaattatgtagggcgtacactgacaagtatctgacccccccttcctttttgactcataaattggtcatcttaaccatttaagtgtacacttctatagtgacagagttagccctctgtccaagggatttgcatctgtggattcaaccaactttgggtcaaaaataatcaaaaaggatggttgtgtgtgtattgaacatgtagacttatttttcttattttcaaaatactatattttcttgtcacttattttcttgtacactgcagttgtaacagctatgtagcatgtacattaggtattaaaagtaatccagtgaagattgaaagtct

SEQ ID NO: 21965 - protein, 243 aa, Homo sapiens; identical to SEQ ID NO: 2845

SEQ ID NO: 21966 - DNA, 1367 bp, Homo sapiens
ctcacttccgcccgcgagccacttcctttcctttcagcggagcgcggcggcaagatggcagtgcaaatatccaagaagaggaagtttgtcgctgatggcatcttcaaagctgaactgaatgagtttcttactcgggagctggctgaagatggctactctggagttgaggtgcgagttacaccaaccaggacagaaatcattatcttagccaccagaacacagaatgttcttggtgagaagggccggcggattcgggaactgactgctgtagttcagaagaggtttggctttccagagggcagtgtagagctttatgctgaaaaggtggccactagaggtctgtgtgccattgcccaggcagagtctctgcgttacaaactcctaggagggcttgctgtgcggagggcctgctatggtgtgctgcggttcatcatggagagtggggccaaaggctgcgaggttgtggtgtctgggaaactccgaggacagagggctaaatccatgaagtttgtggatggcctgatgatccacagcggagaccctgttaactactacgttgacactgctgtgcgccacgtgttgctcagacagggtgtgctgggcatcaaggtgaagatcatgctgccctgggacccaactggtaagattggccctaagaagcccctgcctgaccacgtgagcattgtggaacccaaagatgagatactgcccaccacccccatctcagaacagaagggtgggaagccagagccgcctgccatgccccagccagtccccacagcataacagcctcttccatgagtggggagcccgctgcttgtctccagctcctagcagtgagtcctgataatctcaaatttaaggacagtaactttgtctgggatgagtgtgggaaaggatgtgtttgggaacagacgcgagcctgcagaggtgtttgtaaccatctctttctaagtggtgggaagcagacattttattctttaactgttaatatatatagtgtgtgttttttatgcatgaaatattttatagtttttaaaaatgcccacactactattttgaaagtaaatgaggtaatgtatgtgtcagaacccaatacccaaagcgatcgtagtaagaggtggggcctttgggaaggcattaaattgcttagggaatgagggtggaaccctcatgaatgagattagagccttataggagaggttggagggagttgcctggcctccctctcccatgtgaagactcagcaagaaaacattatttaggaagcagagagccctcatcaaacaccagatctgctggccacctgatctggcactttccagccttcagaactgtgagaaataaatttctgttgtctataaatc

SEQ ID NO: 21967 - protein, 243 aa, Homo sapiens; identical to SEQ ID NO: 2845

SEQ ID NO: 21968 - DNA, 574 bp, Homo sapiens
cttcctttcctttcagcggagcgcggcggcaagatggcagtgcaaatatccaagaagaggaagtttgtcgctgatggcatcttcaaagctgaactgaatgagtttcttactcgggagctggctgaagatggctactctggagttgaggtgcgagttacaccaaccaggacagaaatcattatcttagccaccagaacacagaatgttcttggtgagaagggccggcggattcgggaactgactgctgtagttcagaagaggtttggctttccagagggcagtgtagagctttatgctgaaaaggtggccactagaggtctgtgtgccattgcccaggcagagtctctgcgttacaaactcctaggagggcttgctgtgcggagggcctgctatggtgtgctgcggttcatcatggagagtggggccaaaggctgcgaggttgtggtgtctgggaaactccgaggacagagggctaaatccatgaagtttgtggatggcctgatgatccacagcggagaccctgttaactactacgttgacactgctgtgcgccacgtgttgctcagacagggtg

SEQ ID NO: 21969 - protein, 179 aa, Homo sapiens
MAVQISKKRKFVADGIFKAELNEFLTRELAEDGYSGVEVRVTPTRTEIIILATRTQNVLGEKGRRIRELTAVVQKRFGFPEGSVELYAEKVATRGLCAIAQAESLRYKLLGGLAVRRACYGVLRFIMESGAKGCEVVVSGKLRGQRAKSMKFVDGLMIHSGDPVNYYVDTAVRHVLLRQ

SEQ ID NO: 21970 - DNA, 1590 bp, Homo sapiens
cttcctttcctttcagcggagcgcggcggcaagatggcagtgcaaatatccaagaagaggaagtttgtcgctgatggcatcttcaaagctgaactgaatgagtttcttactcgggagctggctgaagatggctactctggagttgaggtgcgagttacaccaaccaggacagaaatcattatcttagccaccagaacacagaatgttcttggtgagaagggccggcggattcgggaactgactgctgtagttcagaagaggtttggctttccagagggcagtgtagagctttatgctgaaaaggtggccactagaggtctgtgtgccattgcccaggcagagtctctgcgttacaaactcctaggagggcttgctgtgcggagggcctgctatggtgtgctgcggttcatcatggagagtggggccaaaggctgcgaggttgtggtgtctgggaaactccgaggacagagggctaaatccatgaagtttgtggatggcctgatgatccacagcggagaccctgttaactactacgttgacactgctgtgcgccacgtgttgctcagacagggtgtgctgggcatcaaggtgaagatcatgctgccctgggacccaactggtaagattggccctaagaagcccctgcctgaccacgtgagcattgtggaacccaaagatgagatactgcccaccacccccatctcagaacagaagggtgggaagccagagccgcctgccatgccccagccagtccccacagcataacaggtatgtctgcaagggcaggggcctcttggggcataatagggtccttccgagtctttctgttaatacttgtatcccacattctggtaagcgtttggtgaataaaaatttcatttatttgctttatgtgggagaatacaagttgaaacctggggtctatttaacccttggttccaatgggacaggtgttgcctttattctttccagaaagaagttcctgcttttactcgtgtatatgaaatagttttcccttatcctcccttatttgctcaaaatttttggctcagtgcaacctctgcctcccatgttcaagcaattctcctgtctcagcctcccgagtagctgggattataggcacctgccaccaagcccagctaatttttgtgtttttagtagagacggggtttcaccttgttggccaggctggtctcagactcctgacctcaggtgagccactgtgcttggctgctcaagattttctaggcacttttgctattctgtcctttagcagcccctgtaaaacactaacaagcctcctgtggtcaacacttggggtttttttgtttataggtgttgtctctccaggtgccttgtattttttttttttatatgaaaaaggacaaacccttatgtatgcattttattaatgttgctgcaaaccctaagtgggagtgtgtatccatttggtaaatcaggaacttaataactctggtaaagtttcttacttttgtgctttatttggtttcagggtctccttggcagctgtattctggagtctggatgttgctctctaaagacctttaataaaattttgtacaaagacac

SEQ ID NO: 21971 - protein, 243 aa, Homo sapiens; identical to SEQ ID NO: 2845

SEQ ID NO: 21972 - DNA, 719 bp, Homo sapiens
cttcctttcctttcagcggagcgcggcggcaagatggcagtgcaaatatccaagaagaggaagtttgtcgctgatggcatcttcaaagctgaactgaatgagtttcttactcgggagctggctgaagatggctactctggagttgaggtgcgagttacaccaaccaggacagaaatcattatcttagccaccagaacacagaatgttcttggtgagaagggccggcggattcgggaactgactgctgtagttcagaagaggtttggctttccagagggcagtgtagagctttatgctgaaaaggtggccactagaggtctgtgtgccattgcccaggcagagtctctgcgttacaaactcctaggagggcttgctgtgcggagggcctgctatggtgtgctgcggttcatcatggagagtggggccaaaggctgcgaggttgtggtgtgctgggcatcaaggtgaagatcatgctgccctgggacccaactggtaagattggccctaagaagcccctgcctgaccacgtgagcattgtggaacccaaagatgagatactgcccaccacccccatctcagaacagaagggtgggaagccagagccgcctgccatgccccagccagtccccacagcataacagggtctccttggcagctgtattctggagtctggatgttgctctctaaagacctttaataaaattttgtacaaagacaca

SEQ ID NO: 21973 - protein, 143 aa, Homo sapiens
MAVQISKKRKFVADGIFKAELNEFLTRELAEDGYSGVEVRVTPTRTEIIILATRTQNVLGEKGRRIRELTAVVQKRFGFPEGSVELYAEKVATRGLCAIAQAESLRYKLLGGLAVRRACYGVLRFIMESGAKGCEVVVCWASR

SEQ ID NO: 21974 - DNA, 1031 bp, Homo sapiens
cttcctttcctttcagcggagcgcggcggcaagatggcagtgcaaatatccaagaagaggaagtttgtcgctgatggcatcttcaaagctgaactgaatgagtttcttactcgggagctggctgaagatggctactctggagttgaggtgcgagttacaccaaccaggacagaaatcattatcttagccaccagaacacagaatgttcttggtgagaagggccggcggattcgggaactgactgctgtagttcagaagaggtttggctttccagagggcagtgtagagctttatgctgaaaaggtggccactagaggtctgtgtgccattgcccaggcagagtctctgcgttacaaactcctaggagggcttgctgtgcggagggcctgctatggtgtgctgcggttcatcatggagagtggggccaaaggctgcgaggttgtggtgtgctgggcatcaaggtgaagatcatgctgccctgggacccaactggtaagattggccctaagaagcccctgcctgaccacgtgagcattgtggaacccaaagatgagatactgcccaccacccccatctcagaacagaagggtgggaagccagagccgcctgccatgccccagccagtccccacagcataacagggtctccttggcagctgtattctggagtctggatgttgctctctaaagacctttaataaaattttgtacaaagacacaaggtctgactagactgttcagtattcagactgaggggcatgttggcctctggagcattacatatcttcttggttttaaccatacttgtggtatttgcaagggccagaacagtaagacccaagcagagccaaccagagaaataatatttgtgtgatagagaaggctgatagcaagcaaggcagcaccttgattcgttgtcctgtagttcaggattgtaggtttagaagagggatatgtttgagtttttcctatgcataaggcgatccacgttgcacatagaaagtgaatataaatggccattatattttgtgt

SEQ ID NO: 21975 - protein, 143 aa, Homo sapiens; identical to SEQ ID NO: 21973

SEQ ID NO: 21976 - DNA, 862 bp, Homo sapiens
cttcctttcctttcagcggagcgcggcggcaagatggcagtgcaaatatccaagaagaggaagtttgtcgctgatggcatcttcaaagctgaactgaatgagtttcttactcgggagctggctgaagatggctactctggagttgaggtgcgagttacaccaaccaggacagaaatcattatcttagccaccagaacacagaatgttcttggtgagaagggccggcggattcgggaactgactgctgtagttcagaagaggtttggctttccagagggcagtgtagagctttatgctgaaaaggtggccactagaggtctgtgtgccattgcccaggcagagtctctgcgttacaaactcctaggagggcttgctgtgcggagggcctgctatggtgtgctgcggttcatcatggagaggtgggaagccagagccgcctgccatgccccagccagtccccacagcataacagggtctccttggcagctgtattctggagtctggatgttgctctctaaagacctttaataaaattttgtacaaagacacaaggtctgactagactgttcagtattcagactgaggggcatgttggcctctggagcattacatatcttcttggttttaaccatacttgtggtatttgcaagggccagaacagtaagacccaagcagagccaaccagagaaataatatttgtgtgatagagaaggctgatagcaagcaaggcagcaccttgattcgttgtcctgtagttcaggattgtaggtttagaagagggatatgtttgagtttttcctatgcataaggcgatccacgttgcacatagaaagtgaatataaatggccattatattttgtgt

SEQ ID NO: 21977 - protein, 164 aa, Homo sapiens [sequence omitted]

SEQ ID NO: 21978 - DNA, 1903 bp, Homo sapiens
cttcctttcctttcagcggagcgcggcggcaagatggcagtgcaaatatccaagaagaggaagtttgtcgctgatggcatcttcaaagctgaactgaatgagtttcttactcgggagctggctgaagatggctactctggagttgaggtgcgagttacaccaaccaggacagaaatcattatcttagccaccagaacacagaatgttcttggtgagaagggccggcggattcgggaactgactgctgtagttcagaagaggtttggctttccagagggcagtgtagagctttatgctgaaaaggtggccactagaggtctgtgtgccattgcccaggcagagtctctgcgttacaaactcctaggagggcttgctgtgcggagggcctgctatggtgtgctgcggttcatcatggagagtggggccaaaggctgcgaggttgtggtgtctgggaaactccgaggacagagggctaaatccatgaagtttgtggatggcctgatgatccacagcggagaccctgttaactactacgttgacactgctgtgcgccacgtgttgctcagacagggtgtgctgggcatcaaggtgaagatcatgctgccctgggacccaactggtaagattggccctaagaagcccctgcctgaccacgtgagcattgtggaacccaaagatgagatactgcccaccacccccatctcagaacagaagggtgggaagccagagccgcctgccatgccccagccagtccccacagcataacaggtatgtctgcaagggcaggggcctcttggggcataatagggtccttccgagtctttctgttaatacttgtatcccacattctggtaagcgtttggtgaataaaaatttcatttatttgctttatgtgggagaatacaagttgaaacctggggtctatttaacccttggttccaatgggacaggtgttgcctttattctttccagaaagaagttcctgcttttactcgtgtatatgaaatagttttcccttatcctcccttatttgctcaaaatttttggctcagtgcaacctctgcctcccatgttcaagcaattctcctgtctcagcctcccgagtagctgggattataggcacctgccaccaagcccagctaatttttgtgtttttagtagagacggggtttcaccttgttggccaggctggtctcagactcctgacctcaggtgagccactgtgcttggctgctcaagattttctaggcacttttgctattctgtcctttagcagcccctgtaaaacactaacaagcctcctgtggtcaacacttggggtttttttgtttataggtgttgtctctccaggtgccttgtattttttttttttatatgaaaaaggacaaacccttatgtatgcattttattaatgttgctgcaaaccctaagtgggagtgtgtatccatttggtaaatcaggaacttaataactctggtaaagtttcttacttttgtgctttatttggtttcagggtctccttggcagctgtattctggagtctggatgttgctctctaaagacctttaataaaattttgtacaaagacacaaggtctgactagactgttcagtattcagactgaggggcatgttggcctctggagcattacatatcttcttggttttaaccatacttgtggtatttgcaagggccagaacagtaagacccaagcagagccaaccagagaaataatatttgtgtgatagagaaggctgatagcaagcaaggcagcaccttgattcgttgtcctgtagttcaggattgtaggtttagaagagggatatgtttgagtttttcctatgcataaggcgatccacgttgcacatagaaagtgaatataaatggccattatattttgtgt

SEQ ID NO: 21979 - protein, 243 aa, Homo sapiens; identical to SEQ ID NO: 2845

SEQ ID NO: 21980 - DNA, 1939 bp, Homo sapiens
cttcctttcctttcagcggagcgcggcggcaagatggcagtgcaaatatccaagaagaggaagtttgtcgctgatggcatcttcaaagctgaactgaatgagtttcttactcgggagctggctgaagatggctactctggagttgaggtgcgagttacaccaaccaggacagaaatcattatcttagccaccagaacacagaatgttcttggtgagaagggccggcggattcgggaactgactgctgtagttcagaagaggtttggctttccagagggcagtgtagagctttatgctgaaaaggtggccactagaggtctgtgtgccattgcccaggcagagtctctgcgttacaaactcctaggagggcttgctgtgcggagggcctgctatggtgtgctgcggttcatcatggagagtggggccaaaggctgcgaggttgtggtgtgctgggcatcaaggtgaagatcatgctgccctgggacccaactggtaagattggccctaagaagcccctgcctgaccacgtgagcattgtggaacccaaagatgagatactgcccaccacccccatctcagaacagaagggtgggaagccagagccgcctgccatgccccagccagtccccacagcataacagggtctccttggcagctgtattctggagtctggatgttgctctctaaagacctttaataaaattttgtacaaagacacaaggtctgactagactgttcagtattcagactgaggggcatgttggcctctggagcattacatatcttcttggttttaaccatacttgtggtatttgcaagggccagaacagtaagacccaagcagagccaaccagagaaataatatttgtgtgatagagaaggctgatagcaagcaaggcagcaccttgattcgttgtcctgtagttcaggattgtaggtttagaagagggatatgtttgagtttttcctatgcataaggcgatccacgttgcacatagaaagtgaatataaatggccattatattttgtgtcatgctgtgctctaagtgttctttacatatgtactcgttaatcaacctctctaaagtgtaaaggaaatttgcttgcaccactgaaggcacataaggctcagaagtaaatttgcctaagcagtataaagctatcattagaatccacattcctaagttgtgttctcttaggggatcatggaaccagtcattggtactacaggctattatgttctggagaactgtgaagaacatttaaattgtctctgattttatctatcaatgttttgaagtattttctaccagtgtctgtacttcacaagaaattcggcactattttttcaggcaaaactagtgagggacaggttggcttgaaaatcatgagactgttgttaaatcagatgctggttgatcacagaggggacttccagggaaagctgttatcaggtggctgcttcctggtgatgcagcctggctgatgagataaccctggctccacagatggcttagcaggtgctgtgatgatttggttttcttctcaattagactgagctgcacatggtgtttatattgcttggcacatggtaagggcttaatatttgaggtaattatgtagggcgtacactgacaagtatctgacccccccttcctttttgactcataaattggtcatcttaaccatttaagtgtacacttctatagtgacagagttagccctctgtccaagggatttgcatctgtggattcaaccaactttgggtcaaaaataatcaaaaaggatggttgtgtgtgtattgaacatgtagacttatttttcttattttcaaaatactatattttcttgtcacttattttcttgtacactgcagttgtaacagctatgtagcatgtacattaggtattaaaagtaatccagtgaagattgaaagtct

SEQ ID NO: 21981 - protein, 143 aa, Homo sapiens; identical to SEQ ID NO: 21973

SEQ ID NO: 21982 - DNA, 1770 bp, Homo sapiens
cttcctttcctttcagcggagcgcggcggcaagatggcagtgcaaatatccaagaagaggaagtttgtcgctgatggcatcttcaaagctgaactgaatgagtttcttactcgggagctggctgaagatggctactctggagttgaggtgcgagttacaccaaccaggacagaaatcattatcttagccaccagaacacagaatgttcttggtgagaagggccggcggattcgggaactgactgctgtagttcagaagaggtttggctttccagagggcagtgtagagctttatgctgaaaaggtggccactagaggtctgtgtgccattgcccaggcagagtctctgcgttacaaactcctaggagggcttgctgtgcggagggcctgctatggtgtgctgcggttcatcatggagaggtgggaagccagagccgcctgccatgccccagccagtccccacagcataacagggtctccttggcagctgtattctggagtctggatgttgctctctaaagacctttaataaaattttgtacaaagacacaaggtctgactagactgttcagtattcagactgaggggcatgttggcctctggagcattacatatcttcttggttttaaccatacttgtggtatttgcaagggccagaacagtaagacccaagcagagccaaccagagaaataatatttgtgtgatagagaaggctgatagcaagcaaggcagcaccttgattcgttgtcctgtagttcaggattgtaggtttagaagagggatatgtttgagtttttcctatgcataaggcgatccacgttgcacatagaaagtgaatataaatggccattatattttgtgtcatgctgtgctctaagtgttctttacatatgtactcgttaatcaacctctctaaagtgtaaaggaaatttgcttgcaccactgaaggcacataaggctcagaagtaaatttgcctaagcagtataaagctatcattagaatccacattcctaagttgtgttctcttaggggatcatggaaccagtcattggtactacaggctattatgttctggagaactgtgaagaacatttaaattgtctctgattttatctatcaatgttttgaagtattttctaccagtgtctgtacttcacaagaaattcggcactattttttcaggcaaaactagtgagggacaggttggcttgaaaatcatgagactgttgttaaatcagatgctggttgatcacagaggggacttccagggaaagctgttatcaggtggctgcttcctggtgatgcagcctggctgatgagataaccctggctccacagatggcttagcaggtgctgtgatgatttggttttcttctcaattagactgagctgcacatggtgtttatattgcttggcacatggtaagggcttaatatttgaggtaattatgtagggcgtacactgacaagtatctgacccccccttcctttttgactcataaattggtcatcttaaccatttaagtgtacacttctatagtgacagagttagccctctgtccaagggatttgcatctgtggattcaaccaactttgggtcaaaaataatcaaaaaggatggttgtgtgtgtattgaacatgtagacttatttttcttattttcaaaatactatattttcttgtcacttattttcttgtacactgcagttgtaacagctatgtagcatgtacattaggtattaaaagtaatccagtgaagattgaaagtct

SEQ ID NO: 21983 - protein, 164 aa, Homo sapiens [sequence omitted]

SEQ ID NO: 21984 - DNA, 2811 bp, Homo sapiens
cttcctttcctttcagcggagcgcggcggcaagatggcagtgcaaatatccaagaagaggaagtttgtcgctgatggcatcttcaaagctgaactgaatgagtttcttactcgggagctggctgaagatggctactctggagttgaggtgcgagttacaccaaccaggacagaaatcattatcttagccaccagaacacagaatgttcttggtgagaagggccggcggattcgggaactgactgctgtagttcagaagaggtttggctttccagagggcagtgtagagctttatgctgaaaaggtggccactagaggtctgtgtgccattgcccaggcagagtctctgcgttacaaactcctaggagggcttgctgtgcggagggcctgctatggtgtgctgcggttcatcatggagagtggggccaaaggctgcgaggttgtggtgtctgggaaactccgaggacagagggctaaatccatgaagtttgtggatggcctgatgatccacagcggagaccctgttaactactacgttgacactgctgtgcgccacgtgttgctcagacagggtgtgctgggcatcaaggtgaagatcatgctgccctgggacccaactggtaagattggccctaagaagcccctgcctgaccacgtgagcattgtggaacccaaagatgagatactgcccaccacccccatctcagaacagaagggtgggaagccagagccgcctgccatgccccagccagtccccacagcataacaggtatgtctgcaagggcaggggcctcttggggcataatagggtccttccgagtctttctgttaatacttgtatcccacattctggtaagcgtttggtgaataaaaatttcatttatttgctttatgtgggagaatacaagttgaaacctggggtctatttaacccttggttccaatgggacaggtgttgcctttattctttccagaaagaagttcctgcttttactcgtgtatatgaaatagttttcccttatcctcccttatttgctcaaaatttttggctcagtgcaacctctgcctcccatgttcaagcaattctcctgtctcagcctcccgagtagctgggattataggcacctgccaccaagcccagctaatttttgtgtttttagtagagacggggtttcaccttgttggccaggctggtctcagactcctgacctcaggtgagccactgtgcttggctgctcaagattttctaggcacttttgctattctgtcctttagcagcccctgtaaaacactaacaagcctcctgtggtcaacacttggggtttttttgtttataggtgttgtctctccaggtgccttgtattttttttttttatatgaaaaaggacaaacccttatgtatgcattttattaatgttgctgcaaaccctaagtgggagtgtgtatccatttggtaaatcaggaacttaataactctggtaaagtttcttacttttgtgctttatttggtttcagggtctccttggcagctgtattctggagtctggatgttgctctctaaagacctttaataaaattttgtacaaagacacaaggtctgactagactgttcagtattcagactgaggggcatgttggcctctggagcattacatatcttcttggttttaaccatacttgtggtatttgcaagggccagaacagtaagacccaagcagagccaaccagagaaataatatttgtgtgatagagaaggctgatagcaagcaaggcagcaccttgattcgttgtcctgtagttcaggattgtaggtttagaagagggatatgtttgagtttttcctatgcataaggcgatccacgttgcacatagaaagtgaatataaatggccattatattttgtgtcatgctgtgctctaagtgttctttacatatgtactcgttaatcaacctctctaaagtgtaaaggaaatttgcttgcaccactgaaggcacataaggctcagaagtaaatttgcctaagcagtataaagctatcattagaatccacattcctaagttgtgttctcttaggggatcatggaaccagtcattggtactacaggctattatgttctggagaactgtgaagaacatttaaattgtctctgattttatctatcaatgttttgaagtattttctaccagtgtctgtacttcacaagaaattcggcactattttttcaggcaaaactagtgagggacaggttggcttgaaaatcatgagactgttgttaaatcagatgctggttgatcacagaggggacttccagggaaagctgttatcaggtggctgcttcctggtgatgcagcctggctgatgagataaccctggctccacagatggcttagcaggtgctgtgatgatttggttttcttctcaattagactgagctgcacatggtgtttatattgcttggcacatggtaagggcttaatatttgaggtaattatgtagggcgtacactgacaagtatctgacccccccttcctttttgactcataaattggtcatcttaaccatttaagtgtacacttctatagtgacagagttagccctctgtccaagggatttgcatctgtggattcaaccaactttgggtcaaaaataatcaaaaaggatggttgtgtgtgtattgaacatgtagacttatttttcttattttcaaaatactatattttcttgtcacttattttcttgtacactgcagttgtaacagctatgtagcatgtacattaggtattaaaagtaatccagtgaagattgaaagtct

SEQ ID NO: 21985 - protein, 243 aa, Homo sapiens; identical to SEQ ID NO: 2845

SEQ ID NO: 21986 - DNA, 470 bp, Homo sapiens
cctttcctttcagcggagcgcggcggcaagatggcagtgcaaatatccaagaagaggaagtttgtcgctgatggcatcttcaaagctgaactgaatgagtttcttactcgggagctggctgaagatggctactctggagttgaggtgcgagttacaccaaccaggacagaaatcattatcttagccaccagaacacagaatgttcttggtgagaagggccggcggattcgggaactgactgctgtagttcagaagaggtttggctttccagagggcagtgtagagcattgtggaacccaaagatgagatactgcccaccacccccatctcagaacagaagggtgggaagccagagccgcctgccatgccccagccagtccccacagcataacagggtctccttggcagctgtattctggagtctggatgttgctctctaaagacctttaataaaattttgtacaaagaca

SEQ ID NO: 21987 - protein, 91 aa, Homo sapiens
MAVQISKKRKFVADGIFKAELNEFLTRELAEDGYSGVEVRVTPTRTEIIILATRTQNVLGEKGRRIRELTAVVQKRFGFPEGSVEHCGTQR

SEQ ID NO: 21988 - DNA, 588 bp, Homo sapiens
cctttcctttcagcggagcgcggcggcaagatggcagtgcaaatatccaagaagaggaagtttgtcgctgatggcatcttcaaagctgaactgaatgagtttcttactcgggagctggctgaagatggctactctggagttgaggtgcgagttacaccaaccaggacagaaatcattatcttagccaccagaacacagaatgttcttggtgagaagggccggcggattcgggaactgactgctgtagttcagaagaggtttggctttccagagggcagtgtagagctttatgctgaaaaggtggccactagaggtgtgctgggcatcaaggtgaagatcatgctgccctgggacccaactggtaagattggccctaagaagcccctgcctgaccacgtgagcattgtggaacccaaagatgagatactgcccaccacccccatctcagaacagaagggtgggaagccagagccgcctgccatgccccagccagtccccacagcataacagggtctccttggcagctgtattctggagtctggatgttgctctctaaagacctttaataaaattttgtacaaagacaca

SEQ ID NO: 21989 - protein, 158 aa, Homo sapiens
MAVQISKKRKFVADGIFKAELNEFLTRELAEDGYSGVEVRVTPTRTEIIILATRTQNVLGEKGRRIRELTAVVQKRFGFPEGSVELYAEKVATRGVLGIKVKIMLPWDPTGKIGPKKPLPDHVSIVEPKDEILPTTPISEQKGGKPEPPAMPQPVPTA

SEQ ID NO: 21990 - DNA, 523 bp, Homo sapiens
cctttcctttcagcggagcgcggcggcaagatggcagtgcaaatatccaagaagaggaagtttgtcgctgatggcatcttcaaagctgaactgaatgagtttcttactcgggagctggctgaagatggctactctggagttgaggtgcgagttacaccaaccaggacagaaatcattatcttagccaccagaacacagaatgttcttggtgagaagggccggcggattcgggaactgactgctgtagttcagaagaggtttggctttccagagggcagtgtagagctttatgctgaaaagattggccctaagaagcccctgcctgaccacgtgagcattgtggaacccaaagatgagatactgcccaccacccccatctcagaacagaagggtgggaagccagagccgcctgccatgccccagccagtccccacagcataacagggtctccttggcagctgtattctggagtctggatgttgctctctaaagacctttaataaaattttgtacaaagacacaa

SEQ ID NO: 21991 - protein, 136 aa, Homo sapiens
MAVQISKKRKFVADGIFKAELNEFLTRELAEDGYSGVEVRVTPTRTEIIILATRTQNVLGEKGRRIRELTAVVQKRFGFPEGSVELYAEKIGPKKPLPDHVSIVEPKDEILPTTPISEQKGGKPEPPAMPQPVPTA

SEQ ID NO: 21992 - DNA, 892 bp, Homo sapiens
cctttcctttcagcggagcgcggcggcaagatggcagtgcaaatatccaagaagaggaagtttgtcgctgatggcatcttcaaagctgaactgaatgagtttcttactcgggagctggctgaagatggctactctggagttgaggtgcgagttacaccaaccaggacagaaatcattatcttagccaccagaacacagaatgttcttggtgagaagggccggcggattcgggaactgactgctgtagttcagaagaggtttggctttccagagggcagtgtagagttgaaaataatggtgatggtaacaggatatcccttgcttcctttaaagctttatgctgaaaaggtggccactagaggtctgtgtgccattgcccaggcagagtctctgcgttacaaactcctaggagggcttgctgtgcggagggcctgctatggtgtgctgcggttcatcatggagagtggggccaaaggctgcgaggttgtggtgtctgggaaactccgaggacagagggctaaatccatgaagtttgtggatggcctgatgatccacagcggagaccctgttaactactacgttgacactgctgtgcgccacgtgttgctcagacagggtgtgctgggcatcaaggtgaagatcatgctgccctgggacccaactggtaagattggccctaagaagcccctgcctgaccacgtgagcattgtggaacccaaagatgagatactgcccaccacccccatctcagaacagaagggtgggaagccagagccgcctgccatgccccagccagtccccacagcataacagggtctccttggcagctgtattctggagtctggatgttgctctctaaagacctttaataaaattttgtacaaagacacaa

SEQ ID NO: 21993 - protein, 259 aa, Homo sapiens
MAVQISKKRKFVADGIFKAELNEFLTRELAEDGYSGVEVRVTPTRTEIIILATRTQNVLGEKGRRIRELTAVVQKRFGFPEGSVELKIMVMVTGYPLLPLKLYAEKVATRGLCAIAQAESLRYKLLGGLAVRRACYGVLRFIMESGAKGCEVVVSGKLRGQRAKSMKFVDGLMIHSGDPVNYYVDTAVRHVLLRQGVLGIKVKIMLPWDPTGKIGPKKPLPDHVSIVEPKDEILPTTPISEQKGGKPEPPAMPQPVPTA

SEQ ID NO: 21994 - DNA, 749 bp, Homo sapiens
cctttcctttcagcggagcgcggcggcaagatggcagtgcaaatatccaagaagaggaagtttgtcgctgatggcatcttcaaagctgaactgaatgagtttcttactcgggagctggctgaagatggctactctggagttgaggtgcgagttacaccaaccaggacagaaatcattatcttagccaccagaacacagaatgttcttggtgagaagggccggcggattcgggaactgactgctgtagttcagaagaggtttggctttccagagggcagtgtagagggcctgctatggtgtgctgcggttcatcatggagagtggggccaaaggctgcgaggttgtggtgtctgggaaactccgaggacagagggctaaatccatgaagtttgtggatggcctgatgatccacagcggagaccctgttaactactacgttgacactgctgtgcgccacgtgttgctcagacagggtgtgctgggcatcaaggtgaagatcatgctgccctgggacccaactggtaagattggccctaagaagcccctgcctgaccacgtgagcattgtggaacccaaagatgagatactgcccaccacccccatctcagaacagaagggtgggaagccagagccgcctgccatgccccagccagtccccacagcataacagggtctccttggcagctgtattctggagtctggatgttgctctctaaagacctttaataaaattttgtacaaagacacaa

SEQ ID NO: 21995 - protein, 117 aa, Homo sapiens
MESGAKGCEVVVSGKLRGQRAKSMKFVDGLMIHSGDPVNYYVDTAVRHVLLRQGVLGIKVKIMLPWDPTGKIGPKKPLPDHVSIVEPKDEILPTTPISEQKGGKPEPPAMPQPVPTA

SEQ ID NO: 21996 - DNA, 834 bp, Homo sapiens
cctttcctttcagcggagcgcggcggcaagatggcagtgcaaatatccaagaagaggaagtttgtcgctgatggcatcttcaaagctgaactgaatgagtttcttactcgggagctggctgaagatggctactctggagttgaggtgcgagttacaccaaccaggacagaaatcattatcttagccaccagaacacagaatgttcttggtgagaagggccggcggattcgggaactgactgctgtagttcagaagaggtttggctttccagagggcagtgtagagctttatgctgaaaagattggccctaagaagcccctgcctgaccacgtgagcattgtggaacccaaagatgagatactgcccaccacccccatctcagaacagaagggtgggaagccagagccgcctgccatgccccagccagtccccacagcataacagggtctccttggcagctgtattctggagtctggatgttgctctctaaagacctttaataaaattttgtacaaagacacaaggtctgactagactgttcagtattcagactgaggggcatgttggcctctggagcattacatatcttcttggttttaaccatacttgtggtatttgcaagggccagaacagtaagacccaagcagagccaaccagagaaataatatttgtgtgatagagaaggctgatagcaagcaaggcagcaccttgattcgttgtcctgtagttcaggattgtaggtttagaagagggatatgtttgagtttttcctatgcataaggcgatccacgttgcacatagaaagtgaatataaatggccattatattttgtgt

SEQ ID NO: 21997 - protein, 136 aa, Homo sapiens; identical to SEQ ID NO: 21991

SEQ ID NO: 21998 - DNA, 784 bp, Homo sapiens
cctttcctttcagcggagcgcggcggcaagatggcagtgcaaatatccaagaagaggaagtttgtcgctgatggcatcttcaaagctgaactgaatgagtttcttactcgggagctggctgaagatggctactctggagttgaggtgcgagttacaccaaccaggacagaaatcattatcttagccaccagaacacagaatgttcttggtgagaagggccggcggattcgggaactgactgctgtagttcagaagaggtttggctttccagagggcagtgtagagcattgtggaacccaaagatgagatactgcccaccacccccatctcagaacagaagggtgggaagccagagccgcctgccatgccccagccagtccccacagcataacagggtctccttggcagctgtattctggagtctggatgttgctctctaaagacctttaataaaattttgtacaaagacacaaggtctgactagactgttcagtattcagactgaggggcatgttggcctctggagcattacatatcttcttggttttaaccatacttgtggtatttgcaagggccagaacagtaagacccaagcagagccaaccagagaaataatatttgtgtgatagagaaggctgatagcaagcaaggcagcaccttgattcgttgtcctgtagttcaggattgtaggtttagaagagggatatgtttgagtttttcctatgcataaggcgatccacgttgcacatagaaagtgaatataaatggccattatattttgtgt

SEQ ID NO: 21999 - protein, 91 aa, Homo sapiens; identical to SEQ ID NO: 21987

SEQ ID NO: 22000 - DNA, 1203 bp, Homo sapiens
cctttcctttcagcggagcgcggcggcaagatggcagtgcaaatatccaagaagaggaagtttgtcgctgatggcatcttcaaagctgaactgaatgagtttcttactcgggagctggctgaagatggctactctggagttgaggtgcgagttacaccaaccaggacagaaatcattatcttagccaccagaacacagaatgttcttggtgagaagggccggcggattcgggaactgactgctgtagttcagaagaggtttggctttccagagggcagtgtagagttgaaaataatggtgatggtaacaggatatcccttgcttcctttaaagctttatgctgaaaaggtggccactagaggtctgtgtgccattgcccaggcagagtctctgcgttacaaactcctaggagggcttgctgtgcggagggcctgctatggtgtgctgcggttcatcatggagagtggggccaaaggctgcgaggttgtggtgtctgggaaactccgaggacagagggctaaatccatgaagtttgtggatggcctgatgatccacagcggagaccctgttaactactacgttgacactgctgtgcgccacgtgttgctcagacagggtgtgctgggcatcaaggtgaagatcatgctgccctgggacccaactggtaagattggccctaagaagcccctgcctgaccacgtgagcattgtggaacccaaagatgagatactgcccaccacccccatctcagaacagaagggtgggaagccagagccgcctgccatgccccagccagtccccacagcataacagggtctccttggcagctgtattctggagtctggatgttgctctctaaagacctttaataaaattttgtacaaagacacaaggtctgactagactgttcagtattcagactgaggggcatgttggcctctggagcattacatatcttcttggttttaaccatacttgtggtatttgcaagggccagaacagtaagacccaagcagagccaaccagagaaataatatttgtgtgatagagaaggctgatagcaagcaaggcagcaccttgattcgttgtcctgtagttcaggattgtaggtttagaagagggatatgtttgagtttttcctatgcataaggcgatccacgttgcacatagaaagtgaatataaatggccattatattttgtgt

SEQ ID NO: 22001 - protein, 259 aa, Homo sapiens; identical to SEQ ID NO: 21993

SEQ ID NO: 22002 - DNA, 900 bp, Homo sapiens
cctttcctttcagcggagcgcggcggcaagatggcagtgcaaatatccaagaagaggaagtttgtcgctgatggcatcttcaaagctgaactgaatgagtttcttactcgggagctggctgaagatggctactctggagttgaggtgcgagttacaccaaccaggacagaaatcattatcttagccaccagaacacagaatgttcttggtgagaagggccggcggattcgggaactgactgctgtagttcagaagaggtttggctttccagagggcagtgtagagctttatgctgaaaaggtggccactagaggtgtgctgggcatcaaggtgaagatcatgctgccctgggacccaactggtaagattggccctaagaagcccctgcctgaccacgtgagcattgtggaacccaaagatgagatactgcccaccacccccatctcagaacagaagggtgggaagccagagccgcctgccatgccccagccagtccccacagcataacagggtctccttggcagctgtattctggagtctggatgttgctctctaaagacctttaataaaattttgtacaaagacacaaggtctgactagactgttcagtattcagactgaggggcatgttggcctctggagcattacatatcttcttggttttaaccatacttgtggtatttgcaagggccagaacagtaagacccaagcagagccaaccagagaaataatatttgtgtgatagagaaggctgatagcaagcaaggcagcaccttgattcgttgtcctgtagttcaggattgtaggtttagaagagggatatgtttgagtttttcctatgcataaggcgatccacgttgcacatagaaagtgaatataaatggccattatattttgtgt

SEQ ID NO: 22003 - protein, 158 aa, Homo sapiens; identical to SEQ ID NO: 21989

SEQ ID NO: 22004 - DNA, 771 bp, Homo sapiens
cctttcctttcagcggagcgcggcggcaagatggcagtgcaaatatccaagaagaggaagtttgtcgctgatggcatcttcaaagctgaactgaatgagtttcttactcgggaaactgactgctgtagttcagaagaggtttggctttccagagggcagtgtagagctttatgctgaaaaggtggccactagaggtctgtgtgccattgcccaggcagagtctctgcgttacaaactcctaggagggcttgctgtgcggagggcctgctatggtgtgctgcggttcatcatggagagtggggccaaaggctgcgaggttgtggtgtctgggaaactccgaggacagagggctaaatccatgaagtttgtggatggcctgatggtctccttggcagctgtattctggagtctggatgttgctctctaaagacctttaataaaattttgtacaaagacacaaggtctgactagactgttcagtattcagactgaggggcatgttggcctctggagcattacatatcttcttggttttaaccatacttgtggtatttgcaagggccagaacagtaagacccaagcagagccaaccagagaaataatatttgtgtgatagagaaggctgatagcaagcaaggcagcaccttgattcgttgtcctgtagttcaggattgtaggtttagaagagggatatgtttgagtttttcctatgcataaggcgatccacgttgcacatagaaagtgaatataaatggccattatattttgtgt

SEQ ID NO: 22005 - protein, 110 aa, Homo sapiens
MSFLLGKLTAVVQKRFGFPEGSVELYAEKVATRGLCAIAQAESLRYKLLGGLAVRRACYGVLRFIMESGAKGCEVVVSGKLRGQRAKSMKFVDGLMVSLAAVFWSLDVAL

SEQ ID NO: 22006 - DNA, 1060 bp, Homo sapiens
cctttcctttcagcggagcgcggcggcaagatggcagtgcaaatatccaagaagaggaagtttgtcgctgatggcatcttcaaagctgaactgaatgagtttcttactcgggagctggctgaagatggctactctggagttgaggtgcgagttacaccaaccaggacagaaatcattatcttagccaccagaacacagaatgttcttggtgagaagggccggcggattcgggaactgactgctgtagttcagaagaggtttggctttccagagggcagtgtagagggcctgctatggtgtgctgcggttcatcatggagagtggggccaaaggctgcgaggttgtggtgtctgggaaactccgaggacagagggctaaatccatgaagtttgtggatggcctgatgatccacagcggagaccctgttaactactacgttgacactgctgtgcgccacgtgttgctcagacagggtgtgctgggcatcaaggtgaagatcatgctgccctgggacccaactggtaagattggccctaagaagcccctgcctgaccacgtgagcattgtggaacccaaagatgagatactgcccaccacccccatctcagaacagaagggtgggaagccagagccgcctgccatgccccagccagtccccacagcataacagggtctccttggcagctgtattctggagtctggatgttgctctctaaagacctttaataaaattttgtacaaagacacaaggtctgactagactgttcagtattcagactgaggggcatgttggcctctggagcattacatatcttcttggttttaaccatacttgtggtatttgcaagggccagaacagtaagacccaagcagagccaaccagagaaataatatttgtgtgatagagaaggctgatagcaagcaaggcagcaccttgattcgttgtcctgtagttcaggattgtaggtttagaagagggatatgtttgagtttttcctatgcataaggcgatccacgttgcacatagaaagtgaatataaatggccattatattttgtgt

SEQ ID NO: 22007 - protein, 117 aa, Homo sapiens; identical to SEQ ID NO: 21995

SEQ ID NO: 22008 - DNA, 1742 bp, Homo sapiens
cctttcctttcagcggagcgcggcggcaagatggcagtgcaaatatccaagaagaggaagtttgtcgctgatggcatcttcaaagctgaactgaatgagtttcttactcgggagctggctgaagatggctactctggagttgaggtgcgagttacaccaaccaggacagaaatcattatcttagccaccagaacacagaatgttcttggtgagaagggccggcggattcgggaactgactgctgtagttcagaagaggtttggctttccagagggcagtgtagagctttatgctgaaaagattggccctaagaagcccctgcctgaccacgtgagcattgtggaacccaaagatgagatactgcccaccacccccatctcagaacagaagggtgggaagccagagccgcctgccatgccccagccagtccccacagcataacagggtctccttggcagctgtattctggagtctggatgttgctctctaaagacctttaataaaattttgtacaaagacacaaggtctgactagactgttcagtattcagactgaggggcatgttggcctctggagcattacatatcttcttggttttaaccatacttgtggtatttgcaagggccagaacagtaagacccaagcagagccaaccagagaaataatatttgtgtgatagagaaggctgatagcaagcaaggcagcaccttgattcgttgtcctgtagttcaggattgtaggtttagaagagggatatgtttgagtttttcctatgcataaggcgatccacgttgcacatagaaagtgaatataaatggccattatattttgtgtcatgctgtgctctaagtgttctttacatatgtactcgttaatcaacctctctaaagtgtaaaggaaatttgcttgcaccactgaaggcacataaggctcagaagtaaatttgcctaagcagtataaagctatcattagaatccacattcctaagttgtgttctcttaggggatcatggaaccagtcattggtactacaggctattatgttctggagaactgtgaagaacatttaaattgtctctgattttatctatcaatgttttgaagtattttctaccagtgtctgtacttcacaagaaattcggcactattttttcaggcaaaactagtgagggacaggttggcttgaaaatcatgagactgttgttaaatcagatgctggttgatcacagaggggacttccagggaaagctgttatcaggtggctgcttcctggtgatgcagcctggctgatgagataaccctggctccacagatggcttagcaggtgctgtgatgatttggttttcttctcaattagactgagctgcacatggtgtttatattgcttggcacatggtaagggcttaatatttgaggtaattatgtagggcgtacactgacaagtatctgacccccccttcctttttgactcataaattggtcatcttaaccatttaagtgtacacttctatagtgacagagttagccctctgtccaagggatttgcatctgtggattcaaccaactttgggtcaaaaataatcaaaaaggatggttgtgtgtgtattgaacatgtagacttatttttcttattttcaaaatactatattttcttgtcacttattttcttgtacactgcagttgtaacagctatgtagcatgtacattaggtattaaaagtaatccagtgaagattgaaagtct

SEQ ID NO: 22009 - protein, 136 aa, Homo sapiens; identical to SEQ ID NO: 21991
